United States Patent Application Publication US 2011/0183924 A1 - sequence listing, part 79

SEQ ID NO: 280900 - DNA, 2394 bp, Homo sapiens
agcagatcttcttccgggcggacgtggagccggaagcggaggttccgggctccgggatgaaaggagggaacgcagacagctggcagagagagaagttggctagcatggaatcaccagaggagcctggagcatccatggatgagaactactttgtgaactacactttcaaagatcggtcacattcaggccgtgtggctcaaggcatcatgaaactgtgtctagaggaggagctctttgctgatgtcaccatttcggtggaaggccgggagtttcagctccatcggctggtcctctcagctcagagctgcttcttccgatccatgttcacttccaacctgaaggaggcccacaaccgggtgattgtgctgcaggatgtcagcgagtctgttttccagctcctggttgattatatctaccatgggactgtgaaacttcgagctgaggagttgcaggaaatttatgaggtgtcagacatgtatcagctgacatctctctttgaggaatgctctcggtttttggcccgcacagtgcaagtgggaaactgccttcaggtgatgtggctggcagatcggcacagtgatcctgagctctatacggctgccaagcactgtgccaagacccacctggcccagctgcagaatacagaggaatttctccacttgccccaccgcttactcacagatatcatctcggatggagttccgtgttctcagaacccaacagaggcaatagaagcctggatcaactttaataaagaggaaagagaggcttttgcagagtcactcaggacaagcttgaaggaaattggggagaatgtgcacatttacctgattgggaaagagtcatctcgtacccactcgttggctgtgtccttgcactgtgcagaagatgactccatcagtgtaagtggccaaaacagtttgtgccaccagatcactgcggcctgcaagcatggtggagacttgtatgtggtgggagggtccatcccacggcgcatgtggaagtgcaacaatgccaccgttgactgggagtggtgtgctcctttgcctcgggaccggctccagcacaccctggtgtctgtgcccgggaaagatgccatatattcactgggtggcaagacactgcaagataccctctccaacgcagtcatttattatcgcgtaggtgataatgtgtggacagagacaactcagctagaggtggctgtgtcaggggctgctggtgccaacctcaacgggatcatctacttactagggggggaggagaatgatctggacttctttaccaaaccttcccgactcatccagtgctttgacacagagacagacaaatgccatgtgaagccctatgtgctgccctttgcaggccgcatgcacgcagctgtgcataaagatctggtgttcatcgtggctgaaggggactccctggtgtgctacaatcccttgctagacagcttcacccggctttgccttcctgaggcctggagctctgccccatccctctggaagattgccagctgtaacgggagcatctatgtcttccgggaccgatataaaaagggggatgccaacacctacaagcttgaccctgccacttcagccgtaactgtcacaagaggtattaaggtgctgcttaccaatttgcagtttgtgttggcctaaggctgtggggaggggaggagaactgctcactccttttccctccccatacaaactcaaagtcccctgggccccaattcagagttatgttttttttggcacatactagaaaggcagtgcctcagcccttccctgaatccatggaggtgttctgtttggggctttttagactgctgctgctcagctggttgcttgaactgacagtaggccagcctgttctctgccattccctagtcatcctgtgcctcaccacagcttgcttagagcaagccttttctcagaccttaggcacagcctctcctctttacctgatcaatgttaaatgtaagcacccctgatcccaggacataaggaaagatgcccaattgtacttttgttctatagcctgtgaaatggctagttgatcatttttccacaaagaattaggtgttaagagttttccttcaggctttacttaggagaatggactaagctgaaggtgtacttcaccagcaagagtcaactctagaattcaggatgttccttctattgttttcttagccatctgtcaggaaatgtaactttggttttatttttggcttattccaaggggtaagccagaaaatagaaatgattatttctgattaatagcagaaactttttcaatctcaaatatataaggtgtctgctcttttaaaagctctaagctaagtcaagagctaggaactgttgatacaaataaaagtttttgaaggga

SEQ ID NO: 280901 - DNA, 2414 bp, Homo sapiens
agcagatcttcttccgggcggacgtggagccggaagcggaggttccgggctccgggatgaaaggagggaacgcagacagctggcagagagagaagttggctagcatggaatcaccagaggagcctggagcatccatggatgagaactactttgtgaactacactttcaaagatcggtcacattcaggccgtgtggctcaaggcatcatgaaactgtgtctagaggaggagctctttgctgatgtcaccatttcggtggaaggccgggagtttcagctccatcggctggtcctctcagctcagagctgcttcttccgatccatgttcacttccaacctgaaggaggcccacaaccgggtgattgtgctgcaggatgtcagcgagtctgttttccagctcctggttgattatatctaccatgggactgtgaaacttcgagctgaggagttgcaggaaatttatgaggtgtcagacatgtatcagctgacatctctctttgaggaatgctctcggtttttggcccgcacagtgcaagtgggaaactgccttcaggtgatgtggctggcagatcggcacagtgatcctgagctctatacggctgccaagcactgtgccaagacccacctggcccagctgcagaatacagaggaatttctccacttgccccaccgcttactcacagatatcatctcggatggagttccgtgttctcagaacccaacagaggcaatagaagcctggatcaactttaataaagaggaaagagaggcttttgcagagtcactcaggacaagcttgaaggaaattggggagaatgtgcacatttacctgattgggaaagagtcatctcgtacccactcgttggctgtgtccttgcactgtgcagaagatgactccatcagtgtaagtggccaaaacagtttgtgccaccagatcactgcggcctgcaagcatggtggagacttgtatgtggtgggagggtccatcccacggcgcatgtggaagtgcaacaatgccaccgttgactgggagtggtgtgctcctttgcctcgggaccggctccagcacaccctggtgtctgtgcccgggaaagatgccatatattcactgggtggcaagacactgcaagataccctctccaacgcagtcatttattatcgcgtaggtgataatgtgtggacagagacaactcagctagaggtggctgtgtcaggggctgctggtgccaacctcaacgggatcatctacttactagggggggaggagaatgatctggacttctttaccaaaccttcccgactcatccagtgctttgacacagagacagacaaatgccatgtgaagccctatgtgctgccctttgcaggccgcatgcacgcagctgtgcataaagatctggtgttcatcgtggctgaaggggactccctggtgtgctacaatcccttgctagacagcttcacccggctttgccttcctgaggcctggagctctgccccatccctctggaagattgccagctgtaacgggagcatctatgtcttccgggaccgatataaaaagggggatgccaacacctacaagcttgaccctgccacttcagccgtaactgtcacaagaggtattaaggtgctgcttaccaatttgcagtttgtgttggcctaaggctgtggggaggggaggagaactgctcactccttttccctccccatacaaactcaaagtcccctgggccccaattcagagttatgttttttttggcacatactagaaaggcagtgcctcagcccttccctgaatccatggaggtgttctgtttggggctttttagactgctgctgctcagctggttgcttgaactgacagtaggccagcctgttctctgccattccctagtcatcctgtgcctcaccacagcttgcttagagcaagccttttctcagaccttaggcacagcctctcctctttacctgatcaatgttaaatgtaagcacccctgatcccaggacataaggaaagatgcccaattgtacttttgttctatagcctgtgaaatggctagttgatcatttttccacaaagaattaggtgttaagagttttccttcaggctttacttaggagaatggactaagctgaaggtgtacttcaccagcaagagtcaactctagaattcaggatgttccttctattgttttcttagccatctgtcaggaaatgtaactttggttttatttttggcttattccaaggggtaagccagaaaatagaaatgattatttctgattaatagcagaaactttttcaatctcaaatatataaggtgtctgctcttttaaaagctctaagctaagtcaagagctaggaactgttgatacaaataaaagtttttgaagggaaacaacaacaaacaaaaaag

SEQ ID NO: 280902 - DNA, 2355 bp, Homo sapiens
  misc_feature (15)..(15): n is a, c, g, or t
ggctgtaccggcccngattttgggatgggaacgcagacagctggcagagagagaagttggctagcatggaatcaccagaggagcctggagcatccatggatgagaactactttgtgaactacactttcaaagatcggtcacattcaggccgtgtggctcaaggcatcatgaaactgtgtctagaggaggagctctttgctgatgtcaccatttcggtggaaggccgggagtttcagctccatcggctggtcctctcagctcagagctgcttcttccgatccatgttcacttccaacctgaaggaggcccacaaccgggtgattgtgctgcaggatgtcagcgagtctgttttccagctcctggttgattatatctaccatgggactgtgaaacttcgagctgaggagttgcaggaaatttatgaggtgtcagacatgtatcagctgacatctctctttgaggaatgctctcggtttttggcccgcacagtgcaagtgggaaactgccttcaggtgatgtggctggcagatcggcacagtgatcctgagctctatacggctgccaagcactgtgccaagacccacctggcccagctgcagaatacagaggaatttctccacttgccccaccgcttactcacagatatcatctcggatggagttccgtgttctcagaacccaacagaggcaatagaagcctggatcaactttaataaagaggaaagagaggcttttgcagagtcactcaggacaagcttgaaggaaattggggagaatgtgcacatttacctgattgggaaagagtcatctcgtacccactcgttggctgtgtccttgcactgtgcagaagatgactccatcagtgtaagtggccaaaacagtttgtgccaccagatcactgcggcctgcaagcatggtggagacttgtatgtggtgggagggtccatcccacggcgcatgtggaagtgcaacaatgccaccgttgactgggagtggtgtgctcctttgcctcgggaccggctccagcacaccctggtgtctgtgcccgggaaagatgccatatattcactgggtggcaagacactgcaagataccctctccaacgcagtcatttattatcgcgtaggtgataatgtgtggacagagacaactcagctagaggtggctgtgtcaggggctgctggtgccaacctcaacgggatcatctacttactagggggggaggagaatgatctggacttctttaccaaaccttcccgactcatccagtgctttgacacagagacagacaaatgccatgtgaagccctatgtgctgccctttgcaggccgcatgcacgcagctgtgcataaagatctggtgttcatcgtggctgaaggggactccctggtgtgctacaatcccttgctagacagcttcacccggctttgccttcctgaggcctggagctctgccccatccctctggaagattgccagctgtaacgggagcatctatgtcttccgggaccgatataaaaagggggatgccaacacctacaagcttgaccctgccacttcagccgtaactgtcacaagaggtattaaggtgctgcttaccaatttgcagtttgtgttggcctaaggctgtggggaggggaggagaactgctcactccttttccctccccatacaaactcaaagtcccctgggccccaattcagagttatgttttttttggcacatactagaaaggcagtgcctcagcccttccctgaatccatggaggtgttctgtttggggctttttagactgctgctgctcagctggttgcttgaactgacagtaggccagcctgttctctgccattccctagtcatcctgtgcctcaccacagcttgcttagagcaagccttttctcagaccttaggcacagcctctcctctttacctgatcaatgttaaatgtaagcacccctgatcccaggacataaggaaagatgcccaattgtacttttgttctatagcctgtgaaatggctagttgatcatttttccacaaagaattaggtgttaagagttttccttcaggctttacttaggagaatggactaagctgaaggtgtacttcaccagcaagagtcaactctagaattcaggatgttccttctattgttttcttagccatctgtcaggaaatgtaactttggttttatttttggcttattccaaggggtaagccagaaaatagaaatgattatttctgattaatagcagaaactttttcaatctcaaatatataaggtgtctgctcttttaaaagctctaagctaagtcaagagctaggaactgttgatacaaataaaagtttttgaaggga

SEQ ID NO: 280903 - DNA, 3065 bp, Homo sapiens
ccccgtctctgagccaagcttttgacgagggcgggcgggcctgagcgggaagaacggtttccctggcgaccgtttccaagacgactcaaggtggagcggggacattgcacagggtgatgggcctcccagtgccccggcctgggggcggatggactcaagttctgggacgcagccatagggagtctttcgagcgagcggggaagtgtgggggaagcagctcagaagagagcaaatgtaagacccacggatatcccaggctaggcttcatatggagcgtcttaactccatgcgctgggaaggagaggacctggccactaggccggggccaggggtcctttttgtctgattctactgcccctgagcttcactagttttatgccccagttatttggttagtaaggcttttacgatcacaggcctctcccagccctttgctttcatatattgacctaaatcccaagtcttttgttaacattatggaaaggaattattccgtgttttctcaggaaaacacccagagttggaacttttatttatatcattagcggaggggcgccactggggataacgaacccagatttggttaaaggatagcgtcagggacatcatggacagggccaggactaaggccaatctggacccactttgctctcacttcttccttttccctccctgagttggacagttggattcacagactatggctgtgaattcctcaggttactcaagatggtgttgctttgcagacagctggcagagagagaagttggctagcatggaatcaccagaggagcctggagcatccatggatgagaactactttgtgaactacactttcaaagatcggtcacattcaggccgtgtggctcaaggcatcatgaaactgtgtctagaggaggagctctttgctgatgtcaccatttcggtggaaggccgggagtttcagctccatcggctggtcctctcagctcagagctgcttcttccgatccatgttcacttccaacctgaaggaggcccacaaccgggtgattgtgctgcaggatgtcagcgagtctgttttccagctcctggttgattatatctaccatgggactgtgaaacttcgagctgaggagttgcaggaaatttatgaggtgtcagacatgtatcagctgacatctctctttgaggaatgctctcggtttttggcccgcacagtgcaagtgggaaactgccttcaggtgatgtggctggcagatcggcacagtgatcctgagctctatacggctgccaagcactgtgccaagacccacctggcccagctgcagaatacagaggaatttctccacttgccccaccgcttactcacagatatcatctcggatggagttccgtgttctcagaacccaacagaggcaatagaagcctggatcaactttaataaagaggaaagagaggcttttgcagagtcactcaggacaagcttgaaggaaattggggagaatgtgcacatttacctgattgggaaagagtcatctcgtacccactcgttggctgtgtccttgcactgtgcagaagatgactccatcagtgtaagtggccaaaacagtttgtgccaccagatcactgcggcctgcaagcatggtggagacttgtatgtggtgggagggtccatcccacggcgcatgtggaagtgcaacaatgccaccgttgactgggagtggtgtgctcctttgcctcgggaccggctccagcacaccctggtgtctgtgcccgggaaagatgccatatattcactgggtggcaagacactgcaagataccctctccaacgcagtcatttattatcgcgtaggtgataatgtgtggacagagacaactcagctagaggtggctgtgtcaggggctgctggtgccaacctcaacgggatcatctacttactagggggggaggagaatgatctggacttctttaccaaaccttcccgactcatccagtgctttgacacagagacagacaaatgccatgtgaagccctatgtgctgccctttgcaggccgcatgcacgcagctgtgcataaagatctggtgttcatcgtggctgaaggggactccctggtgtgctacaatcccttgctagacagcttcacccggctttgccttcctgaggcctggagctctgccccatccctctggaagattgccagctgtaacgggagcatctatgtcttccgggaccgatataaaaagggggatgccaacacctacaagcttgaccctgccacttcagccgtaactgtcacaagaggtattaaggtgctgcttaccaatttgcagtttgtgttggcctaaggctgtggggaggggaggagaactgctcactccttttccctccccatacaaactcaaagtcccctgggccccaattcagagttatgttttttttggcacatactagaaaggcagtgcctcagcccttccctgaatccatggaggtgttctgtttggggctttttagactgctgctgctcagctggttgcttgaactgacagtaggccagcctgttctctgccattccctagtcatcctgtgcctcaccacagcttgcttagagcaagccttttctcagaccttaggcacagcctctcctctttacctgatcaatgttaaatgtaagcacccctgatcccaggacataaggaaagatgcccaattgtacttttgttctatagcctgtgaaatggctagttgatcatttttccacaaagaattaggtgttaagagttttccttcaggctttacttaggagaatggactaagctgaaggtgtacttcaccagcaagagtcaactctagaattcaggatgttccttctattgttttcttagccatctgtcaggaaatgtaactttggttttatttttggcttattccaaggggtaagccagaaaatagaaatgattatttctgattaatagcagaaactttttcaatctcaaatatataaggtgtctgctcttttaaaagctctaagctaagtcaagagctaggaactgttgatacaaataaaagtttttgaaggga

SEQ ID NO: 280904 - DNA, 2443 bp, Homo sapiens
agcagatcttcttccgggcggacgtggagccggaagcggaggttccgggctccgggatgaaaggagggaacgcagactatggctgtgaattcctcaggttactcaagatggtgttgctttgcagacagctggcagagagagaagttggctagcatggaatcaccagaggagcctggagcatccatggatgagaactactttgtgaactacactttcaaagatcggtcacattcaggccgtgtggctcaaggcatcatgaaactgtgtctagaggaggagctctttgctgatgtcaccatttcggtggaaggccgggagtttcagctccatcggctggtcctctcagctcagagctgcttcttccgatccatgttcacttccaacctgaaggaggcccacaaccgggtgattgtgctgcaggatgtcagcgagtctgttttccagctcctggttgattatatctaccatgggactgtgaaacttcgagctgaggagttgcaggaaatttatgaggtgtcagacatgtatcagctgacatctctctttgaggaatgctctcggtttttggcccgcacagtgcaagtgggaaactgccttcaggtgatgtggctggcagatcggcacagtgatcctgagctctatacggctgccaagcactgtgccaagacccacctggcccagctgcagaatacagaggaatttctccacttgccccaccgcttactcacagatatcatctcggatggagttccgtgttctcagaacccaacagaggcaatagaagcctggatcaactttaataaagaggaaagagaggcttttgcagagtcactcaggacaagcttgaaggaaattggggagaatgtgcacatttacctgattgggaaagagtcatctcgtacccactcgttggctgtgtccttgcactgtgcagaagatgactccatcagtgtaagtggccaaaacagtttgtgccaccagatcactgcggcctgcaagcatggtggagacttgtatgtggtgggagggtccatcccacggcgcatgtggaagtgcaacaatgccaccgttgactgggagtggtgtgctcctttgcctcgggaccggctccagcacaccctggtgtctgtgcccgggaaagatgccatatattcactgggtggcaagacactgcaagataccctctccaacgcagtcatttattatcgcgtaggtgataatgtgtggacagagacaactcagctagaggtggctgtgtcaggggctgctggtgccaacctcaacgggatcatctacttactagggggggaggagaatgatctggacttctttaccaaaccttcccgactcatccagtgctttgacacagagacagacaaatgccatgtgaagccctatgtgctgccctttgcaggccgcatgcacgcagctgtgcataaagatctggtgttcatcgtggctgaaggggactccctggtgtgctacaatcccttgctagacagcttcacccggctttgccttcctgaggcctggagctctgccccatccctctggaagattgccagctgtaacgggagcatctatgtcttccgggaccgatataaaaagggggatgccaacacctacaagcttgaccctgccacttcagccgtaactgtcacaagaggtattaaggtgctgcttaccaatttgcagtttgtgttggcctaaggctgtggggaggggaggagaactgctcactccttttccctccccatacaaactcaaagtcccctgggccccaattcagagttatgttttttttggcacatactagaaaggcagtgcctcagcccttccctgaatccatggaggtgttctgtttggggctttttagactgctgctgctcagctggttgcttgaactgacagtaggccagcctgttctctgccattccctagtcatcctgtgcctcaccacagcttgcttagagcaagccttttctcagaccttaggcacagcctctcctctttacctgatcaatgttaaatgtaagcacccctgatcccaggacataaggaaagatgcccaattgtacttttgttctatagcctgtgaaatggctagttgatcatttttccacaaagaattaggtgttaagagttttccttcaggctttacttaggagaatggactaagctgaaggtgtacttcaccagcaagagtcaactctagaattcaggatgttccttctattgttttcttagccatctgtcaggaaatgtaactttggttttatttttggcttattccaaggggtaagccagaaaatagaaatgattatttctgattaatagcagaaactttttcaatctcaaatatataaggtgtctgctcttttaaaagctctaagctaagtcaagagctaggaactgttgatacaaataaaagtttttgaaggga

SEQ ID NO: 280905 - DNA, 2415 bp, Homo sapiens
agcagatcttcttccgggcggacgtggagccggaagcggaggttccgggctccgggatgaaaggagggaacgcaggtgagaaagcgagacaggcagacagctggcagagagagaagttggctagcatggaatcaccagaggagcctggagcatccatggatgagaactactttgtgaactacactttcaaagatcggtcacattcaggccgtgtggctcaaggcatcatgaaactgtgtctagaggaggagctctttgctgatgtcaccatttcggtggaaggccgggagtttcagctccatcggctggtcctctcagctcagagctgcttcttccgatccatgttcacttccaacctgaaggaggcccacaaccgggtgattgtgctgcaggatgtcagcgagtctgttttccagctcctggttgattatatctaccatgggactgtgaaacttcgagctgaggagttgcaggaaatttatgaggtgtcagacatgtatcagctgacatctctctttgaggaatgctctcggtttttggcccgcacagtgcaagtgggaaactgccttcaggtgatgtggctggcagatcggcacagtgatcctgagctctatacggctgccaagcactgtgccaagacccacctggcccagctgcagaatacagaggaatttctccacttgccccaccgcttactcacagatatcatctcggatggagttccgtgttctcagaacccaacagaggcaatagaagcctggatcaactttaataaagaggaaagagaggcttttgcagagtcactcaggacaagcttgaaggaaattggggagaatgtgcacatttacctgattgggaaagagtcatctcgtacccactcgttggctgtgtccttgcactgtgcagaagatgactccatcagtgtaagtggccaaaacagtttgtgccaccagatcactgcggcctgcaagcatggtggagacttgtatgtggtgggagggtccatcccacggcgcatgtggaagtgcaacaatgccaccgttgactgggagtggtgtgctcctttgcctcgggaccggctccagcacaccctggtgtctgtgcccgggaaagatgccatatattcactgggtggcaagacactgcaagataccctctccaacgcagtcatttattatcgcgtaggtgataatgtgtggacagagacaactcagctagaggtggctgtgtcaggggctgctggtgccaacctcaacgggatcatctacttactagggggggaggagaatgatctggacttctttaccaaaccttcccgactcatccagtgctttgacacagagacagacaaatgccatgtgaagccctatgtgctgccctttgcaggccgcatgcacgcagctgtgcataaagatctggtgttcatcgtggctgaaggggactccctggtgtgctacaatcccttgctagacagcttcacccggctttgccttcctgaggcctggagctctgccccatccctctggaagattgccagctgtaacgggagcatctatgtcttccgggaccgatataaaaagggggatgccaacacctacaagcttgaccctgccacttcagccgtaactgtcacaagaggtattaaggtgctgcttaccaatttgcagtttgtgttggcctaaggctgtggggaggggaggagaactgctcactccttttccctccccatacaaactcaaagtcccctgggccccaattcagagttatgttttttttggcacatactagaaaggcagtgcctcagcccttccctgaatccatggaggtgttctgtttggggctttttagactgctgctgctcagctggttgcttgaactgacagtaggccagcctgttctctgccattccctagtcatcctgtgcctcaccacagcttgcttagagcaagccttttctcagaccttaggcacagcctctcctctttacctgatcaatgttaaatgtaagcacccctgatcccaggacataaggaaagatgcccaattgtacttttgttctatagcctgtgaaatggctagttgatcatttttccacaaagaattaggtgttaagagttttccttcaggctttacttaggagaatggactaagctgaaggtgtacttcaccagcaagagtcaactctagaattcaggatgttccttctattgttttcttagccatctgtcaggaaatgtaactttggttttatttttggcttattccaaggggtaagccagaaaatagaaatgattatttctgattaatagcagaaactttttcaatctcaaatatataaggtgtctgctcttttaaaagctctaagctaagtcaagagctaggaactgttgatacaaataaaagtttttgaaggga

SEQ ID NO: 280906 - DNA, 2499 bp, Homo sapiens
agcagatcttcttccgggcggacgtggagccggaagcggaggttccgggctccgggatgaaaggagggaacgcaggtgagaaagcgagacaggcaggtagggaaatcgtgaggtgagcgtgatcctagctccttgtggcagagcctagagagaaggcgaggacgctgaagaaccaggcggacagctggcagagagagaagttggctagcatggaatcaccagaggagcctggagcatccatggatgagaactactttgtgaactacactttcaaagatcggtcacattcaggccgtgtggctcaaggcatcatgaaactgtgtctagaggaggagctctttgctgatgtcaccatttcggtggaaggccgggagtttcagctccatcggctggtcctctcagctcagagctgcttcttccgatccatgttcacttccaacctgaaggaggcccacaaccgggtgattgtgctgcaggatgtcagcgagtctgttttccagctcctggttgattatatctaccatgggactgtgaaacttcgagctgaggagttgcaggaaatttatgaggtgtcagacatgtatcagctgacatctctctttgaggaatgctctcggtttttggcccgcacagtgcaagtgggaaactgccttcaggtgatgtggctggcagatcggcacagtgatcctgagctctatacggctgccaagcactgtgccaagacccacctggcccagctgcagaatacagaggaatttctccacttgccccaccgcttactcacagatatcatctcggatggagttccgtgttctcagaacccaacagaggcaatagaagcctggatcaactttaataaagaggaaagagaggcttttgcagagtcactcaggacaagcttgaaggaaattggggagaatgtgcacatttacctgattgggaaagagtcatctcgtacccactcgttggctgtgtccttgcactgtgcagaagatgactccatcagtgtaagtggccaaaacagtttgtgccaccagatcactgcggcctgcaagcatggtggagacttgtatgtggtgggagggtccatcccacggcgcatgtggaagtgcaacaatgccaccgttgactgggagtggtgtgctcctttgcctcgggaccggctccagcacaccctggtgtctgtgcccgggaaagatgccatatattcactgggtggcaagacactgcaagataccctctccaacgcagtcatttattatcgcgtaggtgataatgtgtggacagagacaactcagctagaggtggctgtgtcaggggctgctggtgccaacctcaacgggatcatctacttactagggggggaggagaatgatctggacttctttaccaaaccttcccgactcatccagtgctttgacacagagacagacaaatgccatgtgaagccctatgtgctgccctttgcaggccgcatgcacgcagctgtgcataaagatctggtgttcatcgtggctgaaggggactccctggtgtgctacaatcccttgctagacagcttcacccggctttgccttcctgaggcctggagctctgccccatccctctggaagattgccagctgtaacgggagcatctatgtcttccgggaccgatataaaaagggggatgccaacacctacaagcttgaccctgccacttcagccgtaactgtcacaagaggtattaaggtgctgcttaccaatttgcagtttgtgttggcctaaggctgtggggaggggaggagaactgctcactccttttccctccccatacaaactcaaagtcccctgggccccaattcagagttatgttttttttggcacatactagaaaggcagtgcctcagcccttccctgaatccatggaggtgttctgtttggggctttttagactgctgctgctcagctggttgcttgaactgacagtaggccagcctgttctctgccattccctagtcatcctgtgcctcaccacagcttgcttagagcaagccttttctcagaccttaggcacagcctctcctctttacctgatcaatgttaaatgtaagcacccctgatcccaggacataaggaaagatgcccaattgtacttttgttctatagcctgtgaaatggctagttgatcatttttccacaaagaattaggtgttaagagttttccttcaggctttacttaggagaatggactaagctgaaggtgtacttcaccagcaagagtcaactctagaattcaggatgttccttctattgttttcttagccatctgtcaggaaatgtaactttggttttatttttggcttattccaaggggtaagccagaaaatagaaatgattatttctgattaatagcagaaactttttcaatctcaaatatataaggtgtctgctcttttaaaagctctaagctaagtcaagagctaggaactgttgatacaaataaaagtttttgaaggga

SEQ ID NO: 280907 - DNA, 2340 bp, Homo sapiens
agcagatcttcttccgggcggacgtggagccggaagcggaggttccgggctccgggatgaaaggagggaacgcagacagctggcagagagagaagttggctagcatggaatcaccagaggagcctggagcatccatggatgagaactactttgtgaactacactttcaaagatcggtcacattcaggccgtgtggctcaaggcatcatgaaactgtgtctagaggaggagctctttgctgatgtcaccatttcggtggaaggccgggagtttcagctccatcggctggtcctctcagctcagagctgcttcttccgatccatgttcacttccaacctgaaggaggcccacaaccgggtgattgtgctgcaggatgtcagcgagtctgttttccagctcctggttgattatatctaccatgggactgtgaaacttcgagctgaggagttgcaggaaatttatgaggtgtcagacatgtatcagctgacatctctctttgaggaatgctctcggtttttggcccgcacagtgcaagtgggaaactgccttcaggtgatgtggctggcagatcggcacagtgatcctgagctctatacggctgccaagcactgtgccaagacccacctggcccagctgcagaatacagaggaatttctccacttgccccaccgcttactcacagatatcatctcggatggagttccgtgttctcagaacccaacagaggcaatagaagcctggatcaactttaataaagaggaaagagaggcttttgcagagtcactcaggacaagcttgaaggaaattggggagaatgtgcacatttacctgattgggaaagagtcatctcgtacccactcgttggctgtgtccttgcactgtgcagaagatgactccatcagtgtaagtggccatgtggtgggagggtccatcccacggcgcatgtggaagtgcaacaatgccaccgttgactgggagtggtgtgctcctttgcctcgggaccggctccagcacaccctggtgtctgtgcccgggaaagatgccatatattcactgggtggcaagacactgcaagataccctctccaacgcagtcatttattatcgcgtaggtgataatgtgtggacagagacaactcagctagaggtggctgtgtcaggggctgctggtgccaacctcaacgggatcatctacttactagggggggaggagaatgatctggacttctttaccaaaccttcccgactcatccagtgctttgacacagagacagacaaatgccatgtgaagccctatgtgctgccctttgcaggccgcatgcacgcagctgtgcataaagatctggtgttcatcgtggctgaaggggactccctggtgtgctacaatcccttgctagacagcttcacccggctttgccttcctgaggcctggagctctgccccatccctctggaagattgccagctgtaacgggagcatctatgtcttccgggaccgatataaaaagggggatgccaacacctacaagcttgaccctgccacttcagccgtaactgtcacaagaggtattaaggtgctgcttaccaatttgcagtttgtgttggcctaaggctgtggggaggggaggagaactgctcactccttttccctccccatacaaactcaaagtcccctgggccccaattcagagttatgttttttttggcacatactagaaaggcagtgcctcagcccttccctgaatccatggaggtgttctgtttggggctttttagactgctgctgctcagctggttgcttgaactgacagtaggccagcctgttctctgccattccctagtcatcctgtgcctcaccacagcttgcttagagcaagccttttctcagaccttaggcacagcctctcctctttacctgatcaatgttaaatgtaagcacccctgatcccaggacataaggaaagatgcccaattgtacttttgttctatagcctgtgaaatggctagttgatcatttttccacaaagaattaggtgttaagagttttccttcaggctttacttaggagaatggactaagctgaaggtgtacttcaccagcaagagtcaactctagaattcaggatgttccttctattgttttcttagccatctgtcaggaaatgtaactttggttttatttttggcttattccaaggggtaagccagaaaatagaaatgattatttctgattaatagcagaaactttttcaatctcaaatatataaggtgtctgctcttttaaaagctctaagctaagtcaagagctaggaactgttgatacaaataaaagtttttgaaggga

SEQ ID NO: 280908 - DNA, 2553 bp, Homo sapiens
ccccgtctctgagccaagcttttgacgagggcgggcgggcctgagcgggaagaacggtttccctggcgaccgtttccaagacgactcaaggtggagcggggacattgcacagggtgatgggcctcccagtgccccggcctgggggcggatggactcaagttctgggacgcagccatagggagtctttcgagcgagcggggaagtgtgggggaagcagctcagaagagagcaaatacagctggcagagagagaagttggctagcatggaatcaccagaggagcctggagcatccatggatgagaactactttgtgaactacactttcaaagatcggtcacattcaggccgtgtggctcaaggcatcatgaaactgtgtctagaggaggagctctttgctgatgtcaccatttcggtggaaggccgggagtttcagctccatcggctggtcctctcagctcagagctgcttcttccgatccatgttcacttccaacctgaaggaggcccacaaccgggtgattgtgctgcaggatgtcagcgagtctgttttccagctcctggttgattatatctaccatgggactgtgaaacttcgagctgaggagttgcaggaaatttatgaggtgtcagacatgtatcagctgacatctctctttgaggaatgctctcggtttttggcccgcacagtgcaagtgggaaactgccttcaggtgatgtggctggcagatcggcacagtgatcctgagctctatacggctgccaagcactgtgccaagacccacctggcccagctgcagaatacagaggaatttctccacttgccccaccgcttactcacagatatcatctcggatggagttccgtgttctcagaacccaacagaggcaatagaagcctggatcaactttaataaagaggaaagagaggcttttgcagagtcactcaggacaagcttgaaggaaattggggagaatgtgcacatttacctgattgggaaagagtcatctcgtacccactcgttggctgtgtccttgcactgtgcagaagatgactccatcagtgtaagtggccaaaacagtttgtgccaccagatcactgcggcctgcaagcatggtggagacttgtatgtggtgggagggtccatcccacggcgcatgtggaagtgcaacaatgccaccgttgactgggagtggtgtgctcctttgcctcgggaccggctccagcacaccctggtgtctgtgcccgggaaagatgccatatattcactgggtggcaagacactgcaagataccctctccaacgcagtcatttattatcgcgtaggtgataatgtgtggacagagacaactcagctagaggtggctgtgtcaggggctgctggtgccaacctcaacgggatcatctacttactagggggggaggagaatgatctggacttctttaccaaaccttcccgactcatccagtgctttgacacagagacagacaaatgccatgtgaagccctatgtgctgccctttgcaggccgcatgcacgcagctgtgcataaagatctggtgttcatcgtggctgaaggggactccctggtgtgctacaatcccttgctagacagcttcacccggctttgccttcctgaggcctggagctctgccccatccctctggaagattgccagctgtaacgggagcatctatgtcttccgggaccgatataaaaagggggatgccaacacctacaagcttgaccctgccacttcagccgtaactgtcacaagaggtattaaggtgctgcttaccaatttgcagtttgtgttggcctaaggctgtggggaggggaggagaactgctcactccttttccctccccatacaaactcaaagtcccctgggccccaattcagagttatgttttttttggcacatactagaaaggcagtgcctcagcccttccctgaatccatggaggtgttctgtttggggctttttagactgctgctgctcagctggttgcttgaactgacagtaggccagcctgttctctgccattccctagtcatcctgtgcctcaccacagcttgcttagagcaagccttttctcagaccttaggcacagcctctcctctttacctgatcaatgttaaatgtaagcacccctgatcccaggacataaggaaagatgcccaattgtacttttgttctatagcctgtgaaatggctagttgatcatttttccacaaagaattaggtgttaagagttttccttcaggctttacttaggagaatggactaagctgaaggtgtacttcaccagcaagagtcaactctagaattcaggatgttccttctattgttttcttagccatctgtcaggaaatgtaactttggttttatttttggcttattccaaggggtaagccagaaaatagaaatgattatttctgattaatagcagaaactttttcaatctcaaatatataaggtgtctgctcttttaaaagctctaagctaagtcaagagctaggaactgttgatacaaataaaagtttttgaaggga

SEQ ID NO: 280909 - DNA, 2409 bp, Homo sapiens
ccccgtctctgagccaagcttttgacgagggcgggcgggcctgagcgggaagaacggtttccctggcgaccgtttccaagacgactcaagacagctggcagagagagaagttggctagcatggaatcaccagaggagcctggagcatccatggatgagaactactttgtgaactacactttcaaagatcggtcacattcaggccgtgtggctcaaggcatcatgaaactgtgtctagaggaggagctctttgctgatgtcaccatttcggtggaaggccgggagtttcagctccatcggctggtcctctcagctcagagctgcttcttccgatccatgttcacttccaacctgaaggaggcccacaaccgggtgattgtgctgcaggatgtcagcgagtctgttttccagctcctggttgattatatctaccatgggactgtgaaacttcgagctgaggagttgcaggaaatttatgaggtgtcagacatgtatcagctgacatctctctttgaggaatgctctcggtttttggcccgcacagtgcaagtgggaaactgccttcaggtgatgtggctggcagatcggcacagtgatcctgagctctatacggctgccaagcactgtgccaagacccacctggcccagctgcagaatacagaggaatttctccacttgccccaccgcttactcacagatatcatctcggatggagttccgtgttctcagaacccaacagaggcaatagaagcctggatcaactttaataaagaggaaagagaggcttttgcagagtcactcaggacaagcttgaaggaaattggggagaatgtgcacatttacctgattgggaaagagtcatctcgtacccactcgttggctgtgtccttgcactgtgcagaagatgactccatcagtgtaagtggccaaaacagtttgtgccaccagatcactgcggcctgcaagcatggtggagacttgtatgtggtgggagggtccatcccacggcgcatgtggaagtgcaacaatgccaccgttgactgggagtggtgtgctcctttgcctcgggaccggctccagcacaccctggtgtctgtgcccgggaaagatgccatatattcactgggtggcaagacactgcaagataccctctccaacgcagtcatttattatcgcgtaggtgataatgtgtggacagagacaactcagctagaggtggctgtgtcaggggctgctggtgccaacctcaacgggatcatctacttactagggggggaggagaatgatctggacttctttaccaaaccttcccgactcatccagtgctttgacacagagacagacaaatgccatgtgaagccctatgtgctgccctttgcaggccgcatgcacgcagctgtgcataaagatctggtgttcatcgtggctgaaggggactccctggtgtgctacaatcccttgctagacagcttcacccggctttgccttcctgaggcctggagctctgccccatccctctggaagattgccagctgtaacgggagcatctatgtcttccgggaccgatataaaaagggggatgccaacacctacaagcttgaccctgccacttcagccgtaactgtcacaagaggtattaaggtgctgcttaccaatttgcagtttgtgttggcctaaggctgtggggaggggaggagaactgctcactccttttccctccccatacaaactcaaagtcccctgggccccaattcagagttatgttttttttggcacatactagaaaggcagtgcctcagcccttccctgaatccatggaggtgttctgtttggggctttttagactgctgctgctcagctggttgcttgaactgacagtaggccagcctgttctctgccattccctagtcatcctgtgcctcaccacagcttgcttagagcaagccttttctcagaccttaggcacagcctctcctctttacctgatcaatgttaaatgtaagcacccctgatcccaggacataaggaaagatgcccaattgtacttttgttctatagcctgtgaaatggctagttgatcatttttccacaaagaattaggtgttaagagttttccttcaggctttacttaggagaatggactaagctgaaggtgtacttcaccagcaagagtcaactctagaattcaggatgttccttctattgttttcttagccatctgtcaggaaatgtaactttggttttatttttggcttattccaaggggtaagccagaaaatagaaatgattatttctgattaatagcagaaactttttcaatctcaaatatataaggtgtctgctcttttaaaagctctaagctaagtcaagagctaggaactgttgatacaaataaaagtttttgaaggga

SEQ ID NO: 280910 - DNA, 1104 bp, Homo sapiens
  misc_feature (27)..(27): n is a, c, g, or t
  misc_feature (32)..(32): n is a, c, g, or t
tgcttttaaagccctttggaactagcnatccnctattcagaaaaaccttgcagccctatgtgctgccctttgcaggccgcatgcacgcagctgtgcataaagatctggtgttcatcgtggctgaaggggactccctggtgtgctacaatcccttgctagacagcttcacccggctttgccttcctgaggcctggagctctgccccatccctctggaagattgccagctgtaacgggagcatctatgtcttccgggaccgatataaaaagggggatgccaacacctacaagcttgaccctgccacttcagccgtaactgtcacaagaggtattaaggtgctgcttaccaatttgcagtttgtgttggcctaaggctgtggggaggggaggagaactgctcactccttttccctccccatacaaactcaaagtcccctgggccccaattcagagttatgttttttttggcacatactagaaaggcagtgcctcagcccttccctgaatccatggaggtgttctgtttggggctttttagactgctgctgctcagctggttgcttgaactgacagtaggccagcctgttctctgccattccctagtcatcctgtgcctcaccacagcttgcttagagcaagccttttctcagaccttaggcacagcctctcctctttacctgatcaatgttaaatgtaagcacccctgatcccaggacataaggaaagatgcccaattgtacttttgttctatagcctgtgaaatggctagttgatcatttttccacaaagaattaggtgttaagagttttccttcaggctttacttaggagaatggactaagctgaaggtgtacttcaccagcaagagtcaactctagaattcaggatgttccttctattgttttcttagccatctgtcaggaaatgtaactttggttttatttttggcttattccaaggggtaagccagaaaatagaaatgattatttctgattaatagcagaaactttttcaatctcaaatatataaggtgtctgctcttttaaaagctctaagctaagtcaagagctaggaactgttgatacaaataaaagtttttgaaggga

SEQ ID NO: 280911 - DNA, 1980 bp, Homo sapiens
cgacggtggccactgcgctcctgcgtacgcgggggcagccctcgtcgccatcccctctggcgtacatgctgagcctctaccgcgacccgctgccgagggcagacatcatccgcagcctacaggcagaagatgtggcagtggatgggcagaactggacgtttgcttttgacttctccttcctgagccaacaagaggatctggcatgggctgagctccggctgcagctgtccagccctgtggacctccccactgagggctcacttgccattgagattttccaccagccaaagcccgacacagagcaggcttcagacagctgcttagagcggtttcagatggacctattcactgtcactttgtcccaggtcaccttttccttgggcagcatggttttggaggtgaccaggcctctctccaagtggctgaagcaccctggggccctggagaagcagatgtccagggtagctggagagtgctggccgcggccccccacaccgcctgccaccaatgtgctccttatgctctactccaacctctcgcaggagcagaggcagctgggtgggtccaccttgctgtgggaagccgagagctcctggcgggcccaggagggacagctgtcctgggagtggggcaagaggcaccgtcgacatcacttgccagacagaagtcaactgtgtcggaaggtcaagttccaggtggacttcaacctgatcggatggggctcctggatcatctaccccaagcagtacaacgcctatcgctgtgagggcgagtgtcctaatcctgttggggaggagtttcatccgaccaaccatgcatacatccagagtctgctgaaacgttaccagccccaccgagtcccttccacttgttgtgccccagtgaagaccaagccgctgagcatgctgtatgtggataatggcagagtgctcctagatcaccataaagacatgatcgtggaagaatgtgggtgcctctgatgacatcctggagggagactggatttgcctgcactctggaaggctgggaaactcctggaagacatgataaccatctaatccagtaaggagaaacagagaggggcaaagttgctctgcccaccagaactgaagaggaggggctgcccactctgtaaatgaagggctcagtggagtctggccaagcacagaggctgctgtcaggaagagggaggaagaagcctgtgcagggggctggctggatgttctctttactgaaaagacagtggcaaggaaaagcacaagtgcatgagttctttactggattttttaaaaacctgtgaaccccccgaaactgtatgtgaaagttgagacatatgtgcatgtattttggaggtgggatgaagtcacctatagctttcatgtattctccaaagtagtctgtgtgtgacctgtccccctccccaaagattaaggatcactgtatagattaaaaagagtccgtcaatctcattgcctcaggctgggttgggggagccccacagctttctggctggccagtggcaatctactggccttgtccagaggctcactggagtggttctctgctaatgagctgtacaacaataaagccattgtctagttctcctgggccagctggtgcctgtgaaggcagaggcaggaactcatccaagaggaccggccatgttgggttacagaagacatccctgcgtcagtctgcttccgcagacacagcctgagtctgttaaagttggtgacaatccacctcagtctctcaatgtgtgctattaatgaggcctctgagcttcctatccagcagtggtgaaggccttgccctgggtggcaagatacttgctctatggtcacagctcagccactggaagctgtgcgacctcaggtgagcaattcactgtccagtctccacttgtaaaaggaacgctggtgaatcctaatgcattcatattaaatgtctgttgtcaggctcagaagagccatgagcttt

SEQ ID NO: 280912 - DNA, 1163 bp, Homo sapiens
  misc_feature (493)..(493): n is a, c, g, or t
  misc_feature (539)..(540): n is a, c, g, or t
  misc_feature (594)..(594): n is a, c, g, or t
  misc_feature (603)..(603): n is a, c, g, or t
  misc_feature (651)..(651): n is a, c, g, or t
atgtacagcatgatgatggagaccgacctgcactcgcccggcggcgcccaggcccccacgaacctctcgggccccgccggggcgggcggcggcgggggcggaggcgggggcggcggcggcggcgggggcgccaaggccaaccaggaccgggtcaaacggcccatgaacgccttcatggtgtggtcccgcgggcagcggcgcaagatggcccaggagaaccccaagatgcacaactcggagatcagcaagcgcctgggggccgagtggaaggtcatgtccgaggccgagaagcggccgttcatcgacgaggccaagcggctgcgcgcgctgcacatgaaggagcacccggattacaagtaccggccgcgccgcaagaccaagacgctgctcaagaaggacaagtactcgctggccggcgggctcctggcggccggcgcgggtggcggcggcgcggctgtggccatgggcgtgggcgtgggcgtgggcgcggcgnccgtgggccagcgcctggagagcccaggcggcgcggcgggcggcgnntacgcgcacgtcaacggctgggccaacggcgcctaccccggctcggtggcggcngcggcggcngccgcggccatgatgcaggaggcgcagctggcctacgggcagcacccnggcgcgggcggcgcgcacccgcaccgcaccccgcgcacccgcacccgcaccacccgcacgcgcacccgcacaacccgcagcccatgcaccgctacgacatgggcgcgctgcagtacagccccatctccaactcgcagggctacatgagcgcgtcgccctcgggctacggcggcctcccctacggcgccgcggccgccgccgccgccgcgcaccagaactcggccgtggcggcggcggcggcggcggcggccgcgtcgtcgggcgccctgggcgcgctgggctctctggtgaagtcggagcccagcggcagcccgcccgccccagcgcactcgcgggcgccgtgccccggggacctgcgcgagatgatcagcatgtacttgcccgccggcgaggggggcgacccggcggcggcagcagcggccgcggcgcagagccggctgcactcgctgccgcagcactaccagggcgcgggcgcgggcgtgaacggcacggtgcccctgacgcacatctag

SEQ ID NO: 280913 - DNA, 1153 bp, Homo sapiens
  misc_feature (483)..(483): n is a, c, g, or t
  misc_feature (529)..(530): n is a, c, g, or t
  misc_feature (584)..(584): n is a, c, g, or t
  misc_feature (593)..(593): n is a, c, g, or t
  misc_feature (641)..(641): n is a, c, g, or t
ggcccgcgcacagcgcccgcatgtacaacatgatggagacggagctgaagccgccgggcccgcagcaaacttcggggggcggcggcggcaactccaccgcggcggcggccggcggcaaccagaaaaacagcccggaccgggtcaaacggcccatgaacgccttcatggtgtggtcccgcgggcagcggcgcaagatggcccaggagaaccccaagatgcacaactcggagatcagcaagcgcctgggggccgagtggaaggtcatgtccgaggccgagaagcggccgttcatcgacgaggccaagcggctgcgcgcgctgcacatgaaggagcacccggattacaagtaccggccgcgccgcaagaccaagacgctgctcaagaaggacaagtactcgctggccggcgggctcctggcggccggcgcgggtggcggcggcgcggctgtggccatgggcgtgggcgtgggcgtgggcgcggcgnccgtgggccagcgcctggagagcccaggcggcgcggcgggcggcgnntacgcgcacgtcaacggctgggccaacggcgcctaccccggctcggtggcggcngcggcggcngccgcggccatgatgcaggaggcgcagctggcctacgggcagcacccnggcgcgggcggcgcgcacccgcaccgcaccccgcgcacccgcacccgcaccacccgcacgcgcacccgcacaacccgcagcccatgcaccgctacgacatgggcgcgctgcagtacagccccatctccaactcgcagggctacatgagcgcgtcgccctcgggctacggcggcctcccctacggcgccgcggccgccgccgccgccgcgcaccagaactcggccgtggcggcggcggcggcggcggcggccgcgtcgtcgggcgccctgggcgcgctgggctctctggtgaagtcggagcccagcggcagcccgcccgccccagcgcactcgcgggcgccgtgccccggggacctgcgcgagatgatcagcatgtacttgcccgccggcgaggggggcgacccggcggcggcagcagcggccgcggcgcagagccggctgcactcgctgccgcagcactaccagggcgcgggcgcgggcgtgaacggcacggtgcccctgacgcacatctag

SEQ ID NO: 280914 - DNA, 587 bp, Homo sapiens
cacccccccctccccgcccgtcaagcctttggcatcattatcctcatcactaaatcctacagagtacagggcggaaaacggtgcacaccattcacagaactggagaactccaaggggcgaaagttaaagggaaagatcccgggtcctcaatccagatagtctcttcttatacagatatctctaatgaccagatttgagatgcacatcaaattgtgtaggtatctcagtacagcttctggaacaaagttctctgccctttctcttattgttatttttttctttttaggtaccagagccagaaaaaaaaatgctgcatgggagctgcatcttagggcatgtgtattagggtgtgtgcatgatgaatttctggactggatcccaatattaaaaagtagtttggcattttaataaagggtctctaagtaaattaaaatagaacactcggttggccgatctctgaatctctctacacctcggggagacctcactacaaagtaagggagagtgtgtagggaggcaggaggagaaacgagaaaggccatagagaaacttagcagggaagggagagcatgatattaaacggcatg

SEQ ID NO: 280915 - DNA, 585 bp, Homo sapiens
ctcaataaaacttttcctgggctggatagcaaaggacacctttggttacctgaatgaacagttttggccagaaatggtgagaagaaaaagcatgaagaagccgcgaagtgtgggggagaaaaaggtggaagcgaagaaacagctcccggagcaaactgtacaaaaacctcgccaagagtgtcgggaggcaggaccgttattcctgcagagcaggagagagacgagagaccctgaaacacgcgccacctatctttgtggggagggataattgaagcgccctgagcgtaccagagccagaaaaaaaaatgctgcatgggagctgcatcttagggcatgtgtattagggtgtgtgcatgatgaatttctggactggatcccaatattaaaaagtagtttggcattttaataaagggtctctaagtaaattaaaatagaacactcggttggccgatctctgaatctctctacacctcggggagacctcactacaaagtaagggagagtgtgtagggaggcaggaggagaaacgagaaaggccatagagaaacttagcagggaagggagagcatgatattaaacggcatg

SEQ ID NO: 280916 - DNA, 629 bp, Homo sapiens
aatgagaaaattagaaaaggaggatggaggacgagcacaccaaaaagggataaaaagagagaaaaggggaggaaaaaaaacctacctgcgaagtcttgtttgtagttttggccagaaatggtgagaagaaaaagcatgaagaagccgcgaagtgtgggggagaaaaaggtggaagcgaagaaacagctcccggagcaaactgtacaaaaacctcgccaagagtgtcgggaggcaggaccgttattcctgcagagcaggagagagacgagagaccctgaaacacgcgccacctatctttgtggggagggataattgaagcgccctgagcgtaccagagccagaaaaaaaaatgctgcatgggagctgcatcttagggcatgtgtattagggtgtgtgcatgatgaatttctggactggatcccaatattaaaaagtagtttggcattttaataaagggtctctaagtaaattaaaatagaacactcggttggccgatctctgaatctctctacacctcggggagacctcactacaaagtaagggagagtgtgtagggaggcaggaggagaaacgagaaaggccatagagaaacttagcagggaagggagagcatgatattaaacggcatg

SEQ ID NO: 280917 - DNA, 1388 bp, Homo sapiens
ttaaactctttgggggaataactactctcctcccttatatagcttagaaagaaaaaatagaaaggggggaaataccctgatctccacagctcttaacaagaatgtttatagccccaaaccaatgaatggacatgtaatcaacaaatgatcaaatactacatcatttgaggtgttgaattttcccctagagactcagttcttgtgcaggttgggcctgggaaagtcccaagccatcagctcaggtccagccagcctcccggatggccagatatgcaggagggtgggtttccttcatcccccaggttgatgaaagacttttccaccaggctggcagggcagggcctggagcactgaggcagagatctccctgcccgagcacctcggcccgcccttctcattccggtttcctttgacccattcttgggtgagcgccagtgttctcaaggccgtgcccgatgtggtgtcttgtggctcaagggctgtgccaaggaagctgcggaccaaggccagggaccacacgcctgaggtgctggttcggagctgcttagtaccctgtgagaagacaaagaccatccgggagggcgtgctggccatcattaactatgtgtccaaagtgggcagccggccctgggtgccccaggtgcccattcagttccaccagcagagactgggccatggactcatcatctcctgtcctggggcccggccagagcatgcagtggcctgggacaaagaccgccagcacctctaccgcacacagtacctgaagggtgtcaacaggtccatgagggtgttcattgaccacggcaaccagctccacatccgcttcacccagctggatgaccggggcatctactattgctggaggcagggtgtgctagttgctggcttccggctgggtgtgacatctcatgggcactacccagcctcgttctcagatcctgagactcgctcggctgtggagctcaccctgataggctacctgctcatcacagcagtctttgtcaccattcacttctgtcgttgctgctgctacttatttcactgttgtcccagcttctccccctaggagctctcttcagctctgaagaccagttgtccttcaatgtgtttgttaaatgataccagatgtctctgggtgggtaccctgggttgggacaggtggtaggaacatgtggacaaatctgttacagcctgctccccattttcatgggcaggtctgggacctgatctgagaagtggaggggcctgaggctggtgggagattggggactgagctcaggatggaagtagggcacatgtgtttcctgacttcacatttaggtcagagaaggaaagtgtgaactcagatttatccagtggtaaacactgatcagtgttgaatcatg

SEQ ID NO: 280918 - DNA, 3401 bp, Homo sapiens
  misc_feature (14)..(14): n is a, c, g, or t
cagctggtacggcnccggagtatggatgcaaggggaccaaggccgggactgctggggtgaaggtccgggaggctgctaggggacggaagggcacaggccatggaaaggaatgacatcatcaacttcaaggctttggagaaagagctgcaggctgcactcactgctgatgagaagtacaaacgggagaatgctgccaagttacgggcagtggaacagagggtggcttcctatgaggagttcaggggtattgtccttgcatcacatctgaagccactggagcggaaggataagatgggaggaaagagaactgtgccctggaactgtcacactattcagggaaggaccttccaggatgtggccactgaaatctccccggagaaagcccccctccagcccgagacgtctgctgacttctatcgtgattggcgacgacacttgccaagtgggccagagcgctaccaggctctactgcagcttgggggtccaaggctcggctgcctcttccagacagatgtgggatttggacttcttggggagctgctggtggcactggctgatcacgtggggccggctgaccgggcagcggtgctggggatcctatgcagcctggcgagcactgggcgcttcaccctgaacctaagcctgctgagccgggcagagagagagagctgcaagggcttgtttcagaagctgcaagccatgggcaaccccagatccgtgaaggaggggctcagctgggaggagcagggtctggaggagcagtctggtgggctccaggaggaggagaggctcctgcaggagctgctggagctgtaccaggttgactgatgcggcaagctaccctcagaggtcccagtggtcactggaggcagttttttggttgttgtcttgggggttctgcaggaccataataagaaacccacacctggttcccttctcaacttggaattttcagagcaaaaacaggaatcaagtcttccccacttctccagtccctcagtgtctcgctgttttgaactgtgtgtatccatggacagtcaagagctcaggaagttgagagcggttttgtttcccacccttagagtctgccaagcctctagcccactggccttgagagatgagtgtgtgcccaaccaaatgctggctataccagttacagcctccactcataaaagggaaaaagcaaaatctttatggtaaacaaacactgatctccacagctcttaacaagaatgtttatagccccaaaccaatgaatggacatgtaatcaacaaatgatcaaatactacatcatttgaggtgttgaattttcccctagagactcagttcttgtgcaggttgggcctgggaaagtcccaagccatcagctcaggtccagccagcctcccggatggccagatatgcaggagggtgggtttccttcatcccccaggttgatgaaagacttttccaccaggctggcagggcagggcctggagcactgaggcagagatctccctgcccgagcacctcggcccgcccttctcattccggtttcctttgacccattcttgggtgagcgccagtgttctagaaaggggagtaaaggccaggttctagaatggctttccccccccaccctgagatcaggtctggaatgttagaagggcatcttgtacatccactgggaataaattgccttgcacttggcggcttcctctgcagattgttgctgcttttcctggctgcataatcctttcctcatctagaggcttccgcttagcagagctttctaggagccctatgagcctttaatgccctggttttgccctgcccctctgacccctgcctccttcaggtatgcacctggccctcaccactgtgctcctgtgggcatgggggctccaggcctttgaaattgtggagaaggaaaacatttttcagaggaccccctgccctgctttcctgatgtttgaaaatgcagcctacctggccgacatgagctttgagcttccctgtcactgcaaacccgaagaggtgccagctgtagtctggttctaccaaaagcacctaggtagcagccacaccaaagtgctgacggactttgatgggcgggtgctgacggaggcagcccaggtacgtgtgggcagcgacatgctgacccgcttcagcatccgcatgttcagcttgttggttttcagggctcagtctgaggactcaggcctgtacttctgcggcacccgcaagggggactacttttacgcctacgatgtggacatccagaacagtgagggaatggtggccactttccaggacaagggccaggagccctttgcagatgaatactatgggcacctccatgtcttcaccaccttctgggaatggaccccctgtgaccgctgcggagtgcgtggggagcagtggcgcatcggcctctgctacctgcagagcccagacctctccccacgctacctcaaggccgtgcccgatgtggtgtcttgtggctcaagggctgtgccaaggaagctgcggaccaaggccagggaccacacgcctgaggtgctggttcggagctgcttagtaccctgtgagaagacaaagaccatccgggagggcgtgctggccatcattaactatgtgtccaaagtgggcagccggccctgggtgccccaggtgcccattcagttccaccagcagagactgggccatggactcatcatctcctgtcctggggcccggccagagcatgcagtggcctgggacaaagaccgccagcacctctaccgcacacagtacctgaagggtgtcaacaggtccatgagggtgttcattgaccacggcaaccagctccacatccgcttcacccagctggatgaccggggcatctactattgctggaggcagggtgtgctagttgctggcttccggctgggtgtgacatctcatgggcactacccagcctcgttctcagatcctgagactcgctcggctgtggagctcaccctgataggctacctgctcatcacagcagtctttgtcaccattcacttctgtcgttgctgctgctacttatttcactgttgtcccagcttctccccctaggagctctcttcagctctgaagaccagttgtccttcaatgtgtttgttaaatgataccagatgtctctgggtgggtaccctgggttgggacaggtggtaggaacatgtggacaaatctgttacagcctgctccccattttcatgggcaggtctgggacctgatctgagaagtggaggggcctgaggctggtgggagattggggactgagctcaggatggaagtagggcacatgtgtttcctgacttcacatttaggtcagagaaggaaagtgtgaactcagatttatccagtggtaaacactgatcagtgttgaatcatg

SEQ ID NO: 280919 - DNA, 3355 bp, Homo sapiens
ttctgcccgggaggacaaccctctgcctgaggaccagttccgaggcacaggccatggaaaggaatgacatcatcaacttcaaggctttggagaaagagctgcaggctgcactcactgctgatgagaagtacaaacgggagaatgctgccaagttacgggcagtggaacagagggtggcttcctatgaggagttcaggggtattgtccttgcatcacatctgaagccactggagcggaaggataagatgggaggaaagagaactgtgccctggaactgtcacactattcagggaaggaccttccaggatgtggccactgaaatctccccggagaaagcccccctccagcccgagacgtctgctgacttctatcgtgattggcgacgacacttgccaagtgggccagagcgctaccaggctctactgcagcttgggggtccaaggctcggctgcctcttccagacagatgtgggatttggacttcttggggagctgctggtggcactggctgatcacgtggggccggctgaccgggcagcggtgctggggatcctatgcagcctggcgagcactgggcgcttcaccctgaacctaagcctgctgagccgggcagagagagagagctgcaagggcttgtttcagaagctgcaagccatgggcaaccccagatccgtgaaggaggggctcagctgggaggagcagggtctggaggagcagtctggtgggctccaggaggaggagaggctcctgcaggagctgctggagctgtaccaggttgactgatgcggcaagctaccctcagaggtcccagtggtcactggaggcagttttttggttgttgtcttgggggttctgcaggaccataataagaaacccacacctggttcccttctcaacttggaattttcagagcaaaaacaggaatcaagtcttccccacttctccagtccctcagtgtctcgctgttttgaactgtgtgtatccatggacagtcaagagctcaggaagttgagagcggttttgtttcccacccttagagtctgccaagcctctagcccactggccttgagagatgagtgtgtgcccaaccaaatgctggctataccagttacagcctccactcataaaagggaaaaagcaaaatctttatggtaaacaaacactgatctccacagctcttaacaagaatgtttatagccccaaaccaatgaatggacatgtaatcaacaaatgatcaaatactacatcatttgaggtgttgaattttcccctagagactcagttcttgtgcaggttgggcctgggaaagtcccaagccatcagctcaggtccagccagcctcccggatggccagatatgcaggagggtgggtttccttcatcccccaggttgatgaaagacttttccaccaggctggcagggcagggcctggagcactgaggcagagatctccctgcccgagcacctcggcccgcccttctcattccggtttcctttgacccattcttgggtgagcgccagtgttctagaaaggggagtaaaggccaggttctagaatggctttccccccccaccctgagatcaggtctggaatgttagaagggcatcttgtacatccactgggaataaattgccttgcacttggcggcttcctctgcagattgttgctgcttttcctggctgcataatcctttcctcatctagaggcttccgcttagcagagctttctaggagccctatgagcctttaatgccctggttttgccctgcccctctgacccctgcctccttcaggtatgcacctggccctcaccactgtgctcctgtgggcatgggggctccaggcctttgaaattgtggagaaggaaaacatttttcagaggaccccctgccctgctttcctgatgtttgaaaatgcagcctacctggccgacatgagctttgagcttccctgtcactgcaaacccgaagaggtgccagctgtagtctggttctaccaaaagcacctaggtagcagccacaccaaagtgctgacggactttgatgggcgggtgctgacggaggcagcccaggtacgtgtgggcagcgacatgctgacccgcttcagcatccgcatgttcagcttgttggttttcagggctcagtctgaggactcaggcctgtacttctgcggcacccgcaagggggactacttttacgcctacgatgtggacatccagaacagtgagggaatggtggccactttccaggacaagggccaggagccctttgcagatgaatactatgggcacctccatgtcttcaccaccttctgggaatggaccccctgtgaccgctgcggagtgcgtggggagcagtggcgcatcggcctctgctacctgcagagcccagacctctccccacgctacctcaaggccgtgcccgatgtggtgtcttgtggctcaagggctgtgccaaggaagctgcggaccaaggccagggaccacacgcctgaggtgctggttcggagctgcttagtaccctgtgagaagacaaagaccatccgggagggcgtgctggccatcattaactatgtgtccaaagtgggcagccggccctgggtgccccaggtgcccattcagttccaccagcagagactgggccatggactcatcatctcctgtcctggggcccggccagagcatgcagtggcctgggacaaagaccgccagcacctctaccgcacacagtacctgaagggtgtcaacaggtccatgagggtgttcattgaccacggcaaccagctccacatccgcttcacccagctggatgaccggggcatctactattgctggaggcagggtgtgctagttgctggcttccggctgggtgtgacatctcatgggcactacccagcctcgttctcagatcctgagactcgctcggctgtggagctcaccctgataggctacctgctcatcacagcagtctttgtcaccattcacttctgtcgttgctgctgctacttatttcactgttgtcccagcttctccccctaggagctctcttcagctctgaagaccagttgtccttcaatgtgtttgttaaatgataccagatgtctctgggtgggtaccctgggttgggacaggtggtaggaacatgtggacaaatctgttacagcctgctccccattttcatgggcaggtctgggacctgatctgagaagtggaggggcctgaggctggtgggagattggggactgagctcaggatggaagtagggcacatgtgtttcctgacttcacatttaggtcagagaaggaaagtgtgaactcagatttatccagtggtaaacactgatcagtgttgaatcatg

SEQ ID NO: 280920 - DNA, 2252 bp, Homo sapiens
ggggcctcggaggaggggcggcggggataaagagcaaaatctttatggtaaacaaacactgatctccacagctcttaacaagaatgtttatagccccaaaccaatgaatggacatgtaatcaacaaatgatcaaatactacatcatttgaggtgttgaattttcccctagagactcagttcttgtgcaggttgggcctgggaaagtcccaagccatcagctcaggtccagccagcctcccggatggccagatatgcaggagggtgggtttccttcatcccccaggttgatgaaagacttttccaccaggctggcagggcagggcctggagcactgaggcagagatctccctgcccgagcacctcggcccgcccttctcattccggtttcctttgacccattcttgggtgagcgccagtgttctagaaaggggagtaaaggccaggttctagaatggctttccccccccaccctgagatcaggtctggaatgttagaagggcatcttgtacatccactgggaataaattgccttgcacttggcggcttcctctgcagattgttgctgcttttcctggctgcataatcctttcctcatctagaggcttccgcttagcagagctttctaggagccctatgagcctttaatgccctggttttgccctgcccctctgacccctgcctccttcaggtatgcacctggccctcaccactgtgctcctgtgggcatgggggctccaggcctttgaaattgtggagaaggaaaacatttttcagaggaccccctgccctgctttcctgatgtttgaaaatgcagcctacctggccgacatgagctttgagcttccctgtcactgcaaacccgaagaggtgccagctgtagtctggttctaccaaaagcacctaggtagcagccacaccaaagtgctgacggactttgatgggcgggtgctgacggaggcagcccaggtacgtgtgggcagcgacatgctgacccgcttcagcatccgcatgttcagcttgttggttttcagggctcagtctgaggactcaggcctgtacttctgcggcacccgcaagggggactacttttacgcctacgatgtggacatccagaacagtgagggaatggtggccactttccaggacaagggccaggagccctttgcagatgaatactatgggcacctccatgtcttcaccaccttctgggaatggaccccctgtgaccgctgcggagtgcgtggggagcagtggcgcatcggcctctgctacctgcagagcccagacctctccccacgctacctcaaggccgtgcccgatgtggtgtcttgtggctcaagggctgtgccaaggaagctgcggaccaaggccagggaccacacgcctgaggtgctggttcggagctgcttagtaccctgtgagaagacaaagaccatccgggagggcgtgctggccatcattaactatgtgtccaaagtgggcagccggccctgggtgccccaggtgcccattcagttccaccagcagagactgggccatggactcatcatctcctgtcctggggcccggccagagcatgcagtggcctgggacaaagaccgccagcacctctaccgcacacagtacctgaagggtgtcaacaggtccatgagggtgttcattgaccacggcaaccagctccacatccgcttcacccagctggatgaccggggcatctactattgctggaggcagggtgtgctagttgctggcttccggctgggtgtgacatctcatgggcactacccagcctcgttctcagatcctgagactcgctcggctgtggagctcaccctgataggctacctgctcatcacagcagtctttgtcaccattcacttctgtcgttgctgctgctacttatttcactgttgtcccagcttctccccctaggagctctcttcagctctgaagaccagttgtccttcaatgtgtttgttaaatgataccagatgtctctgggtgggtaccctgggttgggacaggtggtaggaacatgtggacaaatctgttacagcctgctccccattttcatgggcaggtctgggacctgatctgagaagtggaggggcctgaggctggtgggagattggggactgagctcaggatggaagtagggcacatgtgtttcctgacttcacatttaggtcagagaaggaaagtgtgaactcagatttatccagtggtaaacactgatcagtgttgaatcatg

SEQ ID NO: 280921 - DNA, 1297 bp, Homo sapiens
taaaggaacgcgccccgcgccgggcaaccacagctgcgggcgtggtctgcgcggggttgccctcctgttctggtttatcaggggatccccaaagaaagcaaggggaccaaggccgggactgctggggtgaaggtccgggaggctgctaggggacggaagggcacaggccatggaaaggaatgacatcatcaacttcaaggctttggagaaagagctgcaggctgcactcactgctgatgagaagtacaaacgggagaatgctgccaagttacgggcagtggaacagagggtggcttcctatgaggagttcaggggtattgtccttgcatcacatctgaagccactggagcggaaggataagatgggaggaaagagaactgtgccctggaactgtcacactattcagggaaggaccttccaggatgtggccactgaaatctccccggagaaagcccccctccagcccgagacgtctgctgacttctatcgtgattggcgacgacacttgccaagtgggccagagcgctaccaggctctactgcagcttgggggtccaaggctcggctgcctcttccagacagatgtgggatttggacttcttggggagctgctggtggcactggctgatcacgtggggccggctgaccgggcagcggtgctggggatcctatgcagcctggcgagcactgggcgcttcaccctgaacctaagcctgctgagccgggcagagagagagagctgcaagggcttgtttcagaagctgcaagccatgggcaaccccagatccgtgaaggaggggctcagctgggaggagcagggtctggaggagcagtctggtgggctccaggaggaggagaggctcctgcaggagctgctggagctgtaccaggttgactgatgcggcaagctaccctcagaggtcccagtggtcactggaggcagttttttggttgttgtcttgggggttctgcaggaccataataagaaacccacacctggttcccttctcaacttggaattttcagagcaaaaacaggaatcaagtcttccccacttctccagtccctcagtgtctcgctgttttgaactgtgtgtatccatggacagtcaagagctcaggaagttgagagcggttttgtttcccacccttagagtctgccaagcctctagcccactggccttgagagatgagtgtgtgcccaaccaaatgctggctataccagttacagcctccactcataaaagggaaaatctggagatgaaacgaataaagaagaagtccaggtagggccgagcc

SEQ ID NO: 280922 - DNA, 3471 bp, Homo sapiens
taaaggaacgcgccccgcgccgggcaaccacagctgcgggcgtggtctgcgcggggttgccctcctgttctggtttatcaggggatccccaaagaaagcaaggggaccaaggccgggactgctggggtgaaggtccgggaggctgctaggggacggaagggcacaggccatggaaaggaatgacatcatcaacttcaaggctttggagaaagagctgcaggctgcactcactgctgatgagaagtacaaacgggagaatgctgccaagttacgggcagtggaacagagggtggcttcctatgaggagttcaggggtattgtccttgcatcacatctgaagccactggagcggaaggataagatgggaggaaagagaactgtgccctggaactgtcacactattcagggaaggaccttccaggatgtggccactgaaatctccccggagaaagcccccctccagcccgagacgtctgctgacttctatcgtgattggcgacgacacttgccaagtgggccagagcgctaccaggctctactgcagcttgggggtccaaggctcggctgcctcttccagacagatgtgggatttggacttcttggggagctgctggtggcactggctgatcacgtggggccggctgaccgggcagcggtgctggggatcctatgcagcctggcgagcactgggcgcttcaccctgaacctaagcctgctgagccgggcagagagagagagctgcaagggcttgtttcagaagctgcaagccatgggcaaccccagatccgtgaaggaggggctcagctgggaggagcagggtctggaggagcagtctggtgggctccaggaggaggagaggctcctgcaggagctgctggagctgtaccaggttgactgatgcggcaagctaccctcagaggtcccagtggtcactggaggcagttttttggttgttgtcttgggggttctgcaggaccataataagaaacccacacctggttcccttctcaacttggaattttcagagcaaaaacaggaatcaagtcttccccacttctccagtccctcagtgtctcgctgttttgaactgtgtgtatccatggacagtcaagagctcaggaagttgagagcggttttgtttcccacccttagagtctgccaagcctctagcccactggccttgagagatgagtgtgtgcccaaccaaatgctggctataccagttacagcctccactcataaaagggaaaaagcaaaatctttatggtaaacaaacactgatctccacagctcttaacaagaatgtttatagccccaaaccaatgaatggacatgtaatcaacaaatgatcaaatactacatcatttgaggtgttgaattttcccctagagactcagttcttgtgcaggttgggcctgggaaagtcccaagccatcagctcaggtccagccagcctcccggatggccagatatgcaggagggtgggtttccttcatcccccaggttgatgaaagacttttccaccaggctggcagggcagggcctggagcactgaggcagagatctccctgcccgagcacctcggcccgcccttctcattccggtttcctttgacccattcttgggtgagcgccagtgttctagaaaggggagtaaaggccaggttctagaatggctttccccccccaccctgagatcaggtctggaatgttagaagggcatcttgtacatccactgggaataaattgccttgcacttggcggcttcctctgcagattgttgctgcttttcctggctgcataatcctttcctcatctagaggcttccgcttagcagagctttctaggagccctatgagcctttaatgccctggttttgccctgcccctctgacccctgcctccttcaggtatgcacctggccctcaccactgtgctcctgtgggcatgggggctccaggcctttgaaattgtggagaaggaaaacatttttcagaggaccccctgccctgctttcctgatgtttgaaaatgcagcctacctggccgacatgagctttgagcttccctgtcactgcaaacccgaagaggtgccagctgtagtctggttctaccaaaagcacctaggtagcagccacaccaaagtgctgacggactttgatgggcgggtgctgacggaggcagcccaggtacgtgtgggcagcgacatgctgacccgcttcagcatccgcatgttcagcttgttggttttcagggctcagtctgaggactcaggcctgtacttctgcggcacccgcaagggggactacttttacgcctacgatgtggacatccagaacagtgagggaatggtggccactttccaggacaagggccaggagccctttgcagatgaatactatgggcacctccatgtcttcaccaccttctgggaatggaccccctgtgaccgctgcggagtgcgtggggagcagtggcgcatcggcctctgctacctgcagagcccagacctctccccacgctacctcaaggccgtgcccgatgtggtgtcttgtggctcaagggctgtgccaaggaagctgcggaccaaggccagggaccacacgcctgaggtgctggttcggagctgcttagtaccctgtgagaagacaaagaccatccgggagggcgtgctggccatcattaactatgtgtccaaagtgggcagccggccctgggtgccccaggtgcccattcagttccaccagcagagactgggccatggactcatcatctcctgtcctggggcccggccagagcatgcagtggcctgggacaaagaccgccagcacctctaccgcacacagtacctgaagggtgtcaacaggtccatgagggtgttcattgaccacggcaaccagctccacatccgcttcacccagctggatgaccggggcatctactattgctggaggcagggtgtgctagttgctggcttccggctgggtgtgacatctcatgggcactacccagcctcgttctcagatcctgagactcgctcggctgtggagctcaccctgataggctacctgctcatcacagcagtctttgtcaccattcacttctgtcgttgctgctgctacttatttcactgttgtcccagcttctccccctaggagctctcttcagctctgaagaccagttgtccttcaatgtgtttgttaaatgataccagatgtctctgggtgggtaccctgggttgggacaggtggtaggaacatgtggacaaatctgttacagcctgctccccattttcatgggcaggtctgggacctgatctgagaagtggaggggcctgaggctggtgggagattggggactgagctcaggatggaagtagggcacatgtgtttcctgacttcacatttaggtcagagaaggaaagtgtgaactcagatttatccagtggtaaacactgatcagtgttgaatcatg

SEQ ID NO: 280923 - DNA, 2589 bp, Homo sapiens
taaaggaacgcgccccgcgccgggcaaccacagctgcgggcgtggtctgcgcggggttgccctcctgttctggtttatcaggggatccccaaagaaagcaaggggaccaaggccgggactgctggggtgaaggtccgggaggctgctaggggacggaagggcacaggccatggaaaggaatgacatcatcaacttcaaggctttggagaaagagctgcaggctgcactcactgctgatgagaagtacaaacgggagaatgctgccaagttacgggcagtggaacagagggtggcttcctatgaggagttcaggggtattgtccttgcatcacatctgaagccactggagcggaaggataagatgggaggaaagagaactgtgccctggaactgtcacactattcagggaaggaccttccaggatgtggccactgaaatctccccggagaaagcccccctccagcccgagacgtctgctgacttctatcgtgattggcgacgacacttgccaagtgggccagagcgctaccaggctctactgcagcttgggggtccaaggctcggctgcctcttccagacagatgtgggatttggacttcttggggagctgctggtggcactggctgatcacgtggggccggctgaccgggcagcggtgctggggatcctatgcagcctggcgagcactgggcgcttcaccctgaacctaagcctgctgagccgggcagagagagagagctgcaagggcttgtttcagaagctgcaagccatgggcaaccccagatccgtgaaggaggggctcagctgggaggagcagggtctggaggagcagtctggtgggctccaggaggaggagaggctcctgcaggagctgctggagctgtaccaggttgactgatgcggcaagctaccctcagaggtcccagtggtcactggaggcagttttttggttgttgtcttgggggttctgcaggaccataataagaaacccacacctggttcccttctcaacttggaattttcagagcaaaaacaggaatcaagtcttccccacttctccagtccctcagtgtctcgctgttttgaactgtgtgtatccatggacagtcaagagctcaggaagttgagagcggttttgtttcccacccttagagtctgccaagcctctagcccactggccttgagagatgagtgtgtgcccaaccaaatgctggctataccagttacagcctccactcataaaagggaaaaagcaaaatctttatggtaaacaaacactgatctccacagctcttaacaagaatgtttatagccccaaaccaatgaatggacatgtaatcaacaaatgatcaaatactacatcatttgaggtgttgaattttcccctagagactcagttcttgtgcaggttgggcctgggaaagtcccaagccatcagctcaggtccagccagcctcccggatggccagatatgcaggagggtgggtttccttcatcccccaggttgatgaaagacttttccaccaggctggcagggcagggcctggagcactgaggcagagatctccctgcccgagcacctcggcccgcccttctcattccggtttcctttgacccattcttgggtgagcgccagtgttctcaaggccgtgcccgatgtggtgtcttgtggctcaagggctgtgccaaggaagctgcggaccaaggccagggaccacacgcctgaggtgctggttcggagctgcttagtaccctgtgagaagacaaagaccatccgggagggcgtgctggccatcattaactatgtgtccaaagtgggcagccggccctgggtgccccaggtgcccattcagttccaccagcagagactgggccatggactcatcatctcctgtcctggggcccggccagagcatgcagtggcctgggacaaagaccgccagcacctctaccgcacacagtacctgaagggtgtcaacaggtccatgagggtgttcattgaccacggcaaccagctccacatccgcttcacccagctggatgaccggggcatctactattgctggaggcagggtgtgctagttgctggcttccggctgggtgtgacatctcatgggcactacccagcctcgttctcagatcctgagactcgctcggctgtggagctcaccctgataggctacctgctcatcacagcagtctttgtcaccattcacttctgtcgttgctgctgctacttatttcactgttgtcccagcttctccccctaggagctctcttcagctctgaagaccagttgtccttcaatgtgtttgttaaatgataccagatgtctctgggtgggtaccctgggttgggacaggtggtaggaacatgtggacaaatctgttacagcctgctccccattttcatgggcaggtctgggacctgatctgagaagtggaggggcctgaggctggtgggagattggggactgagctcaggatggaagtagggcacatgtgtttcctgacttcacatttaggtcagagaaggaaagtgtgaactcagatttatccagtggtaaacactgatcagtgttgaatcatg

SEQ ID NO: 280924 - DNA, 2845 bp, Homo sapiens
  misc_feature (14)..(14): n is a, c, g, or t
cagctggtacggcnccggagtatggatgcaaggggaccaaggccgggactgctggggtgaaggtccgggaggctgctaggggacggaagggcacaggccatggaaaggaatgacatcatcaacttcaaggctttggagaaagagctgcaggctgcactcactgctgatgagaagtacaaacgggagaatgctgccaagttacgggcagtggaacagagggtggcttcctatgaggagttcaggggtattgtccttgcatcacatctgaagccactggagcggaaggataagatgggaggaaagagaactgtgccctggaactgtcacactattcagggaaggaccttccaggatgtggccactgaaatctccccggagaaagcccccctccagcccgagacgtctgctgacttctatcgtgattggcgacgacacttgccaagtgggccagagcgctaccaggctctactgcagcttgggggtccaaggctcggctgcctcttccagacagatgtgggatttggacttcttggggagctgctggtggcactggctgatcacgtggggccggctgaccgggcagcggtgctggggatcctatgcagcctggcgagcactgggcgcttcaccctgaacctaagcctgctgagccgggcagagagagagagctgcaagaatgtttatagccccaaaccaatgaatggacatgtaatcaacaaatgatcaaatactacatcatttgaggtgttgaattttcccctagagactcagttcttgtgcaggttgggcctgggaaagtcccaagccatcagctcaggtccagccagcctcccggatggccagatatgcaggagggtgggtttccttcatcccccaggttgatgaaagacttttccaccaggctggcagggcagggcctggagcactgaggcagagatctccctgcccgagcacctcggcccgcccttctcattccggtttcctttgacccattcttgggtgagcgccagtgttctagaaaggggagtaaaggccaggttctagaatggctttccccccccaccctgagatcaggtctggaatgttagaagggcatcttgtacatccactgggaataaattgccttgcacttggcggcttcctctgcagattgttgctgcttttcctggctgcataatcctttcctcatctagaggcttccgcttagcagagctttctaggagccctatgagcctttaatgccctggttttgccctgcccctctgacccctgcctccttcaggtatgcacctggccctcaccactgtgctcctgtgggcatgggggctccaggcctttgaaattgtggagaaggaaaacatttttcagaggaccccctgccctgctttcctgatgtttgaaaatgcagcctacctggccgacatgagctttgagcttccctgtcactgcaaacccgaagaggtgccagctgtagtctggttctaccaaaagcacctaggtagcagccacaccaaagtgctgacggactttgatgggcgggtgctgacggaggcagcccaggtacgtgtgggcagcgacatgctgacccgcttcagcatccgcatgttcagcttgttggttttcagggctcagtctgaggactcaggcctgtacttctgcggcacccgcaagggggactacttttacgcctacgatgtggacatccagaacagtgagggaatggtggccactttccaggacaagggccaggagccctttgcagatgaatactatgggcacctccatgtcttcaccaccttctgggaatggaccccctgtgaccgctgcggagtgcgtggggagcagtggcgcatcggcctctgctacctgcagagcccagacctctccccacgctacctcaaggccgtgcccgatgtggtgtcttgtggctcaagggctgtgccaaggaagctgcggaccaaggccagggaccacacgcctgaggtgctggttcggagctgcttagtaccctgtgagaagacaaagaccatccgggagggcgtgctggccatcattaactatgtgtccaaagtgggcagccggccctgggtgccccaggtgcccattcagttccaccagcagagactgggccatggactcatcatctcctgtcctggggcccggccagagcatgcagtggcctgggacaaagaccgccagcacctctaccgcacacagtacctgaagggtgtcaacaggtccatgagggtgttcattgaccacggcaaccagctccacatccgcttcacccagctggatgaccggggcatctactattgctggaggcagggtgtgctagttgctggcttccggctgggtgtgacatctcatgggcactacccagcctcgttctcagatcctgagactcgctcggctgtggagctcaccctgataggctacctgctcatcacagcagtctttgtcaccattcacttctgtcgttgctgctgctacttatttcactgttgtcccagcttctccccctaggagctctcttcagctctgaagaccagttgtccttcaatgtgtttgttaaatgataccagatgtctctgggtgggtaccctgggttgggacaggtggtaggaacatgtggacaaatctgttacagcctgctccccattttcatgggcaggtctgggacctgatctgagaagtggaggggcctgaggctggtgggagattggggactgagctcaggatggaagtagggcacatgtgtttcctgacttcacatttaggtcagagaaggaaagtgtgaactcagatttatccagtggtaaacactgatcagtgttgaatcatg

SEQ ID NO: 280925 - DNA, 679 bp, Homo sapiens
tcagccttcccgacacctttcctggcttcctttccacctcactaagtgctcctccttagcctcaccctcttccatttgggttctgtcctaagtcccccctctagaccctcttactagatgatctcatccattcccaaccatagtttgatcacacccaaattcttctccagtccagactggcccatttacttaatgtgtcttcttgtagggctgggcgtggtggctcatgcctgtaatcccagcactttgagaggccgagatgggcggatcacctgcggtcagaggttcgacaccagcctggccaacatggcgaaaccccatctctactaaaagtacaaaaattatctgggcatggtggtgtgcgtctataatcccagctactcgggaggctgaggcaggagaatcgcttgaaccagggaggcggaggctgcagtaagctgaaatcgcgccactgcactccagcctgggtgacagagcaagactctgtcaaaaaaaaaaaagaagaagaagaggaagaggagcaggaggaagaggaagaggaagaaggaagaagaagaaggtgatctaaagcagaccacattggaggttgtgtggtctagaaccagtgcaggtcagaggttatacagtctggaactggagcaggttggaggttgcatagtttggaagcagaggaactggg

SEQ ID NO: 280926 - DNA, 1259 bp, Homo sapiens
ggagcgcgcggtccgggcacacggagcaggttgggaccgcggcgggtaccggggccggggcgccatgcggaggccgagcgtgcgcgcggccgggctggtcctgtgcaccctgtgttacctgctggtgggcgctgctgtcttcgacgcgctcgagtccgaggcggaaagcggccgccagcgactgctggtccagaagcggggcgctctccggaggaagttcggcttctcggccgaggactaccgcgagctggagcgcctggcgctccaggctgagccccaccgcgccggccgccagtggaagttccccggctccttctacttcgccatcaccgtcatcactaccatcgggtacggccacgccgcgccgggtacggactccggcaaggtcttctgcatgttctacgcgctcctgggcatcccgctgacgctggtcactttccagagcctgggcgaacggctgaacgcggtggtgcggcgcctcctgttggcggccaagtgctgcctgggcctgcggtggacgtgcgtgtccacggagaacctggtggtggccgggctgctggcgtgtgccgccaccctggccctcggggccgtcgccttctcgcacttcgagggctggaccttcttccacgcctactactactgcttcatcaccctcaccaccatcggcttcggcgacttcgtggcactgcagagcggcgaggcgctgcagaggaagctcccctacgtggccttcagcttcctctacatcctcctggggctcacggtcattggcgccttcctcaacctggtggtcctgcgcttcctcgttgccagcgccgactggcccgagcgcgctgcccgcccccccagcccgcgccccccgggggcgcccgagagccgtggcctctggctgccccgccgcccggcccgctccgtgggctccgcctctgtcttctgccacgtgcacaagctggagaggtgcgcccgcgacaacctgggcttttcgcccccctcgagcccgggggtcgtgcgtggcgggcaggctcccaggcctggggcccggtggaagtccatctgacaaccccacccaggccagggtcgaatctggaatgggagggtctggcttcagctatcagggcaccctccccagggattggaaacggatgacgggcctctaggcggtcttctgccacgagcagtttctcattactgtctgtggctaagtcccctccctcctttccaaaaatatattacagtcacaccataagcacaaaaaaaaa

SEQ ID NO: 280927 - DNA, 1570 bp, Homo sapiens
ggagcgcgcggtccgggcacacggagcaggttgggaccgcggcgggtaccggggccggggcgccatgcggaggccgagcgtgcgcgcggccgggctggtcctgtgcaccctgtgttacctgctggtgggcgctgctgtcttcgacgcgctcgagtccgaggcggaaagcggccgccagcgactgctggtccagaagcggggcgctctccggaggaagttcggcttctcggccgaggactaccgcgagctggagcgcctggcgctccaggctgagccccaccgcgccggccgccagtggaagttccccggctccttctacttcgccatcaccgtcatcactaccatcgatgaacacctgccgcgtaactgcagccacggtcaagacggaacattgccatcaacccccaaaattctaccatgccttctgtagttaagcctgcccccaaccccagctactggcaagcaaccacagatctgttctctgttgccacagttttgtcatttccagagtgtcatttatagggaaccatgcggtctgtaggctttcgagctcgtcttcctctactcagcttagacatttgagatccatccttggttgccgcaagttacaggagttcattcagttgctgaaaaaaattggtgtttggatgccccacagggtacggccacgccgcgccgggtacggactccggcaaggtcttctgcatgttctacgcgctcctgggcatcccgctgacgctggtcactttccagagcctgggcgaacggctgaacgcggtggtgcggcgcctcctgttggcggccaagtgctgcctgggcctgcggtggacgtgcgtgtccacggagaacctggtggtggccgggctgctggcgtgtgccgccaccctggccctcggggccgtcgccttctcgcacttcgagggctggaccttcttccacgcctactactactgcttcatcaccctcaccaccatcggcttcggcgacttcgtggcactgcagagcggcgaggcgctgcagaggaagctcccctacgtggccttcagcttcctctacatcctcctggggctcacggtcattggcgccttcctcaacctggtggtcctgcgcttcctcgttgccagcgccgactggcccgagcgcgctgcccgcccccccagcccgcgccccccgggggcgcccgagagccgtggcctctggctgccccgccgcccggcccgctccgtgggctccgcctctgtcttctgccacgtgcacaagctggagaggtgcgcccgcgacaacctgggcttttcgcccccctcgagcccgggggtcgtgcgtggcgggcaggctcccaggcctggggcccggtggaagtccatctgacaaccccacccaggccagggtcgaatctggaatgggagggtctggcttcagctatcagggcaccctccccagggattggaaacggatgacgggcctctaggcggtcttctgccacgagcagtttctcattactgtctgtggctaagtcccctccctcctttccaaaaatatattacagtcacaccataagcacaaaaaaaaa

SEQ ID NO: 280928 - DNA, 526 bp, Homo sapiens
cggccgccagcgactgctggtccagaagcggggcgctctccggaggaagttcggcttctcggccgaggactaccgcgagctggagcgcctggcgctccaggctgagccccaccgcgccggccgccagtggaagttccccggctccttctacttcgccatcaccgtcatcactaccatcggtgagccgcccggagcctccctccgcgcccgctccagccccagccgtcccggggcgcctctgggtttcggtcccacctctgcccccgcccagctgagctactttggacgggtcatttcggctcaccgagcctccctcatctccttcgcctccctcgtctccctggtctcctttgcccccctctgctgaatggagctgtcagcccacgcaggcagggacgggaggaatcagtaaatcgagtttgccaaaaggctgacccaggagtgctcagaaaacgtccaaggggcttggagataggtgaagcggggctgggagaccaagtggctggatttgcttttccttgcctgg

SEQ ID NO: 280929 - DNA, 1133 bp, Homo sapiens
agacagcagcgcccaccagcaggtaacacagggtgcacaggaccagcccggccgcgcgcacgctcggcctccgcatggcgccccggccccggtacccgccgcggtcccaacctgctccgtgtgcccggaccgcgcgctccaggctgagccccaccgcgccggccgccagtggaagttccccggctccttctacttcgccatcaccgtcatcactaccatcgggtacggccacgccgcgccgggtacggactccggcaaggtcttctgcatgttctacgcgctcctgggcatcccgctgacgctggtcactttccagagcctgggcgaacggctgaacgcggtggtgcggcgcctcctgttggcggccaagtgctgcctgggcctgcggtggacgtgcgtgtccacggagaacctggtggtggccgggctgctggcgtgtgccgccaccctggccctcggggccgtcgccttctcgcacttcgagggctggaccttcttccacgcctactactactgcttcatcaccctcaccaccatcggcttcggcgacttcgtggcactgcagagcggcgaggcgctgcagaggaagctcccctacgtggccttcagcttcctctacatcctcctggggctcacggtcattggcgccttcctcaacctggtggtcctgcgcttcctcgttgccagcgccgactggcccgagcgcgctgcccgcccccccagcccgcgccccccgggggcgcccgagagccgtggcctctggctgccccgccgcccggcccgctccgtgggctccgcctctgtcttctgccacgtgcacaagctggagaggtgcgcccgcgacaacctgggcttttcgcccccctcgagcccgggggtcgtgcgtggcgggcaggctcccaggcctggggcccggtggaagtccatctgacaaccccacccaggccagggtcgaatctggaatgggagggtctggcttcagctatcagggcaccctccccagggattggaaacggatgacgggcctctaggcggtcttctgccacgagcagtttctcattactgtctgtggctaagtcccctccctcctttccaaaaatatattacagtcacaccataagcacaaaaaaaaa

SEQ ID NO: 280930 - DNA, 399 bp, Homo sapiens
gggttgtgtgatgaaacctgggacatgcaaaaatgcacatgacttcattttcaagtaagttttatatacatatatatttaggagactcagatacggaaaattcagcccaaatatttgctagaaattaatcatgaatctgaaaaggtcattataatttggaaaaacatacagaattctattcttgctaaatgacagatcaatagatcacttttataaatagggccttgagaacccacaaaatcaaagaaaaactaaactatgttcattgtgttctggtttgagctcaaactttattatattcctgttttttgaataggcagagatctacaatttagaatagaaatttacaggcaatataattaataattttaggccgggtgcttatgtctgcaatcccag

SEQ ID NO: 280931 - DNA, 438 bp, Homo sapiens
taatcagcaggtcacattgactagacgaaaaatggttgagccagatggccttctatactgggagagattcttggttatgcagcacaagaatcacagatatggctgatcctatcacaaatgtgccttgccagacataaagagatactttttcccttcagaagagtgaacaaggaccaagacagatggtttaaagtaaaagaaaaagaaacagtatgaaacctcagctggggatcacttgaaaccatacaaggccaccaaggataggttcccaccttggaccacacaagatcgccaacctgaaacttaacaccagtggacacttccgttgttggaacagaagatagtattggctgaacctacaggaaagggtcaaaaaacttcatcagaaattcaaaaaaagaaactatgtataaagtacattaaaaatgctaacaatgt

SEQ ID NO: 280932 - DNA, 747 bp, Homo sapiens
taatcagcaggtcacattgactagacgaaaaatggttgagccagatggccttctatactgggagagattcttggttatgcagcacaagaatcacagatatggctgatcctatcacaaatgtgccttgccagacataaagagatactttttcccttcagaagagtgaacaaggaccaagacagatggtttaaagtaaaagaaaaagaaacagtatgaaacctcagctggggatcacttgaaaccatacaaggccaccaaggataggttcccaccttggaccacacaagatcgccaacctgaaacttaacaccagtggacacttccgttgttggaacagaagatagtattggctgaacctacaggaaagggtcaaaaaacttcatcagaaattcaaaaaaagaaactatgtataaagtacattaaaaatgctaacaatgtaattttatcttcagttatactttgatacaggaaagtgtcaaaaaacatcagaaattcaaaaaaagaaactaggtataaagtacattaaaaatgctaacaatgtaattttatcttcaattatactttgatacaggaaagggtcaaaaaacatcagaaattcaaaaaaagaaactagatataaagtacattaaaaatgctaacaatgtaattttatcttcaattatactttgatacaggaaagggtcaaaaaacatcagaaattcaaaaaaagaaactatgtataaagtacattaaaagtgctaacaatgt

SEQ ID NO: 280933 - DNA, 644 bp, Homo sapiens
taatcagcaggtcacattgactagacgaaaaatggttgagccagatggccttctatactgggagagattcttggttatgcagcacaagaatcacagatatggctgatcctatcacaaatgtgccttgccagacataaagagatactttttcccttcagaagagtgaacaaggaccaagacagatggtttaaagtaaaagaaaaagaaacagtatgaaacctcagctggggatcacttgaaaccatacaaggccaccaaggataggttcccaccttggaccacacaagatcgccaacctgaaacttaacaccagtggacacttccgttgttggaacagaagatagtattggctgaacctacaggaaagggtcaaaaaacttcatcagaaattcaaaaaaagaaactatgtataaagtacattaaaaatgctaacaatgtaattttatcttcagttatactttgatacaggaaagtgtcaaaaaacatcagaaattcaaaaaaagaaactaggtataaagtacattaaaaatgctaacaatgtaattttatcttcaattatactttgatacaggaaagggtcaaaaaacatcagaaattcaaaaaaagaaactagatataaagtacattaaaaatgctaacaatgt

SEQ ID NO: 280934 - DNA, 533 bp, Homo sapiens
taatcagcaggtcacattgactagacgaaaaatggttgagccagatggccttctatactgggagagattcttggttatgcagcacaagaatcacagatatggctgatcctatcacaaatgtgccttgccagacataaagagatactttttcccttcagaagagtgaacaaggaccaagacagatggtttaaagtaaaagaaaaagaaacagtatgaaacctcagctggggatcacttgaaaccatacaaggccaccaaggataggttcccaccttggaccacacaagatcgccaacctgaaacttaacaccagtggacacttccgttgttggaacagaagatagtattggctgaacctacaggaaagggtcaaaaaacttcatcagaaattcaaaaaaagaaactatgtataaagtacattaaaaatgctaacaatgtaattttatcttcagttatactttgatacaggaaagtgtcaaaaaacatcagaaattcaaaaaaagaaactaggtataaagtacattaaaaatgct

SEQ ID NO: 280935 - DNA, 685 bp, Homo sapiens
ttttttgttgagacggattgcacgtgtcgcccagactggagtccatctaaaaaaaaaaaaaagtttggtttagggtaataataggtcaattacagaaaagaggaaaaattcacgagacatagcaaaaaagaaactacccaagacttgagagcaaataatctaattagtcccacatcacaacttgggttgtgaggagtttgttacctcaaatggcactggatttggcaccatgttttccccaaattgtattgcttggttttttccttttctggctgacgaaatgacaagcagggtcagtggtccaagttctctgtgggtttttttttttttttcatgttatttaattttttgagacggagtctcactctgtcgcccaggatggaatgcagtggggttaagcgattctcctgcctcagcctcccgaatagctgggactacagggcatgtgccaccatgcctggctatatttttttttttgtatttttaatagagacggggtttcgccatattggccaggctggtctcaaactcctgacctcaagtggtctgcctgccttgccctcccaaagtgctgggattacaggtgtgagccaccgtgcccagctgtttttatataagcatccagggaaaagtcagccagcacactcaggaagtcattgtcactcagggctttgtgagtcacccc

SEQ ID NO: 280936 - DNA, 344 bp, Homo sapiens
caatcatgggaaatatccagccaattctggttttaaagattcatatcaaattcaaagtccctccctccttttggcgaggaagacaaccctttggagcgaaacacaaaagagcaaatgtaaaatccatctggggcggggcatggtggctcacgcctgtaatcccagcactttgggaggccaaggcaggcagatcacgaggtcaagagatcgagaccatcctggccaacatggtgaaaccccgtctctactaaaaatacaaaaattagcttggcgtggtggcacatgcctgtaatcccagctactcgggaggctgaggactacagatgcacgccaccacactcagc

SEQ ID NO: 280937 - DNA, 2116 bp, Homo sapiens
ggtcaacgcctgcggctgttgatattcttgctcagaggccgtaactttggccttctgctcagggaagactctgagtccgacgttggcctacccagtcggaaggcagagctgcaatctagttaactacctcctttcccctagatttcctttcattctgctcaagtcttcgcctgtgtccgatccctatctactttctctcctcttgtaggcaagcctcagactccaggcttgagctaggttttgtttttctcctggtgagaattcgaagaccatgtctacggaactcttctcatccacaagagaggaaggaagctctggctcaggacccagttttaggtctaatcaaaggaaaatgttaaacctgctcctggagagagacacttcctttaccgtctgtccagatgtccctagaactccagtgggcaaatttcttggtgattctgcaaacctaagcattttgtctggaggaaccccaaaacgttgcctcgatctttcgaatcttagcagtggggagataactgccactcagcttaccacttctgcagaccttgatgaaactggtcacctggattcttcaggacttcaggaagtgcatttagctgggatgaatcatgaccagcacctaatgaaatgtagcccagcacagcttctttgtagcactccgaatggtttggaccgtggccatagaaagagagatgcaatgtgtagttcatctgcaaataaagaaaatgacaatggaaacttggtggacagtgaaatgaaatatttgggcagtcccattactactgttccaaaattggataaaaatccaaacctaggagaagaccaggcagaagagatttcagatgaattaatggagttttccctgaaagatcaagaagcaaaggtgagcagaagtggcctatatcgctccccgtcgatgccagagaacttgaacaggccaagactgaagcaggtggaaaaattcaaggacaacacaataccagataaagttaaaaaaaagtatttttctggccaaggaaagctcaggaagggcttatgtttaaagaagacagtctctctgtgtgacattactatcactcagatgctggaggaagattctaaccaggggcacctgattggtgatttttccaaggtatgtgcgctgccaaccgtgtcagggaaacaccaagatctgaagtatgtcaacccagaaacagtggctgccttactgtcggggaagttccagggtctgattgagaagttttatgtcattgattgtcgctatccatatgagtatctgggaggacacatccagggagccttaaacttatatagtcaggaagaactgtttaacttctttctgaagaagcccatcgtccctttggacacccagaagagaataatcatcgtgttccactgtgaattctcctcagagaggggcccccgaatgtgccgctgtctgcgtgaagaggacaggtctctgaaccagtatcctgcattgtactacccagagctatatatccttaaaggcggctacagagacttctttccagaatatatggaactgtgtgaaccacagagctactgccctatgcatcatcaggaccacaagactgagttgctgaggtgtcgaagccagagcaaagtgcaggaaggggagcggcagctgcgggagcagattgcccttctggtgaaggacatgagcccatgataacattccagccactggctgctaacaagtcaccaaaagacactgcagaaaccctgagcagaaagaggccttctggatggccaaacccaagattattaaaagatgtctctgcaaaccaacaggctaccaacttgtatccaggcctgggaatggattaggtttcagcagagctgaaagctggtggcagagtcctggagctggctctataaggcagccttgagttgcatagagatttgtattggttcagggaactctggcattccttttcccaactcctcatgtcttctcacaagccagccaactctttctctctgggcttcgggctatgcaagagcgttgtctaccttctttctttgtattttccttctttgtttccccctctttcttttttaaaaatggaaaaataaacactacagaatgaga

SEQ ID NO: 280938 - DNA, 710 bp, Homo sapiens
ctgccctccaccacctaccgcggttcctccagctcccagggccgcggccggagcagctctgagcgctcggttcgccccacggtgcccttaaaaggcgctggcgcgaaccaacgagtccctgaggagagtagggggacagctccggctcgcagaatccccccaagccacccatggagggcgcagctccgtgtcgtgtctctctcaaagtgtctctcggacagcgctgttgggaacgagcctggcgctttgatttagggatgggggtggtttcctcactaacgagtcaccccctccaaaatatcgcagaaagtggacggccccagttggaggcacatcttgaaacccgcgggggaggccatgtcggaagaaggtaaacaaaggcatcgcccctgccctccctccctccaacggcccaactgcagcctcccactcggttcgggccgcgtcacgcaattagccacagtgcccctcacctgctctgctgccccgccctccacgaccacctcttcgaaggaatcccccttcccccagcaaaggacccgtccgcggcgtgaaggctgctgggaagtgtggtccaagcgcggattagggcctgctcggagtcccaggagcccctcttgcagctgccggatcggcctgaaccttaaaaacccaggacttataatggttgcggggacgtttccacttggttctgtaatttgccctcaccc

SEQ ID NO: 280939 - DNA, 1992 bp, Homo sapiens
ggtcaacgcctgcggctgttgatattcttgctcagaggccgtaactttggccttctgctcagggaagactctgagtccgacgttggcctacccagtcggaaggcagagctgcaatctagttaactacctcctttcccctagatttcctttcattctgctcaagtcttcgcctgtgtccgatccctatctactttctctcctcttgtaggcaagcctcagactccaggcttgagctaggttttgtttttctcctggtgagaattcgaagaccatgtctacggaactcttctcatccacaagagaggaaggaagctctggctcaggacccagttttaggtctaatcaaaggaaaatgttaaacctgctcctggagagagacacttcctttaccgtctgtccagatgtccctagaactccagtgggcaaatttcttggtgattctgcaaacctaagcattttgtctggaggaaccccaaaacgttgcctcgatctttcgaatcttagcagtggggagataactgccactcagcttaccacttctgcagaccttgatgaaactggtcacctggattcttcaggacttcaggaagtgcatttagctgggatgacaatggaaacttggtggacagtgaaatgaaatatttgggcagtcccattactactgttccaaaattggataaaaatccaaacctaggagaagaccaggcagaagagatttcagatgaattaatggagttttccctgaaagatcaagaagcaaaggtgagcagaagtggcctatatcgctccccgtcgatgccagagaacttgaacaggccaagactgaagcaggtggaaaaattcaaggacaacacaataccagataaagttaaaaaaaagtatttttctggccaaggaaagctcaggaagggcttatgtttaaagaagacagtctctctgtgtgacattactatcactcagatgctggaggaagattctaaccaggggcacctgattggtgatttttccaaggtatgtgcgctgccaaccgtgtcagggaaacaccaagatctgaagtatgtcaacccagaaacagtggctgccttactgtcggggaagttccagggtctgattgagaagttttatgtcattgattgtcgctatccatatgagtatctgggaggacacatccagggagccttaaacttatatagtcaggaagaactgtttaacttctttctgaagaagcccatcgtccctttggacacccagaagagaataatcatcgtgttccactgtgaattctcctcagagaggggcccccgaatgtgccgctgtctgcgtgaagaggacaggtctctgaaccagtatcctgcattgtactacccagagctatatatccttaaaggcggctacagagacttctttccagaatatatggaactgtgtgaaccacagagctactgccctatgcatcatcaggaccacaagactgagttgctgaggtgtcgaagccagagcaaagtgcaggaaggggagcggcagctgcgggagcagattgcccttctggtgaaggacatgagcccatgataacattccagccactggctgctaacaagtcaccaaaagacactgcagaaaccctgagcagaaagaggccttctggatggccaaacccaagattattaaaagatgtctctgcaaaccaacaggctaccaacttgtatccaggcctgggaatggattaggtttcagcagagctgaaagctggtggcagagtcctggagctggctctataaggcagccttgagttgcatagagatttgtattggttcagggaactctggcattccttttcccaactcctcatgtcttctcacaagccagccaactctttctctctgggcttcgggctatgcaagagcgttgtctaccttctttctttgtattttccttctttgtttccccctctttcttttttaaaaatggaaaaataaacactacagaatgaga

SEQ ID NO: 280940 - DNA, 1987 bp, Homo sapiens
ggtcaacgcctgcggctgttgatattcttgctcagaggccgtaactttggccttctgctcagggaagactctgagtccgacgttggcctacccagtcggaaggcagagctgcaatctagttaactacctcctttcccctagatttcctttcattctgctcaagtcttcgcctgtgtccgatccctatctactttctctcctcttgtaggcaagcctcagactccaggcttgagctaggttttgtttttctcctggtgagaattcgaagaccatgtctacggaactcttctcatccacaagagaggaaggaagctctggctcaggacccagttttaggtctaatcaaaggaaaatgttaaacctgctcctggagagagacacttcctttaccgtctgtccagatgtccctagaactccagtgggcaaatttcttggtgattctgcaaacctaagcattttgtctgggtcacctggattcttcaggacttcaggaagtgcatttagctgggatgcacagcttctttgtagcactccgaatggtttggaccgtggccatagaaagagagatgcaatgtgtagttcatctgcaaataaagaaaatgacaatggaaacttggtggacagtgaaatgaaatatttgggcagtcccattactactgttccaaaattggataaaaatccaaacctaggagaagaccaggcagaagagatttcagatgaattaatggagttttccctgaaagatcaagaagcaaaggtgagcagaagtggcctatatcgctccccgtcgatgccagagaacttgaacaggccaagactgaagcaggtggaaaaattcaaggacaacacaataccagataaagttaaaaaaaagtatttttctggccaaggaaagctcaggaagggcttatgtttaaagaagacagtctctctgtgtgacattactatcactcagatgctggaggaagattctaaccaggggcacctgattggtgatttttccaaggtatgtgcgctgccaaccgtgtcagggaaacaccaagatctgaagtatgtcaacccagaaacagtggctgccttactgtcggggaagttccagggtctgattgagaagttttatgtcattgattgtcgctatccatatgagtatctgggaggacacatccagggagccttaaacttatatagtcaggaagaactgtttaacttctttctgaagaagcccatcgtccctttggacacccagaagagaataatcatcgtgttccactgtgaattctcctcagagaggggcccccgaatgtgccgctgtctgcgtgaagaggacaggtctctgaaccagtatcctgcattgtactacccagagctatatatccttaaaggcggctacagagacttctttccagaatatatggaactgtgtgaaccacagagctactgccctatgcatcatcaggaccacaagactgagttgctgaggtgtcgaagccagagcaaagtgcaggaaggggagcggcagctgcgggagcagattgcccttctggtgaaggacatgagcccatgataacattccagccactggctgctaacaagtcaccaaaagacactgcagaaaccctgagcagaaagaggccttctggatggccaaacccaagattattaaaagatgtctctgcaaaccaacaggctaccaacttgtatccaggcctgggaatggattaggtttcagcagagctgaaagctggtggcagagtcctggagctggctctataaggcagccttgagttgcatagagatttgtattggttcagggaactctggcattccttttcccaactcctcatgtcttctcacaagccagccaactctttctctctgggcttcgggctatgcaagagcgttgtctaccttctttctttgtattttccttctttgtttccccctctttcttttttaaaaatggaaaaataaacactacagaatgaga

SEQ ID NO: 280941 - DNA, 2014 bp, Homo sapiens
ggtcaacgcctgcggctgttgatattcttgctcagaggccgtaactttggccttctgctcagggaagactctgagtccgacgttggcctacccagtcggaaggcagagctgcaatctagttaactacctcctttcccctagatttcctttcattctgctcaagtcttcgcctgtgtccgatccctatctactttctctcctcttgtaggcaagcctcagactccaggcttgagctaggttttgtttttctcctggtgagaattcgaagaccatgtctacggaactcttctcatccacaagagaggaaggaagctctggctcaggacccagttttaggtctaatcaaaggaaaatgttaaacctgctcctggagagagacacttcctttaccgtctgtccagatgtccctagaactccagtgggcaaatttcttggtgattctgcaaacctaagcattttgtctggaggaaccccaaaacgttgcctcgatctttcgaatcttagcagtggggagataactgccactcagcttaccacttctgcagaccttgatgaaactggtcacctggattcttcaggacttcaggaagtgcatttagctgggatgaatcatgaccagcacctaatgaaatgtagcccagcacagcttctttgtagcactccgaatggtttggaccgtggccatagaaagagagatgcaatgtgtagttcatctgcaaataaagaaaatgacaatggaaacttggtggacagtgaaatgaaatatttgggcagtcccattactactgttccaaaattggataaaaatccaaacctaggagaagaccaggcagaagagatttcagatgaattaatggagttttccctgaaagatcaagaagcaaaggtgagcagaagtggcctatatcgctccccgtcgatgccagagaacttgaacaggccaagactgaagcaggtggaaaaattcaaggacaacacaataccagataaagttaaaaaaaagtatttttctggccaaggaaagctcaggaaggtatgtgcgctgccaaccgtgtcagggaaacaccaagatctgaagtatgtcaacccagaaacagtggctgccttactgtcggggaagttccagggtctgattgagaagttttatgtcattgattgtcgctatccatatgagtatctgggaggacacatccagggagccttaaacttatatagtcaggaagaactgtttaacttctttctgaagaagcccatcgtccctttggacacccagaagagaataatcatcgtgttccactgtgaattctcctcagagaggggcccccgaatgtgccgctgtctgcgtgaagaggacaggtctctgaaccagtatcctgcattgtactacccagagctatatatccttaaaggcggctacagagacttctttccagaatatatggaactgtgtgaaccacagagctactgccctatgcatcatcaggaccacaagactgagttgctgaggtgtcgaagccagagcaaagtgcaggaaggggagcggcagctgcgggagcagattgcccttctggtgaaggacatgagcccatgataacattccagccactggctgctaacaagtcaccaaaagacactgcagaaaccctgagcagaaagaggccttctggatggccaaacccaagattattaaaagatgtctctgcaaaccaacaggctaccaacttgtatccaggcctgggaatggattaggtttcagcagagctgaaagctggtggcagagtcctggagctggctctataaggcagccttgagttgcatagagatttgtattggttcagggaactctggcattccttttcccaactcctcatgtcttctcacaagccagccaactctttctctctgggcttcgggctatgcaagagcgttgtctaccttctttctttgtattttccttctttgtttccccctctttcttttttaaaaatggaaaaataaacactacagaatgaga

SEQ ID NO: 280942 - DNA, 1164 bp, Homo sapiens
ggaccgttaatgatctgtgggcatacaataccagataaagttaaaaaaaagtatttttctggccaaggaaagctcaggaagggcttatgtttaaagaagacagtctctctgtgtgacattactatcactcagatgctggaggaagattctaaccaggggcacctgattggtgatttttccaaggtatgtgcgctgccaaccgtgtcagggaaacaccaagatctgaagtatgtcaacccagaaacagtggctgccttactgtcggggaagttccagggtctgattgagaagttttatgtcattgattgtcgctatccatatgagtatctgggaggacacatccagggagccttaaacttatatagtcaggaagaactgtttaacttctttctgaagaagcccatcgtccctttggacacccagaagagaataatcatcgtgttccactgtgaattctcctcagagaggggcccccgaatgtgccgctgtctgcgtgaagaggacaggtctctgaaccagtatcctgcattgtactacccagagctatatatccttaaaggcggctacagagacttctttccagaatatatggaactgtgtgaaccacagagctactgccctatgcatcatcaggaccacaagactgagttgctgaggtgtcgaagccagagcaaagtgcaggaaggggagcggcagctgcgggagcagattgcccttctggtgaaggacatgagcccatgataacattccagccactggctgctaacaagtcaccaaaagacactgcagaaaccctgagcagaaagaggccttctggatggccaaacccaagattattaaaagatgtctctgcaaaccaacaggctaccaacttgtatccaggcctgggaatggattaggtttcagcagagctgaaagctggtggcagagtcctggagctggctctataaggcagccttgagttgcatagagatttgtattggttcagggaactctggcattccttttcccaactcctcatgtcttctcacaagccagccaactctttctctctgggcttcgggctatgcaagagcgttgtctaccttctttctttgtattttccttctttgtttccccctctttcttttttaaaaatggaaaaataaacactacagaatgaga

SEQ ID NO: 280943 - DNA, 316 bp, Homo sapiens
aggacggggaaccggtatacgtgaatggggaggtggaggcacagaagcctagggcagaccaagctgaaagctggtggcagagtcctggagctggctctataaggcagccttgagttgcatagagatttgtattggttcagggaactctggcattccttttcccaactcctcatgtcttctcacaagccagccaactctttctctctgggcttcgggctatgcaagagcgttgtctaccttctttctttgtattttccttctttgtttccccctctttcttttttaaaaatggaaaaataaacactacagaatgaga

SEQ ID NO: 280944 - DNA, 384 bp, Homo sapiens
ccagccactggctgctaacaagtcaccaaaagacactgcagaaaccctgagcagaaagaggccttctggatggccaaacccaagattattaaaagatgtctctgcaaaccaacaggctaccaacttgtatccaggcctgggaatggattaggtttcagcagagctgaaagctggtggcagagtcctggagctggctctataaggcagccttgagttgcatagagatttgtattggttcagggaactctggcattccttttcccaactcctcatgtcttctcacaagccagccaactctttctctctgggcttcgggctatgcaagagcgttgtctaccttctttctttgtattttccttctttgtttccccctctttctttttt

SEQ ID NO: 280945 - DNA, 312 bp, Homo sapiens
gtctagagaatcccttactctgttccttacctttcaggagaactgtgtgaaccacagagctactgccctatgcatcatcaggaccacaagactgagttgctgaggtgtcgaagccagagcaaagtgcaggaaggggagcggcagctgcgggagcagattgcccttctggtgaaggacatgagcccatgataacattccagccactggctgctaacaagtcaccaaaagacactgcagaaaccctgagcagaaagaggccttctggatggccaaacccaagattattaaaagatgtctctgcaaaccaacagg

SEQ ID NO: 280946 - DNA, 576 bp, Homo sapiens
  misc_feature (570)..(571): n is a, c, g, or t
  misc_feature (573)..(573): n is a, c, g, or t
  misc_feature (575)..(575): n is a, c, g, or t
tgttttatatgaaatattccaaaaggaatgtttcataagttaaccttccagaattctaatttcagattttctgagtgataacctttcttttctacccataagaaaaaaaaaaacttcataggtagcatagtgtagtgtttcccaacacttgatttcttttagtgacacatataaattcttacgtttctgtgaaattgtaccttgtaccatgaaatgggtaccaatcgagaggctttgtattcaaaagctcagtccttgaaattaatacggcttactggtaatgaagaaaatctgaaggaaaaacaggatgcatggacaagaataactccttttactgattctttatatttgattgcaggtcacctggattcttcaggacttcaggaagtgcatttagctgggatgaatcatgaccagcacctaatgaaatgtagcccagtgagtagcctctctttttttgggttttgttttgcttttcaggtgggaggcagagggtttccattgcacctgtggcttgaggatgctggacgttctcagcaaataaagaaaatgtgagtgtttaatggaaannanana

SEQ ID NO: 280947 - DNA, 1897 bp, Homo sapiens
ggtcaacgcctgcggctgttgatattcttgctcagaggccgtaactttggccttctgctcagggaagactctgagtccgacgttggcctacccagtcggaaggcagagctgcaatctagttaactacctcctttcccctagatttcctttcattctgctcaagtcttcgcctgtgtccgatccctatctactttctctcctcttgtaggcaagcctcagactccaggcttgagctaggttttgtttttctcctggtgagaattcgaagaccatgtctacggaactcttctcatccacaagagaggaaggaagctctggctcaggacccagttttaggtctaatcaaaggaaaatgttaaacctgctcctggagagagacacttcctttaccgtctgtccagatgtccctagaactccagtgggcaaatttcttggtgattctgcaaacctaagcattttgtctgggtcacctggattcttcaggacttcaggaagtgcatttagctgggatgacaatggaaacttggtggacagtgaaatgaaatatttgggcagtcccattactactgttccaaaattggataaaaatccaaacctaggagaagaccaggcagaagagatttcagatgaattaatggagttttccctgaaagatcaagaagcaaaggtgagcagaagtggcctatatcgctccccgtcgatgccagagaacttgaacaggccaagactgaagcaggtggaaaaattcaaggacaacacaataccagataaagttaaaaaaaagtatttttctggccaaggaaagctcaggaagggcttatgtttaaagaagacagtctctctgtgtgacattactatcactcagatgctggaggaagattctaaccaggggcacctgattggtgatttttccaaggtatgtgcgctgccaaccgtgtcagggaaacaccaagatctgaagtatgtcaacccagaaacagtggctgccttactgtcggggaagttccagggtctgattgagaagttttatgtcattgattgtcgctatccatatgagtatctgggaggacacatccagggagccttaaacttatatagtcaggaagaactgtttaacttctttctgaagaagcccatcgtccctttggacacccagaagagaataatcatcgtgttccactgtgaattctcctcagagaggggcccccgaatgtgccgctgtctgcgtgaagaggacaggtctctgaaccagtatcctgcattgtactacccagagctatatatccttaaaggcggctacagagacttctttccagaatatatggaactgtgtgaaccacagagctactgccctatgcatcatcaggaccacaagactgagttgctgaggtgtcgaagccagagcaaagtgcaggaaggggagcggcagctgcgggagcagattgcccttctggtgaaggacatgagcccatgataacattccagccactggctgctaacaagtcaccaaaagacactgcagaaaccctgagcagaaagaggccttctggatggccaaacccaagattattaaaagatgtctctgcaaaccaacaggctaccaacttgtatccaggcctgggaatggattaggtttcagcagagctgaaagctggtggcagagtcctggagctggctctataaggcagccttgagttgcatagagatttgtattggttcagggaactctggcattccttttcccaactcctcatgtcttctcacaagccagccaactctttctctctgggcttcgggctatgcaagagcgttgtctaccttctttctttgtattttccttctttgtttccccctctttcttttttaaaaatggaaaaataaacactacagaatgaga

SEQ ID NO: 280948 - DNA, 2026 bp, Homo sapiens
ggtcaacgcctgcggctgttgatattcttgctcagaggccgtaactttggccttctgctcagggaagactctgagtccgacgttggcctacccagtcggaaggcagagctgcaatctagttaactacctcctttcccctagatttcctttcattctgctcaagtcttcgcctgtgtccgatccctatctactttctctcctcttgtaggcaagcctcagactccaggcttgagctaggttttgtttttctcctggtgagaattcgaagaccatgtctacggaactcttctcatccacaagagaggaaggaagctctggctcaggacccagttttaggtctaatcaaaggaaaatgttaaacctgctcctggagagagacacttcctttaccgtctgtccagatgtccctagaactccagtgggcaaatttcttggtgattctgcaaacctaagcattttgtctggaggaaccccaaaacgttgcctcgatctttcgaatcttagcagtggggagataactgccactcagcttaccacttctgcagaccttgatgaaactggtcacctggattcttcaggacttcaggaagtgcatttagctgggatgaatcatgaccagcacctaatgaaatgtagcccagacaatggaaacttggtggacagtgaaatgaaatatttgggcagtcccattactactgttccaaaattggataaaaatccaaacctaggagaagaccaggcagaagagatttcagatgaattaatggagttttccctgaaagatcaagaagcaaaggtgagcagaagtggcctatatcgctccccgtcgatgccagagaacttgaacaggccaagactgaagcaggtggaaaaattcaaggacaacacaataccagataaagttaaaaaaaagtatttttctggccaaggaaagctcaggaagggcttatgtttaaagaagacagtctctctgtgtgacattactatcactcagatgctggaggaagattctaaccaggggcacctgattggtgatttttccaaggtatgtgcgctgccaaccgtgtcagggaaacaccaagatctgaagtatgtcaacccagaaacagtggctgccttactgtcggggaagttccagggtctgattgagaagttttatgtcattgattgtcgctatccatatgagtatctgggaggacacatccagggagccttaaacttatatagtcaggaagaactgtttaacttctttctgaagaagcccatcgtccctttggacacccagaagagaataatcatcgtgttccactgtgaattctcctcagagaggggcccccgaatgtgccgctgtctgcgtgaagaggacaggtctctgaaccagtatcctgcattgtactacccagagctatatatccttaaaggcggctacagagacttctttccagaatatatggaactgtgtgaaccacagagctactgccctatgcatcatcaggaccacaagactgagttgctgaggtgtcgaagccagagcaaagtgcaggaaggggagcggcagctgcgggagcagattgcccttctggtgaaggacatgagcccatgataacattccagccactggctgctaacaagtcaccaaaagacactgcagaaaccctgagcagaaagaggccttctggatggccaaacccaagattattaaaagatgtctctgcaaaccaacaggctaccaacttgtatccaggcctgggaatggattaggtttcagcagagctgaaagctggtggcagagtcctggagctggctctataaggcagccttgagttgcatagagatttgtattggttcagggaactctggcattccttttcccaactcctcatgtcttctcacaagccagccaactctttctctctgggcttcgggctatgcaagagcgttgtctaccttctttctttgtattttccttctttgtttccccctctttcttttttaaaaatggaaaaataaacactacagaatgaga

SEQ ID NO: 280949 - DNA, 2253 bp, Homo sapiens
ctgccctccaccacctaccgcggttcctccagctcccagggccgcggccggagcagctctgagcgctcggttcgccccacggtgcccttaaaaggcgctggcgcgaaccaacgagtccctgaggagagtagggggacagctccggctcgcagaatccccccaagccacccatggagggcgcagctccgtgtcgtgtctctctcaaagtgtctctcggacagcgctgttgggaacgagcctggcgctttgatttagggatgggggtggtttcctcactaacgagtcaccccctccaaaatatcgcagaaagtggacggccccagttggaggcacatcttgaaacccgcgggggaggccatgtcggaagaagctaggttttgtttttctcctggtgagaattcgaagaccatgtctacggaactcttctcatccacaagagaggaaggaagctctggctcaggacccagttttaggtctaatcaaaggaaaatgttaaacctgctcctggagagagacacttcctttaccgtctgtccagatgtccctagaactccagtgggcaaatttcttggtgattctgcaaacctaagcattttgtctggaggaaccccaaaacgttgcctcgatctttcgaatcttagcagtggggagataactgccactcagcttaccacttctgcagaccttgatgaaactggtcacctggattcttcaggacttcaggaagtgcatttagctgggatgaatcatgaccagcacctaatgaaatgtagcccagcacagcttctttgtagcactccgaatggtttggaccgtggccatagaaagagagatgcaatgtgtagttcatctgcaaataaagaaaatgacaatggaaacttggtggacagtgaaatgaaatatttgggcagtcccattactactgttccaaaattggataaaaatccaaacctaggagaagaccaggcagaagagatttcagatgaattaatggagttttccctgaaagatcaagaagcaaaggtgagcagaagtggcctatatcgctccccgtcgatgccagagaacttgaacaggccaagactgaagcaggtggaaaaattcaaggacaacacaataccagataaagttaaaaaaaagtatttttctggccaaggaaagctcaggaagggcttatgtttaaagaagacagtctctctgtgtgacattactatcactcagatgctggaggaagattctaaccaggggcacctgattggtgatttttccaaggtatgtgcgctgccaaccgtgtcagggaaacaccaagatctgaagtatgtcaacccagaaacagtggctgccttactgtcggggaagttccagggtctgattgagaagttttatgtcattgattgtcgctatccatatgagtatctgggaggacacatccagggagccttaaacttatatagtcaggaagaactgtttaacttctttctgaagaagcccatcgtccctttggacacccagaagagaataatcatcgtgttccactgtgaattctcctcagagaggggcccccgaatgtgccgctgtctgcgtgaagaggacaggtctctgaaccagtatcctgcattgtactacccagagctatatatccttaaaggcggctacagagacttctttccagaatatatggaactgtgtgaaccacagagctactgccctatgcatcatcaggaccacaagactgagttgctgaggtgtcgaagccagagcaaagtgcaggaaggggagcggcagctgcgggagcagattgcccttctggtgaaggacatgagcccatgataacattccagccactggctgctaacaagtcaccaaaagacactgcagaaaccctgagcagaaagaggccttctggatggccaaacccaagattattaaaagatgtctctgcaaaccaacaggctaccaacttgtatccaggcctgggaatggattaggtttcagcagagctgaaagctggtggcagagtcctggagctggctctataaggcagccttgagttgcatagagatttgtattggttcagggaactctggcattccttttcccaactcctcatgtcttctcacaagccagccaactctttctctctgggcttcgggctatgcaagagcgttgtctaccttctttctttgtattttccttctttgtttccccctctttcttttttaaaaatggaaaaataaacactacagaatgaga

SEQ ID NO: 280950 - DNA, 2017 bp, Homo sapiens
tgttttatatgaaatattccaaaaggaatgtttcataagttaaccttccagaattctaatttcagattttctgagtgataacctttcttttctacccataagaaaaaaaaaaacttcataggtagcatagtgtagtgtttcccaacacttgatttcttttagtgacacatataaattcttacgtttctgtgaaattgtaccttgtaccatgaaatgggtaccaatcgagaggctttgtattcaaaagctcagtccttgaaattaatacggcttactggtaatgaagaaaatctgaaggaaaaacaggatgcatggacaagaataactccttttactgattctttatatttgattgcaggtcacctggattcttcaggacttcaggaagtgcatttagctgggatgaatcatgaccagcacctaatgaaatgtagcccagtgagtagcctctctttttttgggttttgttttgcttttcaggtgggaggcagagggtttccattgcacctgtggcttgaggatgctggacgttctcagcaaagcacagcttctttgtagcactccgaatggtttggaccgtggccatagaaagagagatgcaatgtgtagttcatctgcaaataaagaaaatgacaatggaaacttggtggacagtgaaatgaaatatttgggcagtcccattactactgttccaaaattggataaaaatccaaacctaggagaagaccaggcagaagagatttcagatgaattaatggagttttccctgaaagatcaagaagcaaaggtgagcagaagtggcctatatcgctccccgtcgatgccagagaacttgaacaggccaagactgaagcaggtggaaaaattcaaggacaacacaataccagataaagttaaaaaaaagtatttttctggccaaggaaagctcaggaagggcttatgtttaaagaagacagtctctctgtgtgacattactatcactcagatgctggaggaagattctaaccaggggcacctgattggtgatttttccaaggtatgtgcgctgccaaccgtgtcagggaaacaccaagatctgaagtatgtcaacccagaaacagtggctgccttactgtcggggaagttccagggtctgattgagaagttttatgtcattgattgtcgctatccatatgagtatctgggaggacacatccagggagccttaaacttatatagtcaggaagaactgtttaacttctttctgaagaagcccatcgtccctttggacacccagaagagaataatcatcgtgttccactgtgaattctcctcagagaggggcccccgaatgtgccgctgtctgcgtgaagaggacaggtctctgaaccagtatcctgcattgtactacccagagctatatatccttaaaggcggctacagagacttctttccagaatatatggaactgtgtgaaccacagagctactgccctatgcatcatcaggaccacaagactgagttgctgaggtgtcgaagccagagcaaagtgcaggaaggggagcggcagctgcgggagcagattgcccttctggtgaaggacatgagcccatgataacattccagccactggctgctaacaagtcaccaaaagacactgcagaaaccctgagcagaaagaggccttctggatggccaaacccaagattattaaaagatgtctctgcaaaccaacaggctaccaacttgtatccaggcctgggaatggattaggtttcagcagagctgaaagctggtggcagagtcctggagctggctctataaggcagccttgagttgcatagagatttgtattggttcagggaactctggcattccttttcccaactcctcatgtcttctcacaagccagccaactctttctctctgggcttcgggctatgcaagagcgttgtctaccttctttctttgtattttccttctttgtttccccctctttcttttttaaaaatggaaaaataaacactacagaatgaga

SEQ ID NO: 280951 - DNA, 2280 bp, Homo sapiens
ggtcaacgcctgcggctgttgatattcttgctcagaggccgtaactttggccttctgctcagggaagactctgagtccgacgttggcctacccagtcggaaggcagagctgcaatctagttaactacctcctttcccctagatttcctttcattctgctcaagtcttcgcctgtgtccgatccctatctactttctctcctcttgtaggcaagcctcagactccaggcttgagctaggttttgtttttctcctggtgagaattcgaagaccatgtctacggaactcttctcatccacaagagaggaaggaagctctggctcaggacccagttttaggtctaatcaaaggaaaatgttaaacctgctcctggagagagacacttcctttaccgtctgtccagatgtccctagaactccagtgggcaaatttcttggtgattctgcaaacctaagcattttgtctggaggaaccccaaaacgttgcctcgatctttcgaatcttagcagtggggagataactgccactcagcttaccacttctgcagaccttgatgaaactggtcacctggattcttcaggacttcaggaagtgcatttagctgggatgaatcatgaccagcacctaatgaaatgtagcccagcacagcttctttgtagcactccgaatggtttggaccgtggccatagaaagagagatgcaatgtgtagttcatctgcaaataaagaaaatgacaatggaaacttggtggacagtgaaatgaaatatttgggcagtcccattactactgttccaaaattggataaaaatccaaacctaggagaagaccaggcagaagagatttcagatgaattaatggagttttccctgaaagatcaagaagcaaaggtgagcagaagtggcctatatcgctccccgtcgatgccagagaacttgaacaggccaagactgaagcaggtggaaaaattcaaggacaacacaataccagataaagttaaaaaaaagtatttttctggccaaggaaagctcaggaagggcttatgtttaaagaagacagtctctctgtgtgacattactatcactcagatgctggaggaagattctaaccaggggcacctgattggtgatttttccaaggtatgtgcgctgccaaccgtgtcagggaaacaccaagatctgaagtatgtcaacccagaaacagtaagcagatttctggagatggtggctgccttactgtcggggaagttccagggtctgattgagaagttttatgtcattgattgtcgctatccatatgagtatctgggaggacacatccagggagccttaaacttatatagtcaggaagaactgtttaacttctttctgaagaagcccatcgtccctttggacacccagaagagaataatcatcgtgttccactgtgaattctcctcagagaggggcccccgaatgtgccgctgtctgcgtgaagaggacaggtctctgaaccagtatcctgcattgtactacccagagctatatatccttaaaggcggctacagagacttctttccagaatatatggtaaagggtggggcatgcggggagccaaactttaacaactcaactcccagggcctgcaaagccttcagagaagaaactgctgctcctccttagccactgccagcagcagcatctctattatccttcataggtagagttcaggagaactgtgtgaaccacagagctactgccctatgcatcatcaggaccacaagactgagttgctgaggtgtcgaagccagagcaaagtgcaggaaggggagcggcagctgcgggagcagattgcccttctggtgaaggacatgagcccatgataacattccagccactggctgctaacaagtcaccaaaagacactgcagaaaccctgagcagaaagaggccttctggatggccaaacccaagattattaaaagatgtctctgcaaaccaacaggctaccaacttgtatccaggcctgggaatggattaggtttcagcagagctgaaagctggtggcagagtcctggagctggctctataaggcagccttgagttgcatagagatttgtattggttcagggaactctggcattccttttcccaactcctcatgtcttctcacaagccagccaactctttctctctgggcttcgggctatgcaagagcgttgtctaccttctttctttgtattttccttctttgtttccccctctttcttttttaaaaatggaaaaataaacactacagaatgaga

SEQ ID NO: 280952 - DNA, 2367 bp, Homo sapiens
ggaggtcacaagctctggtgccccaaaatggctctggtcctcagatatagttggttgccaccctgggagtgagaggaaccaggaaagcagcacccaggaaggcagggggctccctttatccaaggaggtggctgtgcaggtggccaccacaggtggcaggaaccacaggctggggcactccggagtcaggagtgagtgggcaggttgactggcatcaggcagcctctcagccagggccctctccgcatcagcatgaactccaggaccgcatctgctaggggctggttcagcagccgcccacccacctctgagtctgacctggaacctgccacagatgggccagcctccgagaccactaccctcagcccagaggccaccacctttaatgacaccagaatccctgatgcagctggtggcacggccggcgtgggtaccatgcttctgtcctttgggatcatcacggtgataggcctggctgtggccttggttttgtacatcaggaagaagaagaggctggagaagctacgccaccagctcatgcccatgtacaacttcgaccccacggaggaacaagatgagttggagcaggagctgctggagcatgggcgggacgccgcctctgtacaggctgctacttctgtgcaggccatgcagggcaagactactctgccctcccagggcccactgcagagacccagccggctggtgtttaccgatgtggccaatgccatccatgtgtgagtggcctgggacaagcctggacttctgatagagacccatcacggtgcctacagagctccccactccctgattgtcaagacctactctgaagatcttccctgccaagacacaagagggctgagccaggtcctagctgttctccagacccacctgctgactttagactctaagagagggccctagccaggctggacttctgaccactgacttctcctgacctgagggccctggcacagagggcatccctcatgctgagaaggtcaagagcctctgctggcttcctcatcccctgtccagatccctcacatcagggtctgccccgctaatgtggaggaaatgagggagatacggagtgggagggattgggggaggaaaggggaggtttccctctgttagggagagacctgttttttggaatctggagcctcctctggggtggggagaggaaaccacccaagttatagggacagggtagggcagcatctgttatgggccctgagaagcccagagatggagctgaaactgtccagtatgcaaggatgccaggagaagggcaattcacacccagggtccatccatactacggagggtccaggaggtctcccagccacccatccttggcaaccagatgttactggggccaagctaggatgggagctgagggggaaggaagtaggggaatggaagtggaaggatgcagcccccccagacctgccgagaggcctcatgcatgtgcatgagtgtgcccatgggcagacatgtgcctgtcccagcacagcgggcagaatgagattgtccacactggccccaccctccaagtcgacctctaccccatggtatgtagtggagcatcagggtaggctatcttctctgccttcaatcttcagggactgcagggaagagggaagcacgcacagcacggttcctctctccactgcattgtttcactgggctcacctgcttctgaaaacggctccctgtcttgggctctaatgaggatctggggttgggagaggctgttggtctgagggcagtaatcacaggctgcaggctagagggggcagttatgactgcctgaaagtgggtgagggattgcacttcagaaaaacatctaaaaaacttagtctatgtttgaattccccacctccatcccatctatgggaagagccgttcagtgtttagagagtggggagatgggtccctgcacttggcctctccataagccttggagggtcagggctgataccaggggtcctggcaagccattgggcagagacagaccacaagagcagggcatttttttacgctgggcatacatatgcacacaagcatgcacagaggcatgtcccgtgcccagcctctccaccgtcactgtccgctgctggctggaggggatgcaggggtagtgtatgcagaccttccactgggcaaatgccatgtgtcaggagggaaaggcctaggaagcccccatggggaaggttctggatttattccctcctctaaatgctataaatacgttagcacttgagtcgactggaggctgccaggaattcaggatgcatacagctgtaatttaacccagagcagctccacgtgagagcattaaagatgtaatgaagatgttta

SEQ ID NO: 280953 - DNA, 2592 bp, Homo sapiens
gggggcgcggagcgtgcagggaggcaaggcgctgtagcttcggggatcccccgaggctgctcggcccggccccacctccgccgtgggtcccggccctacccaccctagctcaggccggcagagccagcgctcgcggatgcggctggtgcgcagtagcgggcctggccagcggctcggggcttgcagggagggcggatctcgggtcggacccgcagccccagacgccgggcttgggggttccccccgccccggcctcctgccagtcactaccacccctagcctctccaactgagctcggcgccgggagaggattaacacccaggaaggcagggggctccctttatccaaggaggtggctgtgcaggtggccaccacaggtggcaggaaccacaggctggggcactccggagtcaggagtgagtgggcaggttgactggcatcaggcagcctctcagccagggccctctccgcatcagcatgaactccaggaccgcatctgctaggggctggttcagcagccgcccacccacctctgagtctgacctggaacctgccacagatgggccagcctccgagaccactaccctcagcccagaggccaccacctttaatgacaccagaatccctgatgcagctggtggcacggccggcgtgggtaccatgcttctgtcctttgggatcatcacggtgataggcctggctgtggccttggttttgtacatcaggaagaagaagaggctggagaagctacgccaccagctcatgcccatgtacaacttcgaccccacggaggaacaagatgagttggagcaggagctgctggagcatgggcgggacgccgcctctgtacaggctgctacttctgtgcaggccatgcagggcaagactactctgccctcccagggcccactgcagagacccagccggctggtgtttaccgatgtggccaatgccatccatgtgtgagtggcctgggacaagcctggacttctgatagagacccatcacggtgcctacagagctccccactccctgattgtcaagacctactctgaagatcttccctgccaagacacaagagggctgagccaggtcctagctgttctccagacccacctgctgactttagactctaagagagggccctagccaggctggacttctgaccactgacttctcctgacctgagggccctggcacagagggcatccctcatgctgagaaggtcaagagcctctgctggcttcctcatcccctgtccagatccctcacatcagggtctgccccgctaatgtggaggaaatgagggagatacggagtgggagggattgggggaggaaaggggaggtttccctctgttagggagagacctgttttttggaatctggagcctcctctggggtggggagaggaaaccacccaagttatagggacagggtagggcagcatctgttatgggccctgagaagcccagagatggagctgaaactgtccagtatgcaaggatgccaggagaagggcaattcacacccagggtccatccatactacggagggtccaggaggtctcccagccacccatccttggcaaccagatgttactggggccaagctaggatgggagctgagggggaaggaagtaggggaatggaagtggaaggatgcagcccccccagacctgccgagaggcctcatgcatgtgcatgagtgtgcccatgggcagacatgtgcctgtcccagcacagcgggcagaatgagattgtccacactggccccaccctccaagtcgacctctaccccatggtatgtagtggagcatcagggtaggctatcttctctgccttcaatcttcagggactgcagggaagagggaagcacgcacagcacggttcctctctccactgcattgtttcactgggctcacctgcttctgaaaacggctccctgtcttgggctctaatgaggatctggggttgggagaggctgttggtctgagggcagtaatcacaggctgcaggctagagggggcagttatgactgcctgaaagtgggtgagggattgcacttcagaaaaacatctaaaaaacttagtctatgtttgaattccccacctccatcccatctatgggaagagccgttcagtgtttagagagtggggagatgggtccctgcacttggcctctccataagccttggagggtcagggctgataccaggggtcctggcaagccattgggcagagacagaccacaagagcagggcatttttttacgctgggcatacatatgcacacaagcatgcacagaggcatgtcccgtgcccagcctctccaccgtcactgtccgctgctggctggaggggatgcaggggtagtgtatgcagaccttccactgggcaaatgccatgtgtcaggagggaaaggcctaggaagcccccatggggaaggttctggatttattccctcctctaaatgctataaatacgttagcacttgagtcgactggaggctgccaggaattcaggatgcatacagctgtaatttaacccagagcagctccacgtgagagcattaaagatgtaatgaagatgttta

SEQ ID NO: 280954 - DNA, 2321 bp, Homo sapiens
gggggcgcggagcgtgcagggaggcaaggcgctgtagcttcggggatcccccgaggctgctcggcccggccccacctccgccgtgggtcccggccctacccaccctagctcaggccggcagagccagcgctcgcggatgcggctggtgcgcagtagcgggcctggccagcggctcggggcttgcagggagggcggatctcgggtcggacccgcagccccagacgccgggcttgggggttccccccgccccggcctcctgccagtcactaccacccctagcctctccaactgagctcggcgccgggagaggattaagttttgtacatcaggaagaagaagagggaaaccttaaggccctaagcatggttgtgtgctgtggctcagctagtcaggaggcagggcctggagggctgctgggaggggaagggcctgccctgtccccagcagcctttgcccccatccccaggctggagaagctacgccaccagctcatgcccatgtacaacttcgaccccacggaggaacaagatgagttggagcaggagctgctggagcatgggcgggacgccgcctctgtacaggctgctacttctgtgcaggccatgcagggcaagactactctgccctcccagggcccactgcagagacccagccggctggtgtttaccgatgtggccaatgccatccatgtgtgagtggcctgggacaagcctggacttctgatagagacccatcacggtgcctacagagctccccactccctgattgtcaagacctactctgaagatcttccctgccaagacacaagagggctgagccaggtcctagctgttctccagacccacctgctgactttagactctaagagagggccctagccaggctggacttctgaccactgacttctcctgacctgagggccctggcacagagggcatccctcatgctgagaaggtcaagagcctctgctggcttcctcatcccctgtccagatccctcacatcagggtctgccccgctaatgtggaggaaatgagggagatacggagtgggagggattgggggaggaaaggggaggtttccctctgttagggagagacctgttttttggaatctggagcctcctctggggtggggagaggaaaccacccaagttatagggacagggtagggcagcatctgttatgggccctgagaagcccagagatggagctgaaactgtccagtatgcaaggatgccaggagaagggcaattcacacccagggtccatccatactacggagggtccaggaggtctcccagccacccatccttggcaaccagatgttactggggccaagctaggatgggagctgagggggaaggaagtaggggaatggaagtggaaggatgcagcccccccagacctgccgagaggcctcatgcatgtgcatgagtgtgcccatgggcagacatgtgcctgtcccagcacagcgggcagaatgagattgtccacactggccccaccctccaagtcgacctctaccccatggtatgtagtggagcatcagggtaggctatcttctctgccttcaatcttcagggactgcagggaagagggaagcacgcacagcacggttcctctctccactgcattgtttcactgggctcacctgcttctgaaaacggctccctgtcttgggctctaatgaggatctggggttgggagaggctgttggtctgagggcagtaatcacaggctgcaggctagagggggcagttatgactgcctgaaagtgggtgagggattgcacttcagaaaaacatctaaaaaacttagtctatgtttgaattccccacctccatcccatctatgggaagagccgttcagtgtttagagagtggggagatgggtccctgcacttggcctctccataagccttggagggtcagggctgataccaggggtcctggcaagccattgggcagagacagaccacaagagcagggcatttttttacgctgggcatacatatgcacacaagcatgcacagaggcatgtcccgtgcccagcctctccaccgtcactgtccgctgctggctggaggggatgcaggggtagtgtatgcagaccttccactgggcaaatgccatgtgtcaggagggaaaggcctaggaagcccccatggggaaggttctggatttattccctcctctaaatgctataaatacgttagcacttgagtcgactggaggctgccaggaattcaggatgcatacagctgtaatttaacccagagcagctccacgtgagagcattaaagatgtaatgaagatgttta

SEQ ID NO: 280955 - DNA, 2022 bp, Homo sapiens
gggggcgcggagcgtgcagggaggcaaggcgctgtagcttcggggatcccccgaggctgctcggcccggccccacctccgccgtgggtcccggccctacccaccctagctcaggccggcagagccagcgctcgcggatgcggctggtgcgcagtagcgggcctggccagcggctcggggcttgcagggagggcggatctcgggtcggacccgcagccccagacgccgggcttgggggttccccccgccccggcctcctgccagtcactaccacccctagcctctccaactgagctcggcgccgggagaggattaaactactctgccctcccagggcccactgcagagacccagccggctggtgtttaccgatgtggccaatgccatccatgtgtgagtggcctgggacaagcctggacttctgatagagacccatcacggtgcctacagagctccccactccctgattgtcaagacctactctgaagatcttccctgccaagacacaagagggctgagccaggtcctagctgttctccagacccacctgctgactttagactctaagagagggccctagccaggctggacttctgaccactgacttctcctgacctgagggccctggcacagagggcatccctcatgctgagaaggtcaagagcctctgctggcttcctcatcccctgtccagatccctcacatcagggtctgccccgctaatgtggaggaaatgagggagatacggagtgggagggattgggggaggaaaggggaggtttccctctgttagggagagacctgttttttggaatctggagcctcctctggggtggggagaggaaaccacccaagttatagggacagggtagggcagcatctgttatgggccctgagaagcccagagatggagctgaaactgtccagtatgcaaggatgccaggagaagggcaattcacacccagggtccatccatactacggagggtccaggaggtctcccagccacccatccttggcaaccagatgttactggggccaagctaggatgggagctgagggggaaggaagtaggggaatggaagtggaaggatgcagcccccccagacctgccgagaggcctcatgcatgtgcatgagtgtgcccatgggcagacatgtgcctgtcccagcacagcgggcagaatgagattgtccacactggccccaccctccaagtcgacctctaccccatggtatgtagtggagcatcagggtaggctatcttctctgccttcaatcttcagggactgcagggaagagggaagcacgcacagcacggttcctctctccactgcattgtttcactgggctcacctgcttctgaaaacggctccctgtcttgggctctaatgaggatctggggttgggagaggctgttggtctgagggcagtaatcacaggctgcaggctagagggggcagttatgactgcctgaaagtgggtgagggattgcacttcagaaaaacatctaaaaaacttagtctatgtttgaattccccacctccatcccatctatgggaagagccgttcagtgtttagagagtggggagatgggtccctgcacttggcctctccataagccttggagggtcagggctgataccaggggtcctggcaagccattgggcagagacagaccacaagagcagggcatttttttacgctgggcatacatatgcacacaagcatgcacagaggcatgtcccgtgcccagcctctccaccgtcactgtccgctgctggctggaggggatgcaggggtagtgtatgcagaccttccactgggcaaatgccatgtgtcaggagggaaaggcctaggaagcccccatggggaaggttctggatttattccctcctctaaatgctataaatacgttagcacttgagtcgactggaggctgccaggaattcaggatgcatacagctgtaatttaacccagagcagctccacgtgagagcattaaagatgtaatgaagatgttta

SEQ ID NO: 280956 - DNA, 1343 bp, Homo sapiens
  misc_feature (30)..(30): n is a, c, g, or t
ccttccgacatctcatttgttccacattangggcagaccctaatgtggaggaaatgagggagatacggagtgggagggattgggggaggaaaggggaggtttccctctgttagggagagacctgttttttggaatctggagcctcctctggggtggggagaggaaaccacccaagttatagggacagggtagggcagcatctgttatgggccctgagaagcccagagatggagctgaaactgtccagtatgcaaggatgccaggagaagggcaattcacacccagggtccatccatactacggagggtccaggaggtctcccagccacccatccttggcaaccagatgttactggggccaagctaggatgggagctgagggggaaggaagtaggggaatggaagtggaaggatgcagcccccccagacctgccgagaggcctcatgcatgtgcatgagtgtgcccatgggcagacatgtgcctgtcccagcacagcgggcagaatgagattgtccacactggccccaccctccaagtcgacctctaccccatggtatgtagtggagcatcagggtaggctatcttctctgccttcaatcttcagggactgcagggaagagggaagcacgcacagcacggttcctctctccactgcattgtttcactgggctcacctgcttctgaaaacggctccctgtcttgggctctaatgaggatctggggttgggagaggctgttggtctgagggcagtaatcacaggctgcaggctagagggggcagttatgactgcctgaaagtgggtgagggattgcacttcagaaaaacatctaaaaaacttagtctatgtttgaattccccacctccatcccatctatgggaagagccgttcagtgtttagagagtggggagatgggtccctgcacttggcctctccataagccttggagggtcagggctgataccaggggtcctggcaagccattgggcagagacagaccacaagagcagggcatttttttacgctgggcatacatatgcacacaagcatgcacagaggcatgtcccgtgcccagcctctccaccgtcactgtccgctgctggctggaggggatgcaggggtagtgtatgcagaccttccactgggcaaatgccatgtgtcaggagggaaaggcctaggaagcccccatggggaaggttctggatttattccctcctctaaatgctataaatacgttagcacttgagtcgactggaggctgccaggaattcaggatgcatacagctgtaatttaacccagagcagctccacgtgagagcattaaagatgtaatgaagatgttta

SEQ ID NO: 280957 - DNA, 1805 bp, Homo sapiens
gggggcgcggagcgtgcagggaggcaaggcgctgtagcttcggggatcccccgaggctgctcggcccggccccacctccgccgtgggtcccggccctacccaccctagctcaggccggcagagccagcgctcgcggatgcggctggtgcgcagtagcgggcctggccagcggctcggggcttgcagggagggcggatctcgggtcggacccgcagccccagacgccgggcttgggggttccccccgccccggcctcctgccagtcactaccacccctagcctctccaactgagctcggcgccgggagaggattaacacccaggaaggcagggggctccctttatccaaggaggtggctgtgcaggtggccaccacaggtggcaggaaccacaggctggggcactccggagtcaggagtgagtgggcaggttgactggcatcaggcagcctctcagccagggccctctccgcatcagcatgaactccaggaccgcatctgctaggggctggttcagcagccgcccacccacctctgagtctgacctggaacctgccacagatgggccagcctccgagaccactaccctcagcccagaggccaccacctttaatgacaccagaatccctgatgcagctggtggcacggccggcgtgggtaccatgcttctgtcctttgggatcatcacggtgataggcctggctgtggccttggttttgtacatcaggaagaagaagaggctggagaagctacgccaccagctcatgcccatgtacaacttcgaccccacggaggaacaagatgagttggagcaggagctgctggagcatgggcgggacgccgcctctgtacaggctgctacttctgtgcaggccatgcagggcaagactactctgccctcccagggcccactgcagagacccagccggctggtgtttaccgatgtggccaatgccatccatgtgtgagtggcctgggacaagcctggacttctgatagagacccatcacggtgcctacagagctccccactccctgattgtcaagacctactctgaagatcttccctgccaagacacaagagggctgagccaggtcctagctgttctccagacccacctgctgactttagactctaagagagggccctagccaggctggacttctgaccactgacttctcctgacctgagggccctggcacagagggcatccctcatgctgagaaggtcaagagcctctgctggcttcctcatcccctgtccagatccctcacatcagggtctgccccgctaatgtggaggaaatgagggagatacggagtgggagggattgggggaggaaaggggaggtttccctctgttagggagagacctgttttttggaatctggagcctcctctggggtggggagaggaaaccacccaagttatagggacagggtagggcagcatctgttatgggccctgagaagcccagagatggagctgaaactgtccagtatgcaaggatgccaggagaagggcaattcacacccagggtccatccatactacggagggtccaggaggtctcccagccacccatccttggcaaccagatgttactggggccaagctaggatgggagctgagggggaaggaagtaggggaatggaagtggaaggatgctgttcttttatacctgtcttattgtcttattcatgagcatttctgttcacatgattattcatgtgctttgttctgtactttattcctatttttattgtttactttttttcattctttcatgttgtctttttattcttatct

SEQ ID NO: 280958 - DNA, 2196 bp, Homo sapiens
gggggcgcggagcgtgcagggaggcaaggcgctgtagcttcggggatcccccgaggctgctcggcccggccccacctccgccgtgggtcccggccctacccaccctagctcaggccggcagagccagcgctcgcggatgcggctggtgcgcagtagcgggcctggccagcggctcggggcttgcagggagggcggatctcgggtcggacccgcagccccagacgccgggcttgggggttccccccgccccggcctcctgccagtcactaccacccctagcctctccaactgagctcggcgccgggagaggattaagttttgtacatcaggaagaagaagaggctggagaagctacgccaccagctcatgcccatgtacaacttcgaccccacggaggaacaagatgagttggagcaggagctgctggagcatgggcgggacgccgcctctgtacaggctgctacttctgtgcaggccatgcagggcaagactactctgccctcccagggcccactgcagagacccagccggctggtgtttaccgatgtggccaatgccatccatgtgtgagtggcctgggacaagcctggacttctgatagagacccatcacggtgcctacagagctccccactccctgattgtcaagacctactctgaagatcttccctgccaagacacaagagggctgagccaggtcctagctgttctccagacccacctgctgactttagactctaagagagggccctagccaggctggacttctgaccactgacttctcctgacctgagggccctggcacagagggcatccctcatgctgagaaggtcaagagcctctgctggcttcctcatcccctgtccagatccctcacatcagggtctgccccgctaatgtggaggaaatgagggagatacggagtgggagggattgggggaggaaaggggaggtttccctctgttagggagagacctgttttttggaatctggagcctcctctggggtggggagaggaaaccacccaagttatagggacagggtagggcagcatctgttatgggccctgagaagcccagagatggagctgaaactgtccagtatgcaaggatgccaggagaagggcaattcacacccagggtccatccatactacggagggtccaggaggtctcccagccacccatccttggcaaccagatgttactggggccaagctaggatgggagctgagggggaaggaagtaggggaatggaagtggaaggatgcagcccccccagacctgccgagaggcctcatgcatgtgcatgagtgtgcccatgggcagacatgtgcctgtcccagcacagcgggcagaatgagattgtccacactggccccaccctccaagtcgacctctaccccatggtatgtagtggagcatcagggtaggctatcttctctgccttcaatcttcagggactgcagggaagagggaagcacgcacagcacggttcctctctccactgcattgtttcactgggctcacctgcttctgaaaacggctccctgtcttgggctctaatgaggatctggggttgggagaggctgttggtctgagggcagtaatcacaggctgcaggctagagggggcagttatgactgcctgaaagtgggtgagggattgcacttcagaaaaacatctaaaaaacttagtctatgtttgaattccccacctccatcccatctatgggaagagccgttcagtgtttagagagtggggagatgggtccctgcacttggcctctccataagccttggagggtcagggctgataccaggggtcctggcaagccattgggcagagacagaccacaagagcagggcatttttttacgctgggcatacatatgcacacaagcatgcacagaggcatgtcccgtgcccagcctctccaccgtcactgtccgctgctggctggaggggatgcaggggtagtgtatgcagaccttccactgggcaaatgccatgtgtcaggagggaaaggcctaggaagcccccatggggaaggttctggatttattccctcctctaaatgctataaatacgttagcacttgagtcgactggaggctgccaggaattcaggatgcatacagctgtaatttaacccagagcagctccacgtgagagcattaaagatgtaatgaagatgttta

SEQ ID NO: 280959 - DNA, 2731 bp, Homo sapiens
gggggcgcggagcgtgcagggaggcaaggcgctgtagcttcggggatcccccgaggctgctcggcccggccccacctccgccgtgggtcccggccctacccaccctagctcaggccggcagagccagcgctcgcggatgcggctggtgcgcagtagcgggcctggccagcggctcggggcttgcagggagggcggatctcgggtcggacccgcagccccagacgccgggcttgggggttccccccgccccggcctcctgccagtcactaccacccctagcctctccaactgagctcggcgccgggagaggattaacacccaggaaggcagggggctccctttatccaaggaggtggctgtgcaggtggccaccacaggtggcaggaaccacaggctggggcactccggagtcaggagtgagtgggcaggttgactggcatcaggcagcctctcagccagggccctctccgcatcagcatgaactccaggaccgcatctgctaggggctggttcagcagccgcccacccacctctgagtctgacctggaacctgccacagatgggccagcctccgagaccactaccctcagcccagaggccaccacctttaatgacaccagaatccctgatgcagctggtggcacggccggcgtgggtaccatgcttctgtcctttgggatcatcacggtgataggcctggctgtggccttggttttgtacatcaggaagaagaagaggctggagaagctacgccaccagctcatgcccatgtacaacttcgaccccacggaggaacaagatgagttggagcaggagctgctggagcatgggcgggacgccgcctctgtacaggctgctacttctgtgcaggccatgcagggcaagactactctgccctcccagggcccactgcagagacccagccggctggtgtttaccgatgtggccaatgccatccatgtgtgagtggcctgggacaagcctggacttctgatagagacccatcacggtgcctacagagctccccactccctgattgtcaagacctactctgaagatcttccctgccaagacacaagagggctgagccaggtcctagctgttctccagacccacctgctgactttagactctaagagagggccctagccaggctggacttctgaccactgacttctcctgacctgagggccctggcacagagggcatccctcatgctgagaaggtcaagagcctctgctggcttcctcatcccctgtccagatccctcacatcagggtctgccccgctaatgtggaggaaatgagggagatacggagtgggagggattgggggaggaaaggggaggtttccctctgttagggagagacctgttttttggaatctggagcctcctctggggtggggagaggaaaccacccaagttatagggacagggtagggcagcatctgttatgggccctgagaagcccagagatggagctgaaactgtccagtatgcaaggatgccaggagaagggcaattcacacccagggtccatccatactacggagggtccaggaggtctcccagccacccatccttggcaaccagatgttactggggccaagctaggatgggagctgagggggaaggaagtaggggaatggaagtggaaggatgcagcccccccagacctgccgagaggcctcatgcatgtgcatgagtgtgcccatgggcagacatgtgcctgtcccagcacagcgggcagaatgagattgtccacactggccccaccctccaagtcgacctctaccccatggtatgtagtggagcatcagggtaggctatcttctctgccttcaatcttcagggactgcagggaagagggaagcacgcacagcacggttcctctctccactgcattgtttcactgggctcacctgcttctgaaaacggctccctgtcttgggctctaatgaggatctggggttgggagaggctgttggtctgagggcagtaatcacaggctgcaggctagagggggcagttatgactgcctgaaagtgggtgagggattgcacttcagaaaaacatctaaaaaacttagtctatgtttgaattccccacctccatcccatctatgggaagagccgttcagtgtttagagagtggggagatgggtccctgcacttggcctctccataagccttggagggtcagggctgataccaggggtcctggcaagccattgggcagagacagaccacaagagcagggcatttttttacgctgggcatacatatgcacacaagcatgcacagaggcatgtcccgtgcccagcctctccaccgtcactgtccgctgctggctggaggggatgcaggggtagtgtatgcagaccttccactgggcaaatgccatgtgtcaggagggaaaggcctaggaagcccccatggggaaggttctggatttattccctcctctaaatgctataaatacgttagcacttgagtcgactggaggctgccaggaattcaggatgcatacagctgtaatttaacccagagcagctccacgtgagagcattaaagatgtaatgaagatgtttaaaaaaaaaaaaggggggtctaaaaattccgggccgattactggcattttgaaggccaaaggggtaaaaagaagggggaaaaggaggaactcggtttggagactctggtgatgaccacgaaggggaatgtgactcgttga

SEQ ID NO: 280960 - DNA, 2596 bp, Homo sapiens
gggggcgcggagcgtgcagggaggcaaggcgctgtagcttcggggatcccccgaggctgctcggcccggccccacctccgccgtgggtcccggccctacccaccctagctcaggccggcagagccagcgctcgcggatgcggctggtgcgcagtagcgggcctggccagcggctcggggcttgcagggagggcggatctcgggtcggacccgcagccccagacgccgggcttgggggttccccccgccccggcctcctgccagtcactaccacccctagcctctccaactgagctcggcgccgggagaggattaacacccaggaaggcagggggctccctttatccaaggaggtggctgtgcaggtggccaccacaggtggcaggaaccacaggctggggcactccggagtcaggagtgagtgggcaggttgactggcatcaggcagcctctcagccagggccctctccgcatcagcatgaactccaggaccgcatctgctaggggctggttcagcagccgcccacccacctctgagtctgacctggaacctgccacagatgggccagcctccgagaccactaccctcagcccagaggccaccacctttaatgacaccagaatccctgatgcagctggtggcacggccggcgtgggtaccatgcttctgtcctttgggatcatcacggtgataggcctggctgtggccttggttttgtacatcaggaagaagaagaggctggagaagctacgccaccagctcatgcccatgtacaacttcgaccccacggaggaacaagatgagttggagcaggagctgctggagcatgggcgggacgccgcctctgtacaggctgctacttctgtgcaggccatgcagggcaagactactctgccctcccagggcccactgcagagacccagccggctggtgtttaccgatgtggccaatgccatccatgtgtgagtggcctgggacaagcctggacttctgatagagacccatcacggtgcctacagagctccccactccctgattgtcaagacctactctgaagatcttccctgccaagacacaagagggctgagccaggtcctagctgttctccagacccacctgctgactttagactctaagagagggccctagccaggctggacttctgaccactgacttctcctgacctgagggccctggcacagagggcatccctcatgctgagaaggtcaagagcctctgctggcttcctcatcccctgtccagatccctcacatcagggtctgccccgctaatgtggaggaaatgagggagatacggagtgggagggattgggggaggaaaggggaggtttccctctgttagggagagacctgttttttggaatctggagcctcctctggggtggggagaggaaaccacccaagttatagggacagggtagggcagcatctgttatgggccctgagaagcccagagatggagctgaaactgtccagtatgcaaggatgccaggagaagggcaattcacacccagggtccatccatactacggagggtccaggaggtctcccagccacccatccttggcaaccagatgttactggggccaagctaggatgggagctgagggggaaggaagtaggggaatggaagtggaaggatgcagcccccccagacctgccgagaggcctcatgcatgtgcatgagtgtgcccatgggcagacatgtgcctgtcccagcacagcgggcagaatgagattgtccacactggccccaccctccaagtcgacctctaccccatggtatgtagtggagcatcagggtaggctatcttctctgccttcaatcttcagggactgcagggaagagggaagcacgcacagcacggttcctctctccactgcattgtttcactgggctcacctgcttctgaaaacggctccctgtcttgggctctaatgaggatctggggttgggagaggctgttggtctgagggcagtaatcacaggctgcaggctagagggggcagttatgactgcctgaaagtgggtgagggattgcacttcagaaaaacatctaaaaaacttagtctatgtttgaattccccacctccatcccatctatgggaagagccgttcagtgtttagagagtggggagatgggtccctgcacttggcctctccataagccttggagggtcagggctgataccaggggtcctggcaagccattgggcagagacagaccacaagagcagggcatttttttacgctgggcatacatatgcacacaagcatgcacagaggcatgtcccgtgcccagcctctccaccgtcactgtccgctgctggctggaggggatgcaggggtagtgtatgcagaccttccactgggcaaatgccatgtgtcaggagggaaaggcctaggaagcccccatggggaaggttctggatttattccctcctctaaatgctataaatacgttagcacttgagtcgactggaggctgccaggaattcaggatgcatacagctgtaatttaacccagagctggtgtgcagtggcgcgatcttggctcactgcaaccccgagctgg

SEQ ID NO: 280961 - DNA, 467 bp, Homo sapiens
tggtcccactcttttgttcagcaagctttagtcaacttatttgtaaccctgagttgtctattcatatttaatgagggaataggcctagaagctctgtgggtgaacagggagctagaattttggagaatttgttcagagaacattcccgtggatttttgtttcctctaaatgtgtttctggctaggattgctggaactttgctattttccataggtgctactattaacttccctcttttcagttccacttcccactctagctttcaataataccattatttctgaagccagaacctctcccagggaatattgacttctttatcagctccagctccctgccatagtttttaatagtacgtttaaaccattctccaaaaaaggcagtaacccgtagtgaataatggggcttaacagtatagtcagttaagagagaaaaataaccttttaggggttggggttgctttttaa

SEQ ID NO: 280962 - DNA, 944 bp, Homo sapiens
cggccgcgaactggcccccatcaccgccgacctgccccggccgccatgttgggaggaaacgacgcgtcacgcagcggccgaacggctgcagacgaggaagcggcggcggcggcggcggcggcggcgctccctgcccagagctgccgcggcgccgggaggctgggggcggagggcggcgcgggaggagcggcccgagccgcagcgctacggcggcccggcggggcctccagcgttcgcctgcagggcggcgtggggcgtggcgggcctctggtggcaccgcgcccagcacttcgggctcttggtggcggccgagctgcgggaccagagatccccccactcggcacccctgctcctgccgagtgaacaggactcctggctactctgcactggctttctaactttctgatgggggtgcagtcctttgcattccaggggtcacagcaacacccgcatcgcccgttctcagccgcagggtctccgcctgcatcactcgactctaaaatttccttccctagtgcacggaactgctgtccaggactctgctctccgactacctcagggaggattctgttttgggaaaaatgctatgttatgcattggggatcaaatatgaagaagccacagaccctgagttgaggaacataaagattatgctggaagacataaagcacctcaaatccactgctcacaactggactcatgtttttcaccggattctgacctcctactagctgccaaatcttggtaagcagcaaagaagaaagtaagttgtctggcattggtaagttccggagaatcaagtgcagaaatcactgcagaggacctaaaaataaccacacatccaatgcaggacacactggcagaacgaagcctgttacagctaaggccaaagaaaggggcacagtcaccatcaagctgaagaccagcctcaactggacgggaca

SEQ ID NO: 280963 - DNA, 507 bp, Homo sapiens
  misc_feature (497)..(500): n is a, c, g, or t
  misc_feature (502)..(506): n is a, c, g, or t
cgtgggcaccgggcgcttgtcctggaagaagcgcttgagcgtgcagacctgcagcacagccaccagcagcagcaccgccacgttgacagctgaccagaagttgacccgctccaagttgccctcttgcaggttgcggtcacgtgcctcgaaggcccgcagtagcgtgagcatctggatgctgcgctccagccgggtccgcatggtctcaatggactcctacagggcagcgggaggggaagggtcaggcctccctccacccatcagggagcagagaccaaaaaaaccgggggatacggagggaggctgtattaaccctgggaggtacagctgcaaacacagacttgttcaggctaagttcaaatcctcaccctgccactcactggctgtgaccatgagcaacttaattaacctatctgagcctgtttcctcttctataagcttccaaattgctgtgaacatttaatgcctaaataaatgtacaaggatgagcatggtgnnnnannnnna

SEQ ID NO: 280964 - DNA, 909 bp, Homo sapiens
gagattgcgaaactggacaaactgctgaacctggacaggggccagggctggagttgggactggattcagagagagagtcaacgtcggcagagcgagaatggcaggcccagcagaggatgacccagagcagcagcagcaagaagcccacgagaccgttgcagacgatggcgatgagggccccctgggagatggctgcccccatgacaggcagcaccctcagaccagcacagacagtggagctgcctcaatggactccagccagcccgaccaggagacctccagaggcgccagcttgcacagagggaactttgtggaggccctggcaggcatgtgcaggctctgtgcgtccagggctgtgtgcctctatgtggggctgcctctctgggtcaggccagtgattgtcacctattctgatccggccgtcttctcatcccgctctacatgctctccttggaggatcacatccctgaagctatatcatgaagactcccagtgctcccaagtctagccttaacttctctctggaatcctagactcatataactaagtgcctactgtaatcggggcagtattgattcctggttcacttactaactttgtgatcttgagcaagttactaaatctctcttagcctcagcttcctcatctgtaaaatggttgtaatgctacctctcagggttgttattcactaatttatagcagatcgatcacatctcagcaaatgccagctgacacaacccccaggaccatgtgactaagaggccccttcccccaatccaatgccatgaaattcacataagacccctgtaaatccagatgctatcttgaaagaagaaagggaagactgagtcatccaaagctaccaaagtacttagagactgtctaaaataaattattggatcctataga

SEQ ID NO: 280965 - DNA, 2286 bp, Homo sapiens
  misc_feature (1227)..(1227): n is a, c, g, or t
  misc_feature (1235)..(1235): n is a, c, g, or t
  misc_feature (1244)..(1244): n is a, c, g, or t
  misc_feature (1253)..(1253): n is a, c, g, or t
  misc_feature (1260)..(1260): n is a, c, g, or t
  misc_feature (1265)..(1265): n is a, c, g, or t
  misc_feature (1268)..(1268): n is a, c, g, or t
  misc_feature (1275)..(1275): n is a, c, g, or t
  misc_feature (1286)..(1286): n is a, c, g, or t
  misc_feature (1298)..(1299): n is a, c, g, or t
  misc_feature (1305)..(1306): n is a, c, g, or t
  misc_feature (1325)..(1325): n is a, c, g, or t
  misc_feature (1329)..(1329): n is a, c, g, or t
  misc_feature (1334)..(1334): n is a, c, g, or t
  misc_feature (1340)..(1340): n is a, c, g, or t
gaggtcactctctctatctatgtcgcctcaagcagcagtggcacgcaaaggtcagtcagccctggccaggctgcgccctccccccggacagcactcaccgttggtgtagggagaccccgaggccaaggcggctccgttctgggcctggaggctggctggggcgccgccggaggccggtattcccggctgggacatgatgactgggttggaaggggctggtcggggtcgacaacagcgcacaagaagagagctgaaagaccactgctgaaagcggagggaggaggctaacgacttaagactgaagactgggagaagaggggggggcgcattaagcccgaggcatggcgccgcactctccccaggccaccggcggccacagcctagcctgggagctgaggcttgagagtcgggccggcggggccgcgaacgcccggctagaaggcggcagccaaacctagagagaaggagggaggccctggccggaagtgcctgtcagccgccggccgcgcagccgcaatcaggacacgtggcacttccggctccgggctcgcagcagccgccgccgcgccggcgaactcttctctgccagccgggctgccccgaggccacctgacagctcctggtgccccgaccccgacgaccgtgcccggcctcgccgccacgtcaccgactctcacggccggccggaagtgccgtgtgtcaccgctacggaaattcccgccgttgtgaacgtgacctcgctcgcagagccaggatcgtggggcaatctgagattcagtagccgctttcgtggggtgggactgacagttcctctcctcgggttttgtgaagattacctgagaccatagaagtcatcgtcctctgttgagaccgtaccaccactgggagctggggcggttaatgttcatcgcagtatttcattcacatttcgtcttcgtgtttcagatgtaaattataaggggttttaaaaagaggtggttaaatatgtgtacatgttaatagtgtgatcaagccaagaaggaggcctttgtctttgactggaggactcagaggaattttaattttgaaactcgctgattcacagcatagtcacgctcaagttcattagcacatttaaatggcagttttgtttcctcttctaagagtttacagtaaggaaaaacaacattgctacacatgctaaaagatgacagacttggacaacatgtcccaacattacatcccaanggagtctngctctgtcncccaggctngagtgcngtggngcnatctcgnctcactgcaanctccgcctcccnngttcannccattctcctgcctcagcntccngagtngctggnactacagcttccgaagaactgaccattgctggcatgacgtttacaacttttgatctgggtggacatgttcaagctcgaagagtgtggaaaaactaccttcctgctatcaatggcattgtatttctggtggattgtgcagaccacgaaaggctgttagagtcaaaagaagaacttgattcactaatgacagatgaaaccattgctaatgtgcctatactgattcttgggaataagatcgacagacctgaagccatcagtgaagagaggttgcgagagatgtttggtttatatggtcagacaacaggaaaggggagtatatctctgaaagaactgaatgcccgacccttagaagttttcatgtgtagtgtgctcaaaagacaaggttacggagaaggcttccgctggatggcacagtacattgattaacacaaactcacattggttccaggtctcaacgttcaggcttactcagagatttgattgctcaacatgcataacttgaattcaatagacttttgctggttataaaacagatgttttttagattattaatattaaatcaacttaatttgaatgagaattgaaaactgattcaagtaagtttgagtatcacaatgttagctttctaattccataaaagtacttggtttttacagtttataatctgacatcaccccagcgccatttgtaaagagcaactttccagcagtacatttgaagcactttttaacaacatgaaactataaaccatatttaaaagctcatcatgttaaattttttatgtacttttctggaactagtttttaaattttagattatatgtccacctatcttaagtgtacagttaataattagcttattcaatgattgcatgatgccttacagttttcaataactttttttcttatgcaaacgtcatgcaataaaacaaactctaatgtttggc

SEQ ID NO: 280966 - DNA, 881 bp, Homo sapiens
acccgccggcccggaaggggctgatgcgaactggggccacggcagccatcgcgctttgcagttcggtctcctggtgtacggccaacgccaagtaggggattgcgttccctccagtcgcagaccctatcagatttggatatgtccttcatatttgattggatttacagtggtttcagcagtgtgctacagtttttaggattatataagaaaactggtaaactggtatttcttggattggataatgcaggaaaaacaacattgctacacatgctaaaagatgacagacttggacaacatgtcccaacattacatcccacttccgaagaactgaccattgctggcatgacgtttacaacttttgatctgggtggacatgttcaagctcgaagagtgtggaaaaactaccttcctgctatcaatggcattgtatttctggtggattgtgcagaccacgaaaggctgttagagtcaaaagaagaacttgattcactaatgacagatgaaaccattgctaatgtgcctatactgattcttgggaataagatcgacagacctgaagccatcagtgaagagaggttgcgagagatgtttggtttatatggtcagacaacaggaaaggggagtatatctctgaaagaactgaatgcccgacccttagaagttttcatgtgtagtgtgctcaaaagacaaggttacggagaaggcttccgctggatggcacagtacattgattaacacaaactcacattggttccaggtctcaacgttcaggcttactcagagatttgattgctcaacatgcataacttgaattcaatagacttttgctggttataaaacagatgttttttagattattaatattaaatcaacttaatttg

SEQ ID NO: 280967 - DNA, 1000 bp, Homo sapiens
acccgccggcccggaaggggctgatgcgaactggggccacggcagccatcgcgctttgcagttcggtctcctggtgtacggccaacgccaagtaggggattgcgttccctccagtcgcagagtttccctcttgtcgcccaggctggagtgaagtggcacgatctcggcttactgcaagctccgcctcccgggttcacgccattctcctgcctcagcctcccgagtagctgggactacagaccctatcagatttggatatgtccttcatatttgattggatttacagtggtttcagcagtgtgctacagtttttaggattatataagaaaactggtaaactggtatttcttggattggataatgcaggaaaaacaacattgctacacatgctaaaagatgacagacttggacaacatgtcccaacattacatcccacttccgaagaactgaccattgctggcatgacgtttacaacttttgatctgggtggacatgttcaagctcgaagagtgtggaaaaactaccttcctgctatcaatggcattgtatttctggtggattgtgcagaccacgaaaggctgttagagtcaaaagaagaacttgattcactaatgacagatgaaaccattgctaatgtgcctatactgattcttgggaataagatcgacagacctgaagccatcagtgaagagaggttgcgagagatgtttggtttatatggtcagacaacaggaaaggggagtatatctctgaaagaactgaatgcccgacccttagaagttttcatgtgtagtgtgctcaaaagacaaggttacggagaaggcttccgctggatggcacagtacattgattaacacaaactcacattggttccaggtctcaacgttcaggcttactcagagatttgattgctcaacatgcataacttgaattcaatagacttttgctggttataaaacagatgttttttagattattaatattaaatcaacttaatttg

SEQ ID NO: 280968 - DNA, 735 bp, Homo sapiens
acccgccggcccggaaggggctgatgcgaactggggccacggcagccatcgcgctttgcagttcggtctcctggtgtacggccaacgccaagtaggggattgcgttccctccagtcgcagagtttccctcttgtcgcccaggctggagtgaagtggcacgatctcggcttactgcaagctccgcctcccgggttcacgccattctcctgcctcagcctcccgagtagctgggactacaggtgcccgccaccacgcaccgctaatttttttgtattttttagtagagatggggtttcaccgtgttagccaggatggtctcttatctcctgacctcgtgatccgcctgcctcggcctcccaaagtgctgggattataggcgtgagccaccgcatccggtctaacttttctatttttagtagagatgggatttctctatgttggccagtctggtctccaactcctgacctcaggtgatctgctcgcctcggcctcccaaagtgctgggattaaaggcatgagccacctcagtgggccactgtactgatttttaaggtgttgaagcttttccaagaagatttgttttaaaacagctaaaactttgacattgttagctgaaagaaccaaattcgtcagcaatttaaggtgtttggtacagtggacaaaatgaggtgaagaagtccttttaacttgaaaaattaaacatagtattatttatttgtgtgttcttacatcagc

SEQ ID NO: 280969 - DNA, 282 bp, Homo sapiens
cggacgcgtgggtcgacccacgcgtccggagcaactttccagcagtacatttgaagcactttttaacaacatgaaactataaaccatatttaaaagctcatcatgttaaattttttatgtacttttctggaactagtttttaaattttagattatatgtccacctatcttaagtgtacagttaataattagcttattcaatgattgcatgatgccttacagttttcaataactttttttcttatgcaaacgtcatgcaataaaacaaactctaatgtttggc

SEQ ID NO: 280970 - DNA, 1874 bp, Homo sapiens
acccgccggcccggaaggggctgatgcgaactggggccacggcagccatcgcgctttgcagttcggtctcctggtgtacggccaacgccaagtaggggattgcgttccctccagtcgcagaccctatcagatttggatatgtccttcatatttgattggatttacagtggtttcagcagtgtgctacagtttttaggattatataagaaaactggtaaactggtatttcttggattggataatgcaggaaaaacaacattgctacacatgctaaaagatgacagacttggacaacatgtcccaacattacatcccacttccgaagaactgaccattgctggcatgacgtttacaacttttgatctgggtggacatgttcaagctcgaagagtgtggaaaaactaccttcctgctatcaatggcattgtatttctggtggattgtgcagaccacgaaaggctgttagagtcaaaagaagaacttgattcactaatgacagatgaaaccattgctaatgtgcctatactgattcttgggaataagatcgacagacctgaagccatcagtgaagagaggttgcgagagatgtttggtttatatggtcagacaacaggaaaggggagtatatctctgaaagaactgaatgcccgacccttagaagttttcatgtgtagtgtgctcaaaagacaaggttacggagaaggcttccgctggatggcacagtacattgattaacacaaactcacattggttccaggtctcaacgttcaggcttactcagagatttgattgctcaacatgcataacttgaattcaatagacttttgctggttataaaacagatgttttttagattattaatattaaatcaacttaatttgaatgagaattgaaaactgattcaagtaagtttgagtatcacaatgttagctttctaattccataaaagtacttggtttttacagtttataatctgacatcaccccagcgccatttgtaaagagcaactttccagcagtacatttgaagcactttttaacaacatgaaactataaaccatatttaaaagctcatcatgttaaattttttatgtacttttctggaactagtttttaaattttagattatatgtccacctatcttaagtgtacagttaataattagcttattcaatgattgcatgatgccttacagttttcaataactttttttcttatgcaaacgtcatgcaataaaacaaactctaatgtttggcatccttgttgggcaaatgtttcatttaaatgtgtcttatctagctagtatactctgaaaatttgagtatttaatattaggcatatgaagtggttgttgggaaaggagattccttcagaatatttagaatagcgtttaaggctctcaaggcttaggtatttaccatgagatggttgtggtcagttgcacctgataccatgtatccctgaatcatgtgtatttttattagtaatgcagccactaccattgctgatggggtctgtgtcctagtccctgtgggattggccttctgaagaaaagcacatttatggtacacaaggttgattctcagtttggtaggctctatagttccatcccagctgtctaattctgaagtgctccagtcttattggtgcccaatggggtaatctgtgcctcttccccaaaagcaatgacaggcaccagtgtctccacatttagatatattcccagtctctgtacatttaacagtactctctggggcaagcaataagtaggaccttgtgtgcagtttcattgtagagacatgtatatctgaggttgttacgcgtgttcccccccgctgtgtgtattaccctggagataagtgttcactagtcggt

SEQ ID NO: 280971 - DNA, 1374 bp, Homo sapiens
acccgccggcccggaaggggctgatgcgaactggggccacggcagccatcgcgctttgcagttcggtctcctggtgtacggccaacgccaagtaggggattgcgttccctccagtcgcagagtttccctcttgtcgcccaggctggagtgaagtggcacgatctcggcttactgcaagctccgcctcccgggttcacgccattctcctgcctcagcctcccgagtagctgggactacagaccctatcagatttggatatgtccttcatatttgattggatttacagtggtttcagcagtgtgctacagtttttaggattatataagaaaactggtaaactggtatttcttggattggataatgcaggaaaaacaacattgctacacatgctaaaagatgacagacttggacaacatgtcccaacattacatcccacttccgaagaactgaccattgctggcatgacgtttacaacttttgatctgggtggacatgttcaagctcgaagagtgtggaaaaactaccttcctgctatcaatggcattgtatttctggtggattgtgcagaccacgaaaggctgttagagtcaaaagaagaacttgattcactaatgacagatgaaaccattgctaatgtgcctatactgattcttgggaataagatcgacagacctgaagccatcagtgaagagaggttgcgagagatgtttggtttatatggtcagacaacaggaaaggggagtatatctctgaaagaactgaatgcccgacccttagaagttttcatgtgtagtgtgctcaaaagacaaggttacggagaaggcttccgctggatggcacagtacattgattaacacaaactcacattggttccaggtctcaacgttcaggcttactcagagatttgattgctcaacatgcataacttgaattcaatagacttttgctggttataaaacagatgttttttagattattaatattaaatcaacttaatttgaatgagaattgaaaactgattcaagtaagtttgagtatcacaatgttagctttctaattccataaaagtacttggtttttacagtttataatctgacatcaccccagcgccatttgtaaagagcaactttccagcagtacatttgaagcactttttaacaacatgaaactataaaccatatttaaaagctcatcatgttaaattttttatgtacttttctggaactagtttttaaattttagattatatgtccacctatcttaagtgtacagttaataattagcttattcaatgattgcatgatgccttacagttttcaataactttttttcttatgcaaacgtcatgcaataaaacaaactctaatgtttggc

SEQ ID NO: 280972 - DNA, 1586 bp, Homo sapiens
aatcccactatcagcaatacagtgagcatcgctggccctgatatgtacaatgaacatgatccgtatcgtgcatgcttaagacatccatgatctgtgacatagatgctactgtatctgcatcctcaattggaaatcgctatggcgtgcgtggcagtatgctgctacagacacagaatcgcgacgtatgtgaagatgtctagagagtacaagtatacttggaatcactaatgacagatgaaaccattgctaatgtgcctatactgattcttgggaataagatcgacagacctgaagccatcagtgaagagaggttgcgagagatgtttggtttatatggtcagacaacaggaaaggggagtatatctctgaaagaactgaatgcccgacccttagaagttttcatgtgtagtgtgctcaaaagacaaggttacggagaaggcttccgctggatggcacagtacattgattaacacaaactcacattggttccaggtctcaacgttcaggcttactcagagatttgattgctcaacatgcataacttgaattcaatagacttttgctggttataaaacagatgttttttagattattaatattaaatcaacttaatttgaatgagaattgaaaactgattcaagtaagtttgagtatcacaatgttagctttctaattccataaaagtacttggtttttacagtttataatctgacatcaccccagcgccatttgtaaagagcaactttccagcagtacatttgaagcactttttaacaacatgaaactataaaccatatttaaaagctcatcatgttaaattttttatgtacttttctggaactagtttttaaattttagattatatgtccacctatcttaagtgtacagttaataattagcttattcaatgattgcatgatgccttacagttttcaataactttttttcttatgcaaacgtcatgcaataaaacaaactctaatgtttggcatccttgttgggcaaatgtttcatttaaatgtgtcttatctagctagtatactctgaaaatttgagtatttaatattaggcatatgaagtggttgttgggaaaggagattccttcagaatatttagaatagcgtttaaggctctcaaggcttaggtatttaccatgagatggttgtggtcagttgcacctgataccatgtatccctgaatcatgtgtatttttattagtaatgcagccactaccattgctgatggggtctgtgtcctagtccctgtgggattggccttctgaagaaaagcacatttatggtacacaaggttgattctcagtttggtaggctctatagttccatcccagctgtctaattctgaagtgctccagtcttattggtgcccaatggggtaatctgtgcctcttccccaaaagcaatgacaggcaccagtgtctccacatttagatatattcccagtctctgtacatttaacagtactctctggggcaagcaataagtaggaccttgtgtgcagtttcattgtagagacatgtatatctgaggaataaaacagcttgttctgtgtcagtctgaaaaaaaaaa

SEQ ID NO: 280973 - DNA, 1795 bp, Homo sapiens
acccgccggcccggaaggggctgatgcgaactggggccacggcagccatcgcgctttgcagttcggtctcctggtgtacggccaacgccaagtaggggattgcgttccctccagtcgcagaccctatcagatttggatatgtccttcatatttgattggatttacagtggtttcagcagtgtgctacagtttttaggattatataagaaaactggtaaactggtatttcttggattggataatgcaggaaaaacaacattgctacacatgctaaaagatgacagacttggacaacatgtcccaacattacatcccacttccgaagaactgaccattgctggcatgacgtttacaacttttgatctgggtggacatgttcaagctcgaagagtgtggaaaaactaccttcctgctatcaatggcattgtatttctggtggattgtgcagaccacgaaaggctgttagagtcaaaagaagaacttgattcactaatgacagatgaaaccattgctaatgtgcctatactgattcttgggaataagatcgacagacctgaagccatcagtgaagagaggttgcgagagatgtttggtttatatggtcagacaacaggaaaggggagtatatctctgaaagaactgaatgcccgacccttagaagttttcatgtgtagtgtgctccaaactcacattggttccaggtctcaacgttcaggcttactcagagatttgattgctcaacatgcataacttgaattcaatagacttttgctggttataaaacagatgttttttagattattaatattaaatcaacttaatttgaatgagaattgaaaactgattcaagtaagtttgagtatcacaatgttagctttctaattccataaaagtacttggtttttacagtttataatctgacatcaccccagcgccatttgtaaagagcaactttccagcagtacatttgaagcactttttaacaacatgaaactataaaccatatttaaaagctcatcatgttaaattttttatgtacttttctggaactagtttttaaattttagattatatgtccacctatcttaagtgtacagttaataattagcttattcaatgattgcatgatgccttacagttttcaataactttttttcttatgcaaacgtcatgcaataaaacaaactctaatgtttggcatccttgttgggcaaatgtttcatttaaatgtgtcttatctagctagtatactctgaaaatttgagtatttaatattaggcatatgaagtggttgttgggaaaggagattccttcagaatatttagaatagcgtttaaggctctcaaggcttaggtatttaccatgagatggttgtggtcagttgcacctgataccatgtatccctgaatcatgtgtatttttattagtaatgcagccactaccattgctgatggggtctgtgtcctagtccctgtgggattggccttctgaagaaaagcacatttatggtacacaaggttgattctcagtttggtaggctctatagttccatcccagctgtctaattctgaagtgctccagtcttattggtgcccaatggggtaatctgtgcctcttccccaaaagcaatgacaggcaccagtgtctccacatttagatatattcccagtctctgtacatttaacagtactctctggggcaagcaataagtaggaccttgtgtgcagtttcattgtagagacatgtatatctgaggaataaaacagcttgttctgtgtcagtctgaaaaaaaaaa

SEQ ID NO: 280974 - DNA, 1371 bp, Homo sapiens
aaaatgaacacattgctttgcgtgacttattcagattgttgctaactacaatgagaggatgcctaaagctatcgatataccgtagcttgcaaagcactttgcctggtatattgcctgcacgggacactacacatatatatactgttgagatcctctaaagctccggaaccgttagcattcaacactgtgtactgtgctccgaaaagacaaggttacggagaaggcttccgctggatggcacagtacattgattaacacaaactcacattggttccaggtctcaacgttcaggcttactcagagatttgattgctcaacatgcataacttgaattcaatagacttttgctggttataaaacagatgttttttagattattaatattaaatcaacttaatttgaatgagaattgaaaactgattcaagtaagtttgagtatcacaatgttagctttctaattccataaaagtacttggtttttacagtttataatctgacatcaccccagcgccatttgtaaagagcaactttccagcagtacatttgaagcactttttaacaacatgaaactataaaccatatttaaaagctcatcatgttaaattttttatgtacttttctggaactagtttttaaattttagattatatgtccacctatcttaagtgtacagttaataattagcttattcaatgattgcatgatgccttacagttttcaataactttttttcttatgcaaacgtcatgcaataaaacaaactctaatgtttggcatccttgttgggcaaatgtttcatttaaatgtgtcttatctagctagtatactctgaaaatttgagtatttaatattaggcatatgaagtggttgttgggaaaggagattccttcagaatatttagaatagcgtttaaggctctcaaggcttaggtatttaccatgagatggttgtggtcagttgcacctgataccatgtatccctgaatcatgtgtatttttattagtaatgcagccactaccattgctgatggggtctgtgtcctagtccctgtgggattggccttctgaagaaaagcacatttatggtacacaaggttgattctcagtttggtaggctctatagttccatcccagctgtctaattctgaagtgctccagtcttattggtgcccaatggggtaatctgtgcctcttccccaaaagcaatgacaggcaccagtgtctccacatttagatatattcccagtctctgtacatttaacagtactctctggggcaagcaataagtaggaccttgtgtgcagtttcattgtagagacatgtatatctgaggaataaaacagcttgttctgtgtcagtctgaaaaaaaaaa

SEQ ID NO: 280975 - DNA, 1216 bp, Homo sapiens
gaaccgagctgatacccctagtttagaagtttcaatagcagtggccaaaagacaaggttacggagaaggcttccgctggatggcacagtacattgattaacacaaactcacattggttccaggtctcaacgttcaggcttactcagagatttgattgctcaacatgcataacttgaattcaatagacttttgctggttataaaacagatgttttttagattattaatattaaatcaacttaatttgaatgagaattgaaaactgattcaagtaagtttgagtatcacaatgttagctttctaattccataaaagtacttggtttttacagtttataatctgacatcaccccagcgccatttgtaaagagcaactttccagcagtacatttgaagcactttttaacaacatgaaactataaaccatatttaaaagctcatcatgttaaattttttatgtacttttctggaactagtttttaaattttagattatatgtccacctatcttaagtgtacagttaataattagcttattcaatgattgcatgatgccttacagttttcaataactttttttcttatgcaaacgtcatgcaataaaacaaactctaatgtttggcatccttgttgggcaaatgtttcatttaaatgtgtcttatctagctagtatactctgaaaatttgagtatttaatattaggcatatgaagtggttgttgggaaaggagattccttcagaatatttagaatagcgtttaaggctctcaaggcttaggtatttaccatgagatggttgtggtcagttgcacctgataccatgtatccctgaatcatgtgtatttttattagtaatgcagccactaccattgctgatggggtctgtgtcctagtccctgtgggattggccttctgaagaaaagcacatttatggtacacaaggttgattctcagtttggtaggctctatagttccatcccagctgtctaattctgaagtgctccagtcttattggtgcccaatggggtaatctgtgcctcttccccaaaagcaatgacaggcaccagtgtctccacatttagatatattcccagtctctgtacatttaacagtactctctggggcaagcaataagtaggaccttgtgtgcagtttcattgtagagacatgtatatctgaggaataaaacagcttgttctgtgtcagtctgaaaaaaaaaa

SEQ ID NO: 280976 - DNA, 1220 bp, Homo sapiens
cgtaatgattgagcctacagatgataggatgtttcatgtgtagtgtgctcaaaagacaaggttacggagaaggcttccgctggatggcacagtacattgattaacacaaactcacattggttccaggtctcaacgttcaggcttactcagagatttgattgctcaacatgcataacttgaattcaatagacttttgctggttataaaacagatgttttttagattattaatattaaatcaacttaatttgaatgagaattgaaaactgattcaagtaagtttgagtatcacaatgttagctttctaattccataaaagtacttggtttttacagtttataatctgacatcaccccagcgccatttgtaaagagcaactttccagcagtacatttgaagcactttttaacaacatgaaactataaaccatatttaaaagctcatcatgttaaattttttatgtacttttctggaactagtttttaaattttagattatatgtccacctatcttaagtgtacagttaataattagcttattcaatgattgcatgatgccttacagttttcaataactttttttcttatgcaaacgtcatgcaataaaacaaactctaatgtttggcatccttgttgggcaaatgtttcatttaaatgtgtcttatctagctagtatactctgaaaatttgagtatttaatattaggcatatgaagtggttgttgggaaaggagattccttcagaatatttagaatagcgtttaaggctctcaaggcttaggtatttaccatgagatggttgtggtcagttgcacctgataccatgtatccctgaatcatgtgtatttttattagtaatgcagccactaccattgctgatggggtctgtgtcctagtccctgtgggattggccttctgaagaaaagcacatttatggtacacaaggttgattctcagtttggtaggctctatagttccatcccagctgtctaattctgaagtgctccagtcttattggtgcccaatggggtaatctgtgcctcttccccaaaagcaatgacaggcaccagtgtctccacatttagatatattcccagtctctgtacatttaacagtactctctggggcaagcaataagtaggaccttgtgtgcagtttcattgtagagacatgtatatctgaggaataaaacagcttgttctgtgtcagtctgaaaaaaaaaa

SEQ ID NO: 280977 - DNA, 770 bp, Homo sapiens
tgagaagagaaacacttctggaacttggttttgggaataaccattatatgtccacctatcttaagtgtacagttaataattagcttattcaatgattgcatgatgccttacagttttcaataactttttttcttatgcaaacgtcatgcaataaaacaaactctaatgtttggcatccttgttgggcaaatgtttcatttaaatgtgtcttatctagctagtatactctgaaaatttgagtatttaatattaggcatatgaagtggttgttgggaaaggagattccttcagaatatttagaatagcgtttaaggctctcaaggcttaggtatttaccatgagatggttgtggtcagttgcacctgataccatgtatccctgaatcatgtgtatttttattagtaatgcagccactaccattgctgatggggtctgtgtcctagtccctgtgggattggccttctgaagaaaagcacatttatggtacacaaggttgattctcagtttggtaggctctatagttccatcccagctgtctaattctgaagtgctccagtcttattggtgcccaatggggtaatctgtgcctcttccccaaaagcaatgacaggcaccagtgtctccacatttagatatattcccagtctctgtacatttaacagtactctctggggcaagcaataagtaggaccttgtgtgcagtttcattgtagagacatgtatatctgaggaataaaacagcttgttctgtgtcagtctgaaaaaaaaaa

SEQ ID NO: 280978 - DNA, 1689 bp, Homo sapiens
  misc_feature (175)..(175): n is a, c, g, or t
  misc_feature (225)..(225): n is a, c, g, or t
  misc_feature (234)..(234): n is a, c, g, or t
tggtccaatatacaggtgtgtggtattatgcacgagacaatggtttgtttgggaggccgtggatggataggtgtctggcaatgcaaagtgttgcagtggcttcaggaagaaagctactagaaggcattggttatagctgggttctgagaagcaggtaatggcattcggggagcangaccactatgaagcgaaggtgtcactgattagaggccacaggtggtctantaagagtcngcccagatccctgagaaccaccatagttagactgtccagagactggattcaaagtctttgctggtattggatgagggtaggatcctggaagctggaaattgtatccttggctcactgactcttgtgaagacacaatgcattttgacagaccgttggtgtagggagaccccgaggccaaggcggctccgttctgggcctggaggctggctggggcgccgccggaggccggtattcccggctgggacatgatgactgggttggaaggggctggtcggggtcgacaacagcgcacaagaagagagctgaaagaccactgctgaaagcggagggaggaggctaacgacttaagactgaagactgggagaagaggggggggcgcattaagcccgaggcatggcgccgcactctccccaggccaccggcggccacagcctagcctgggagctgaggcttgagagtcgggccggcggggccgcgaacgcccggctagaaggcggcagccaaacctagagagaaggagggaggccctggccggaagtgcctgtcagccgccggccgcgcagccgcaatcaggacacgtggcacttccggctccgggctcgcagcagccgccgccgcgccggcgaactcttctctgccagccgggctgccccgaggccacctgacagctcctggtgccccgaccccgacgaccgtgcccggcctcgccgccacgtcaccgactctcacggccggccggaagtgccgtgtgtcaccgctacggaaattcccgccgttgtgaacgtgacctcgctcgcagagccaggatcgtggggcaatctgagattcagtagccgctttcgtggggtgggactgacagttcctctcctcgggttttgtgaagattacctgagaccatagaagtcatcgtcctctgttgagaccgtaccaccactgggagctggggcggttaatgttcatcgcagtatttcattcacatttcgtcttcgtgtttcagatgtaaattataaggggttttaaaaagaggtggttaaatatgtgtacatgttaatagtgtgatcaagccaagaaggaggcctttgtctttgactggaggactcagaggaattttaattttgaaactcgctgattcacagcatagtcacgctcaagttcattagcacatttaaatggcagttttgtttcctcttctaagagtttacagtaaggtaaagaactcaaacttcctttcagagcaagtagactttttttttttttgcaagttgacttttttgacttttgaagccaaagggaggtcgaaactgcggtgattggacaacatagttaattaatgattgagtaatcatcttagctgccttcattctatttaggtttttcctgctctgtgctgacgataaagccctcctttacagatttgtactgtggattaaaatgtcatgccacgcggtttcgaaa

SEQ ID NO: 280979 - DNA, 256 bp, Homo sapiens
aaagaacgttggtatgacatgatatggtagaaaatgaggcctttattgttttatcatatcaaaataagctctttggatggtttcatatcaactcttgttttgtattgttttgtttttttcagtcactaatgacagatgaaaccattgctaatgtgcctatactgattcttgggaataagatcgacagacctgaagccatcagtgaagagaggttgcgagagatgtttggtttatatggtcagacaacaggaaaggt

SEQ ID NO: 280980 - DNA, 1255 bp, Homo sapiens
acccgccggcccggaaggggctgatgcgaactggggccacggcagccatcgcgctttgcagttcggtctcctggtgtacggccaacgccaagtaggggattgcgttccctccagtcgcagaccctatcagatttggatatgtccttcatatttgattggatttacagtggtttcagcagtgtgctacagtttttaggattatataagaaaactggtaaactggtatttcttggattggataatgcaggaaaaacaacattgctacacatgctaaaagatgacagacttggacaacatgtcccaacattacatcccacttccgaagaactgaccattgctggcatgacgtttacaacttttgatctgggtggacatgttcaagctcgaagagtgtggaaaaactaccttcctgctatcaatggcattgtatttctggtggattgtgcagaccacgaaaggctgttagagtcaaaagaagaacttgattcactaatgacagatgaaaccattgctaatgtgcctatactgattcttgggaataagatcgacagacctgaagccatcagtgaagagaggttgcgagagatgtttggtttatatggtcagacaacaggaaaggggagtatatctctgaaagaactgaatgcccgacccttagaagttttcatgtgtagtgtgctcaaaagacaaggttacggagaaggcttccgctggatggcacagtacattgattaacacaaactcacattggttccaggtctcaacgttcaggcttactcagagatttgattgctcaacatgcataacttgaattcaatagacttttgctggttataaaacagatgttttttagattattaatattaaatcaacttaatttgaatgagaattgaaaactgattcaagtaagtttgagtatcacaatgttagctttctaattccataaaagtacttggtttttacagtttataatctgacatcaccccagcgccatttgtaaagagcaactttccagcagtacatttgaagcactttttaacaacatgaaactataaaccatatttaaaagctcatcatgttaaattttttatgtacttttctggaactagtttttaaattttagattatatgtccacctatcttaagtgtacagttaataattagcttattcaatgattgcatgatgccttacagttttcaataactttttttcttatgcaaacgtcatgcaataaaacaaactctaatgtttggc

SEQ ID NO: 280981 - DNA, 1851 bp, Homo sapiens
acccgccggcccggaaggggctgatgcgaactggggccacggcagccatcgcgctttgcagttcggtctcctggtgtacggccaacgccaagtaggggattgcgttccctccagtcgcagaccctatcagatttggatatgtccttcatatttgattggatttacagtggtttcagcagtgtgctacagtttttaggattatataagaaaactggtaaactggtatttcttggattggataatgcaggaaaaacaacattgctacacatgctaaaagatgacagacttggacaacatgtcccaacattacatcccacttccgaagaactgaccattgctggcatgacgtttacaacttttgatctgggtggacatgttcaagctcgaagagtgtggaaaaactaccttcctgctatcaatggcattgtatttctggtggattgtgcagaccacgaaaggctgttagagtcaaaagaagaacttgattcactaatgacagatgaaaccattgctaatgtgcctatactgattcttgggaataagatcgacagacctgaagccatcagtgaagagaggttgcgagagatgtttggtttatatggtcagacaacaggaaaggggagtatatctctgaaagaactgaatgcccgacccttagaagttttcatgtgtagtgtgctcaaaagacaaggttacggagaaggcttccgctggatggcacagtacattgattaacacaaactcacattggttccaggtctcaacgttcaggcttactcagagatttgattgctcaacatgcataacttgaattcaatagacttttgctggttataaaacagatgttttttagattattaatattaaatcaacttaatttgaatgagaattgaaaactgattcaagtaagtttgagtatcacaatgttagctttctaattccataaaagtacttggtttttacagtttataatctgacatcaccccagcgccatttgtaaagagcaactttccagcagtacatttgaagcactttttaacaacatgaaactataaaccatatttaaaagctcatcatgttaaattttttatgtacttttctggaactagtttttaaattttagattatatgtccacctatcttaagtgtacagttaataattagcttattcaatgattgcatgatgccttacagttttcaataactttttttcttatgcaaacgtcatgcaataaaacaaactctaatgtttggcatccttgttgggcaaatgtttcatttaaatgtgtcttatctagctagtatactctgaaaatttgagtatttaatattaggcatatgaagtggttgttgggaaaggagattccttcagaatatttagaatagcgtttaaggctctcaaggcttaggtatttaccatgagatggttgtggtcagttgcacctgataccatgtatccctgaatcatgtgtatttttattagtaatgcagccactaccattgctgatggggtctgtgtcctagtccctgtgggattggccttctgaagaaaagcacatttatggtacacaaggttgattctcagtttggtaggctctatagttccatcccagctgtctaattctgaagtgctccagtcttattggtgcccaatggggtaatctgtgcctcttccccaaaagcaatgacaggcaccagtgtctccacatttagatatattcccagtctctgtacatttaacagtactctctggggcaagcaataagtaggaccttgtgtgcagtttcattgtagagacatgtatatctgaggaataaaacagcttgttctgtgtcagtctgaaaaaaaaaa

SEQ ID NO: 280982 - DNA, 2450 bp, Homo sapiens
  misc_feature (175)..(175): n is a, c, g, or t
  misc_feature (225)..(225): n is a, c, g, or t
  misc_feature (234)..(234): n is a, c, g, or t
tggtccaatatacaggtgtgtggtattatgcacgagacaatggtttgtttgggaggccgtggatggataggtgtctggcaatgcaaagtgttgcagtggcttcaggaagaaagctactagaaggcattggttatagctgggttctgagaagcaggtaatggcattcggggagcangaccactatgaagcgaaggtgtcactgattagaggccacaggtggtctantaagagtcngcccagatccctgagaaccaccatagttagactgtccagagactggattcaaagtctttgctggtattggatgagggtaggatcctggaagctggaaattgtatccttggctcactgactcttgtgaagacacaatgcattttgacagaccgttggtgtagggagaccccgaggccaaggcggctccgttctgggcctggaggctggctggggcgccgccggaggccggtattcccggctgggacatgatgactgggttggaaggggctggtcggggtcgacaacagcgcacaagaagagagctgaaagaccactgctgaaagcggagggaggaggctaacgacttaagactgaagactgggagaagaggggggggcgcattaagcccgaggcatggcgccgcactctccccaggccaccggcggccacagcctagcctgggagctgaggcttgagagtcgggccggcggggccgcgaacgcccggctagaaggcggcagccaaacctagagagaaggagggaggccctggccggaagtgcctgtcagccgccggccgcgcagccgcaatcaggacacgtggcacttccggctccgggctcgcagcagccgccgccgcgccggcgaactcttctctgccagccgggctgccccgaggccacctgacagctcctggtgccccgaccccgacgaccgtgcccggcctcgccgccacgtcaccgactctcacggccggccggaagtgccgtgtgtcaccgctacggaaattcccgccgttgtgaacgtgacctcgctcgcagagccaggatcgtggggcaatctgagattcagtagccgctttcgtggggtgggactgacagttcctctcctcgggttttgtgaagattacctgagaccatagaagtcatcgtcctctgttgagaccgtaccaccactgggagctggggcggttaatgttcatcgcagtatttcattcacatttcgtcttcgtgtttcagatgtaaattataaggggttttaaaaagaggtggttaaatatgtgtacatgttaatagtgtgatcaagccaagaaggaggcctttgtctttgactggaggactcagaggaattttaattttgaaactcgctgattcacagcatagtcacgctcaagttcattagcacatttaaatggcagttttgtttcctcttctaagagtttacagtaaggaaaaacaacattgctacacatgctaaaagatgacagacttggacaacatgtcccaacattacatcccacttccgaagaactgaccattgctggcatgacgtttacaacttttgatctgggtggacatgttcaagctcgaagagtgtggaaaaactaccttcctgctatcaatggcattgtatttctggtggattgtgcagaccacgaaaggctgttagagtcaaaagaagaacttgattcactaatgacagatgaaaccattgctaatgtgcctatactgattcttgggaataagatcgacagacctgaagccatcagtgaagagaggttgcgagagatgtttggtttatatggtcagacaacaggaaaggggagtatatctctgaaagaactgaatgcccgacccttagaagttttcatgtgtagtgtgctcaaaagacaaggttacggagaaggcttccgctggatggcacagtacattgattaacacaaactcacattggttccaggtctcaacgttcaggcttactcagagatttgattgctcaacatgcataacttgaattcaatagacttttgctggttataaaacagatgttttttagattattaatattaaatcaacttaatttgaatgagaattgaaaactgattcaagtaagtttgagtatcacaatgttagctttctaattccataaaagtacttggtttttacagtttataatctgacatcaccccagcgccatttgtaaagagcaactttccagcagtacatttgaagcactttttaacaacatgaaactataaaccatatttaaaagctcatcatgttaaattttttatgtacttttctggaactagtttttaaattttagattatatgtccacctatcttaagtgtacagttaataattagcttattcaatgattgcatgatgccttacagttttcaataactttttttcttatgcaaacgtcatgcaataaaacaaactctaatgtttggc

SEQ ID NO: 280983 - DNA, 1931 bp, Homo sapiens
acccgccggcccggaaggggctgatgcgaactggggccacggcagccatcgcgctttgcagttcggtctcctggtgtacggccaacgccaagtaggggattgcgttccctccagtcgcagagtttccctcttgtcgcccaggctggagtgaagtggcacgatctcggcttactgcaagctccgcctcccgggttcacgccattctcctgcctcagcctcccgagtagctgggactacagaccctatcagatttggatatgtccttcatatttgattggatttacagtggtttcagcagtgtgctacagtttttaggattatataagaaaactggtaaactggtatttcttggattggataatgcaggaaaaacaacattgctacacatgctaaaagatgacagacttggacaacatgtcccaacattacatcccacttccgaagaactgaccattgctggcatgacgtttacaacttttgatctgggtggacatgttcaagctcgaagagtgtggaaaaactaccttcctgctatcaatggcattgtatttctggtggattgtgcagaccacgaaaggctgttagagtcaaaagaagaacttgatctgattcttgggaataagatcgacagacctgaagccatcagtgaagagaggttgcgagagatgtttggtttatatggtcagacaacaggaaaggggagtatatctctgaaagaactgaatgcccgacccttagaagttttcatgtgtagtgtgctcaaaagacaaggttacggagaaggcttccgctggatggcacagtacattgattaacacaaactcacattggttccaggtctcaacgttcaggcttactcagagatttgattgctcaacatgcataacttgaattcaatagacttttgctggttataaaacagatgttttttagattattaatattaaatcaacttaatttgaatgagaattgaaaactgattcaagtaagtttgagtatcacaatgttagctttctaattccataaaagtacttggtttttacagtttataatctgacatcaccccagcgccatttgtaaagagcaactttccagcagtacatttgaagcactttttaacaacatgaaactataaaccatatttaaaagctcatcatgttaaattttttatgtacttttctggaactagtttttaaattttagattatatgtccacctatcttaagtgtacagttaataattagcttattcaatgattgcatgatgccttacagttttcaataactttttttcttatgcaaacgtcatgcaataaaacaaactctaatgtttggcatccttgttgggcaaatgtttcatttaaatgtgtcttatctagctagtatactctgaaaatttgagtatttaatattaggcatatgaagtggttgttgggaaaggagattccttcagaatatttagaatagcgtttaaggctctcaaggcttaggtatttaccatgagatggttgtggtcagttgcacctgataccatgtatccctgaatcatgtgtatttttattagtaatgcagccactaccattgctgatggggtctgtgtcctagtccctgtgggattggccttctgaagaaaagcacatttatggtacacaaggttgattctcagtttggtaggctctatagttccatcccagctgtctaattctgaagtgctccagtcttattggtgcccaatggggtaatctgtgcctcttccccaaaagcaatgacaggcaccagtgtctccacatttagatatattcccagtctctgtacatttaacagtactctctggggcaagcaataagtaggaccttgtgtgcagtttcattgtagagacatgtatatctgaggaataaaacagcttgttctgtgtcagtctgaaaaaaaaaa

SEQ ID NO: 280984 - DNA, 6652 bp, Homo sapiens
ctttcaaataaggtgttgatttatgtggtcttgagaaatctttgttgctctgatcttaagtttctttttataatattagaatcatagtttacctacattacagggcttttatgaagattaaatcgagcatcgtgggtagtgttttttcagcccctgtgactaagtaggttataaatggtcctcagtcatcatcatcataaatgattcaaggcctgaatggcagaagaagaagaggaaaactcaagtgaaaagtgctagacatagaacacagcttacctaataaaacatgctactggctaactaagctggggtggctttctgccccctctacttaaatttaagaaagaaaaacagaaacgtctctgcatctgccactgcataccctctcagagcacagaccaactttgcccttccttaaaagtcccagggtttacctaccaacttttaggaaataaataaccagcctcaaagcttggcaaagagggcatcagtatcagctctagaggtttgctccgatttatatctcctcctccagtaaagtcttctgctcccactcccagccaaccccgctcaacgcccacccctcactgcggcactggacgcgcgggggatgcggggttgttcccagagtagccgctaaggggagccggacgctagaccgccctcccgcgttcccatgacaacgacaccggcgggcgcgtagcctggagagcgaagtgccggctacagcaggtgtcggattgcagtgcgctcgctgaggctccggaccttggagcgtctagagtctggctactgttcctccgcctccctctcgggcagctccctaagccggctgggacgcgcagagtgaaaatggtccaccattcaggctccattcagtcctttaaacagcaaaaaggtatgaatataagcaagagtgagataacaaaagaaacttcgttaaaaccgtctcggagatccctgccttgcctcgcccagagctacgcttactcaaagagcttgagccagtctacttccctcttccagtcaaccgagagtgaatctcaggctcccacatctataaccttaatctccactgacaaagcagagcaagttaatactgaggagaataaaaacgactctgtgctgagatgttcatttgctgacctcagcgatttttgtttggccctaggaaaagataaggattacacggatgaatcagaacacgctacttatgaccgatctcgtctcattaatgactttgttatcaaagataaatctgaattcaagacaaaattatctaagaatgacatgaattacatagcatccagtggacctctgttcaaagatggcaaaaggagaattgattacatcttggtttatagaaagacaaatataccatatgataaaagaaacacatttgaaaagaacctcagagcagaaggcttgatgttggagaaggagccagctattgcaagccccgatatcatgtttattaaaattcacattccatgggacacgctgtgcaagtatgcagagaggctgaatatcaggatgcccttcaggaaaaaatgctattacactgacgggaggagcaaatcaatgggcaggatgcaaacttattttagaagaatcaaagactggatggcccaaaacccaatggttcttgacaagtcagcttttccagacctagaggagtcagactgctatactggccccttcagccgtgcacggattcaccacttcataataaataataaagacaccttcttcagcaatgctactcgaagcagaatagtctatcacatgctggaacgcaccaaatatgaaaatggaatatcaaaagtgggtatccgtaaacttataaacaatggctcatacatagcagcgtttccaccacatgagggagcctacaaaagtagccagcccattaaaacccatggacctcagaataacagacatctattatatgagcgctgggcacgctggggaatgtggtataagcatcagcctctggatttaatcaggctgtactttggtgagaagattggactatactttgcttggctgggatggtatactggaatgttgattcctgcagcaattgttggtttgtgcgttttcttctatggattatttacaatgaataatagtcaagtaagccaagaaatttgtaaagccactgaagtctttatgtgccctctctgtgacaagaactgctccctgcagagactcaacgacagctgtatctatgccaaggtgacatatttgttcgataatggagggacagtcttctttgctatttttatggcaatatgggccacagtcttcctggagttttggaaaaggagaaggagtatactgacctatacttgggaccttatcgaatgggaagaagaggaggaaacacttcgtccccagtttgaagccaagtattacaagatggagattgtaaatcccatcacgggaaaacctgaaccacatcagccttcctcagacaaagtcactcgtcttcttgtttctgtctcaggaatattcttcatgatatccttggtgatcactgcagtgtttggagttgtggtgtaccgcctggttgtcatggaacagtttgcatcattcaagtggaatttcatcaaacaatactggcagtttgcaacatctgctgctgctgtctgtatcaatttcataatcattatgttgctgaatcttgcttatgaaaaaattgcttacctcctcaccaatttagaatatcctcgaacagaatcagagtgggaaaacagcttcgccctgaagatgttcctcttccagtttgtcaatttaaacagttccatcttctatatcgctttctttttgggaagatttgtaggccacccaggaaaatacaataaactttttgaccggtggagactggaggaatgtcatcctagtggctgtttgatagacctctgcctccagatgggtgtcatcatgtttttgaagcaaatatggaacaacttcatggaactaggatacccgttgatccagaactggtggtcacgacataaaatcaagcggggaatacatgatgcttccatacctcagtgggaaaatgattggaatctgcagcccatgaaccttcatggactgatggatgagtacttagaaatggttttgcaatttggttttaccaccatctttgttgcggcttttcctctagcccctcttttggctttgttaaacaatatcattgaaatcaggctggatgcatacaaatttgtcactcaatggcggaggcctttgccagcccgagcaactgacataggtatctggcttggaattctcgaaggaatcggtatattggctgtgatcaccaatgcatttgtaattgctattacttctgattacatcccacgttttgtttatgaatacaaatatggcccctgtgcaaatcatgtagaaccaagtgaaaattgcttgaagggatatgtcaacaatagcctatccttctttgacctgagtgagcttggtatgggaaaatctggttattgcaggtacagagactacagaggcccgccttggagttccaaaccctatgagtttactttacaatactggcatatccttgctgctagattggccttcattattgtgtttgagcaccttgtttttgggattaagtcattcatcgcatacctgattccagacgtaccaaagggtctacatgaccgaatacgacgagagaagtacttagttcaagaaatgatgtatgaggctgaactggaacatttgcaacaacaacggagaaaaagtggtcagcctgttcaccatgaatggccttagttgacacctgttacccattaggggtgataacattaatgggaagaaatgatggcaactttgaatgctaggtgaaatctaggaggaaggcatacttggcaaaccacatgtataatatgctacttggaaatgtatcacagccatctctgggatttgaaatatccagacttgtagggaagaaaacaatgacttgacgaccttaaaaagggttagattgacattgcaggaagccaggatgtaattctcagaaccagtctcagggagatatatgcttggagaactctgccttccatcaactgcagtgtaatgggaaagagggtggtgaggttttgaaagacagatttccatgtaaatgtgcacaagccaggcatggcttaaaatatcatgcagtcttcactcacatactaatttgactttggaaagtatggttgagttcagatacttataagaaatgacttaaacaaatccttgccttggctgccagaactctacatcccttcagtttacaggttggtaggaattgcccatgtctcttgctgagattatggatctgtgccacaggggatttatgctgctttacattgactatgcagttgaagagttgcacatcacctttagtggtcaaaccaaaaatctaagattccaaaaagaacagcattcattgaaataatattccattgcattggctacttcaagtctcttttacccctggcagagccagttgcagtgcaattttttgtactaaatgccaataaagccacatacttataaactatgaatggctattcttatatagtttagaacacaactaatccatactttattgtggaaggctgttttatagtatatttaattttttctctatgatttattacaactctcacggaatattaacttgaaatgctgtaaatacgttggttttccttgtccctttgcaccttgacagtacgtagtatacattgtggtttatgcagctctgacaccagtttttgctattgtaatatgtttattcgggaaaactgaggccagatgctctgcaacacttacgctttttcaacaatgtgcactcttactcatgaactaatgaaaataatgcatgaatataaatctatattatttgctaaaaaaagaaaaaacatttgtgttttagtttcttttttcatgactgaagggagttttatgttattatttcttccatagttttgttttggtttatttttaacaacgctctagaaacaaagtcaaattaatcacaaaagacataattttgctttgttgtggaatttctatttcaacgtcaactctgtatctatgagtatgtctgttccacagacagatgaggcaggagtgatggggcactcaagaaagttcagaggaggcataagctatggaggttggaaaggaagaaagagaagagctgaagtaaatgtatggtagaaattaagacgtttctttgcaaaacaaggaaatcacacatatgcacacatacatatttatggttactatgattgttattatttgtccaatcaagcaaagcaccattatttctaacatataaaagaccagatcaaacacaatggaaataaagctactacatatatatgccagtatttctctagtaagattatgtttctcttactagaaaactattttctaaatattaacactgaaaatgttttgttagcttttccttctttctctccagaagaaacatggatagatgatagctgtttcattgtttgtttttgtcaagcatattcactttcctccttgtcctctgattctgagcaaagggcctcagactctgaacttccctcaagtgccgttgttatgtgaactcttccattcagattccagagaggttctcatgctccccccccctccttatttgtagcaatcgtagcaactaattccactaagtacaagggagttttttacactcctccatttttatagcatctgcatttttttttctttgttaggtacatgtatacacctgcctgagtataaatactctctctacctaataataacatcaaccaacatcttttccaaattagggccacagaacagcaacatttgtctgacagtagtataaagaataatgatagctctatccttaagaagtatttcctttcctttttatatagtcccgttagggtttaaaaccatattgatcaactagaaagaaaaatatgaaaagagaaaaatattttaatttaaaaattgtaatacattgatttataaaatgccttctctgatacttttgaaacagatgtgaaaaacagaaaaagaaaaaattgtctgaaatgtttattttgcaaaacagtgcaatagaatctagttatgccttcatcactgttgacagtaaatactgacagccccttgcagtgtgttagttttagatcactctgttttagttgagagaaatgttttatatcatggtttttatatgaatacaaattatttctcaaagatttatagcacacactattctcaggaattctgtattacatgaatgctgcttatatattttcatattctaacttgtcttttcaagcaaataactaatatatatgtgcatgcagtctgccttgacaagttgttccaagctgaagagctttcactgtacaatgtgtggaaaatcaccatagatcatggctgaaatagtttgtaattgtctgagtctgtgcacgtacttttagataaaatgctgctgagtgactgcatgatgagatacaacttctgaatgctgcacattcttccaaaatgatccttagcacaatctattgtatgatggaatgaatagaaaactttttcactcaataaattattatttgatatggtaaaaaaaaaa

SEQ ID NO: 280985 - DNA, 2710 bp, Homo sapiens
ctttcaaataaggtgttgatttatgtggtcttgagaaatctttgttgctctgatcttaagtttctttttataatattagaatcatagtttacctacattacagggcttttatgaagattaaatcgagcatcgtgggtagtgttttttcagcccctgtgactaagtaggttataaatggtcctcagtcatcatcatcataaatgattcaaggcctgaatggcagaagaagaagaggaaaactcaagtgaaaagtgctagacatagaacacagcttacctaataaaacatgctactggctaactaagctggggtggctttctgccccctctacttaaatttaagaaagaaaaacagaaacgtctctgcatctgccactgcataccctctcagagcacagaccaactttgcccttccttaaaagtcccagggtttacctaccaacttttaggaaataaataaccagcctcaaagcttggcaaagagggcatcagtatcagctctagaggtttgctccgatttatatctcctcctccagtaaagtcttctgctcccactcccagccaaccccgctcaacgcccacccctcactgcggcactggacgcgcgggggatgcggggttgttcccagagtagccgctaaggggagccggacgctagaccgccctcccgcgttcccatgacaacgacaccggcgggcgcgtagcctggagagcgaagtgccggctacagcaggtgtcggattgcagtgcgctcgctgaggctccggaccttggagcgtctagagtctggctactgttcctccgcctccctctcgggcagctccctaagccggctgggacgcgcagagtgaaaatggtccaccattcaggctccattcagtcctttaaacagcaaaaaggtatgaatataagcaagagtgagataacaaaagaaacttcgttaaaaccgtctcggagatccctgccttgcctcgcccagagctacgcttactcaaagagcttgagccagtctacttccctcttccagtcaaccgagagtgaatctcaggctcccacatctataaccttaatctccactgacaaagcagagcaagttaatactgaggagaataaaaacgactctgtgctgagatgttcatttgctgacctcagcgatttttgtttggccctaggaaaagataaggattacacggatgaatcagaacacgctacttatgaccgatctcgtctcattaatgactttgttatcaaagataaatctgaattcaagacaaaattatctaagaatgacatgaattacatagcatccagtggacctctgttcaaagatggcaaaaggagaattgattacatcttggtttatagaaagacaaatataccatatgataaaagaaacacatttgaaaagaacctcagagcagaaggcttgatgttggagaaggagccagctattgcaagccccgatatcatgtttattaaaattcacattccatgggacacgctgtgcaagtatgcagagaggctgaatatcaggatgcccttcaggaaaaaatgctattacactgacgggaggagcaaatcaatgggcaggatgcaaacttattttagaagaatcaaagactggatggcccaaaacccaatggttcttgacaagtcagcttttccagacctagaggagtcagactgctatactggccccttcagccgtgcacggattcaccacttcataataaataataaagacaccttcttcagcaatgctactcgaagcagaatagtctatcacatgctggaacgcaccaaatatgaaaatggaatatcaaaagtgggtatccgtaaacttataaacaatggctcatacatagcagcgtttccaccacatgagggagcctacaaaagtagccagcccattaaaacccatggacctcagaataacagacatctattatatgagcgctgggcacgctggggaatgtggtataagcatcagcctctggatttaatcaggctgtactttggtgagaagattggactatactttgcttggctgggatggtatactggaatgttgattcctgcagcaattgttggtttgtgcgttttcttctatggattatttacaatgaataatagtcaagtaagccaagaaatttgtaaagccactgaagtctttatgtgccctctctgtgacaagaactgctccctgcagagactcaacgacagctgtatctatgccaaggtgacatatttgttcgataatggagggacagtcttctttgctatttttatggcaatatggggtaagtactttcttcattactttctatcccttattttctgaagctgtttctgtgttacacacacacacacacacacacacacacacacacacacacaccatgaatcaattcaaaaataaagcctctaggttggtacttgatttgtttgctctcttcatatattcagtgcttctttaggaatttaactcttgatctcatcctctaatctctaaaacctagactttcctacatcaaggaacatattttttctaccaaaggaaggtggtaattaaaaacaaactgaaacatactagaatccaaattaatcttcttatattattgattatgaaactgatgctcagtaaaaagttgtttgatatttccattcatcttttttaaccttatggttcatacatttagggatgcagaatc

SEQ ID NO: 280986 - DNA, 431 bp, Homo sapiens
caacattgttcattgttgtactgttttataattagcatttcagaatctttgaaaactgtccttttcacatttaaatttgcagcaccttgtttttgggattaagtcattcatcgcatacctgattccagacgtaccaaagggtctacatgaccgaatacgacgagagaagtacttagttcaagaaatgatgtatgaggctgaactggaacatttgcaacaacaacggagaaaaagtggtcagcctgttcaccatgaatggccttagttgacacctgttacccattaggggtgataacattaatgggaagaaatgatggcaactttgaatgctaggtgaaatctaggaggaaggcatacttggcaaaccacatgtataatatgctacttggaaatgtatcacagccatctctgggatttgaaatatccagact

SEQ ID NO: 280987 - DNA, 2500 bp, Homo sapiens
ctttcaaataaggtgttgatttatgtggtcttgagaaatctttgttgctctgatcttaagtttctttttataatattagaatcatagtttacctacattacagggcttttatgaagattaaatcgagcatcgtgggtagtgttttttcagcccctgtgactaagtaggttataaatggtcctcagtcatcatcatcataaatgattcaaggcctgaatggcagaagaagaagaggaaaactcaagtgaaaagtgctagacatagaacacagcttacctaataaaacatgctactggctaactaagctggggtggctttctgccccctctacttaaatttaagaaagaaaaacagaaacgtctctgcatctgccactgcataccctctcagagcacagaccaactttgcccttccttaaaagtcccagggtttacctaccaacttttaggaaataaataaccagcctcaaagcttggcaaagagggcatcagtatcagctctagaggtttgctccgatttatatctcctcctccagtaaagtcttctgctcccactcccagccaaccccgctcaacgcccacccctcactgcggcactggacgcgcgggggatgcggggttgttcccagagtagccgctaaggggagccggacgctagaccgccctcccgcgttcccatgacaacgacaccggcgggcgcgtagcctggagagcgaagtgccggctacagcaggtgtcggattgcagtgcgctcgctgaggctccggaccttggagcgtctagagtctggctactgttcctccgcctccctctcgggcagctccctaagccggctgggacgcgcagagtgaaaatggtccaccattcaggctccattcagtcctttaaacagcaaaaaggtatgaatataagcaagagtgagataacaaaagaaacttcgttaaaaccgtctcggagatccctgccttgcctcgcccagagctacgcttactcaaagagcttgagccagtctacttccctcttccagtcaaccgagagtgaatctcaggctcccacatctataaccttaatctccactgacaaagcagagcaagttaatactgaggagaataaaaacgactctgtgctgagatgttcatttgctgacctcagcgatttttgtttggccctaggaaaagataaggattacacggatgaatcagaacacgctacttatgaccgatctcgtctcattaatgactttgttatcaaagataaatctgaattcaagacaaaattatctaagaatgacatgaattacatagcatccagtggacctctgttcaaagatggcaaaaggagaattgattacatcttggtttatagaaagacaaatataccatatgataaaagaaacacatttgaaaagaacctcagagcagaaggcttgatgttggagaaggagccagctattgcaagccccgatatcatgtttattaaaattcacattccatgggacacgctgtgcaagtatgcagagaggctgaatatcaggatgcccttcaggaaaaaatgctattacactgacgggaggagcaaatcaatgggcaggatgcaaacttattttagaagaatcaaagactggatggcccaaaacccaatggttcttgacaagtcagcttttccagacctagaggagtcagactgctatactggccccttcagccgtgcacggattcaccacttcataataaataataaagacaccttcttcagcaatgctactcgaagcagaatagtctatcacatgctggaacgcaccaaatatgaaaatggaatatcaaaagtgggtatccgtaaacttataaacaatggctcatacatagcagcgtttccaccacatgagggagcctacaaaagtagccagcccattaaaacccatggacctcagaataacagacatctattatatgagcgctgggcacgctggggaatgtggtataagcatcagcctctggatttaatcaggctgtactttggtgagaagattggactatactttgcttggctgggatggtatactggaatgttgattcctgcagcaattgttggtttgtgcgttttcttctatggattatttacaatgaataatagtcaagtaagccaagaaatttgtaaagccactgaagtctttatgtgccctctctgtgacaagaactgctccctgcagagactcaacgacagctgtatctatgccaaggtgacatatttgttcgataatggagggacagtcttctttgctatttttatggcaatatggggcaatgcagtgaacattggcatcctcatttaattaaaaccactgtgcccaggtgaagtattgaaaatagattttacctggttcatttctgtcgtcataaagtcgccgatgggaaaatgaatccgttttcctttttccacacaacaagtagcccacaagagtaagcaatgagacacccagaatagcacctaaaatggccccg

SEQ ID NO: 280988 - DNA, 6125 bp, Homo sapiens
cgcgctgtgtgtgtgtgtgagtggagagtgagtgcgggacctgaggctgtgtgtgtgtgaactgtggccactggcggggtcgggggggggcagcggcggagccgcctcggacgataaggaaattgagatttggagaagttaaataaccaagacttcacaggcaaagccatgactacagtagtggtacatgtggactccaaagctgagctcactaccctgctggagcagtgggaaaaggaacatggcagtgggcaggacatggtacctatccttaccaggatgtctcaattgattgaaaaagaaactgaagagtatcgtaaaggggatccagacccatttgatgatcgacatcctggtcgagctgatccagagtgtatgctgggccacttgctgagaatactcttcaagaatgatgatttcatgaatgcactggtgaatgcatatgtgatgacaagccgagagccccctttaaacactgcagcttgcagactcctattagacatcatgccagggctggaaactgctgtcgtctttcaagaaaaggagggaattgtcgagaatcttttcaaatgggcccgagaggccgatcaaccattgaggacatattctactggactgttaggaggtgctatggaaaatcaagacattgctgccaactatagagatgaaaattcacagctggtggcaatagtgcttcgaagactgagggagctacagctacaggaagtggctttgcggcaggaaaacaagcgtcccagtccacggaagctctcttctgaaccccttttgcctctggatgaggaggctgtggatatggactatggtgacatggctgtagatgtagtggatggagaccaagaggaagcttctggagacatggagatctcctttcatcttgattcaggccacaagactagtagcagagtgaactcaacaaccaaacctgaggatggaggattaaagaaaaacaagtcagcaaaacagggtgacagagagaactttaggaaagccaagcaaaagttgggtttctcatcttctgatccagatcgcatgtttgttgagctgtctaatagcagttggtcagaaatgtctccctgggtgattggcaccaattataccctttatcctatgactcctgctatcgagcagcgactcattctccaatatttgacccctctaggagaatatcaggagctacttcccatattcatgcaacttggatcacgggagctgatgatgttctatattgacctgaagcaaactaatgatgtcctgcttacatttgaggcactaaagcacctagcatctctcctgctccataacaaatttgccacagaatttgttgcgcatggtggagtacagaaattactggaaatacctcgtccttctatggctgcaaccggtgtgtctatgtgtttgtattacctatcctacaatcaggatgccatggaaagagtttgcatgcatccccacaatgttctgtctgatgtggtgaactataccctgtggttaatggagtgttctcatgcttcaggatgctgccatgctaccatgtttttttcaatttgcttctcatttcgggccgtcttggagctctttgaccgctatgatggtcttcgtcgtctggtgaacttgatcagtactttggagattctaaatttggaagatcagggtgcacttctgagtgatgatgaaatatttgctagccgccaaactgggaaacatacctgcatggccttgcgcaaatactttgaggctcacctggccattaaattggaacaagtgaagcagtcacttcagaggactgagggtggcattcttgtccacccacaacccccgtacaaggcatgctcatatactcatgaacagattgtggaaatgatggaatttttgatagaatatggcccagcgcagctatattgggaaccagctgaagttttcctcaaactttcttgtgtgcaactcttgttgcagcttatttctattgcctgcaattggaagacctattatgcaaggaatgacactgtgcgctttgctttggatgtcctggctattcttactgtggtgccaaaaatccagctccagttggcagaatcagtggacgtgttggatgaggctggatctacagtctctactgtaggtatcagcattattttgggagtggctgagggtgagttcttcatccatgatgctgaaattcagaagtcagcacttcagattatcatcaattgtgtgtgtggcccagataaccgaatatccagtattggtaaatttatctctggtactcctcggagaaagctgcctcagaaccctaaaagcagtgagcacaccctggccaagatgtggaatgtggttcagtccaacaacggcatcaaggtgctcctgtccttactgtccattaagatgcccatcacagatgcagaccaaatccgggccctggcctgcaaagccctagtgggcctgtctcgcagtagcactgtccggcagatcatcagtaaactgccccttttcagcagctgccagatccagcagctgatgaaggagcctgtgctgcaggacaagcgcagtgaccatgtcaagttctgcaagtatgctgctgaactcattgaacgggtgtcaggaaaaccacttctcattggcactgatgtttccctagcacgactgcagaaagcagatgttgttgcccagtcaaggatctccttccctgagaaagagctgcttttgttgatacgaaaccatcttatttctaaagggcttggagaaacagcaaccgtgctgacaaaagaggctgacctgcccatgactgctgcctcccattcttctgcctttaccccagtcactgctgctgcttctcctgtctctctaccccgaacccctcgtatcgctaatggcattgcaactcgtctgggcagccatgctgctgtgggtgcctctgcgccttctgcccctactgctcatcctcagccacggcccccccagggtccgctagctctgcccggcccatcttatgcaggcaactcccctttgattggtagaatcagttttatcagagagaggccatcaccctgcaatggcaggaaaatcagagtgttgcggcagaagtcggaccatggtgcctacagccaaagcccagccataaaaaaacagctggacagacatcttccttccccacctacgctggacagtataatcacagagtatcttagagaacaacatgctcgctgcaagaatccagttgccacctgcccacctttctccctctttactcctcaccaatgtcctgagccaaaacagaggcggcaagcgccaataaactttacgtcaaggctaaaccgcagggcatcatttccaaagtatggaggggtggatggcggatgctttgataggcaccttatctttagcagattccgtcctatttcagtgttccgggaagccaatgaagatgagagtggcttcacctgctgtgcattctcagcacgggagcggttcctgatgcttggcacctgcacagggcagctgaagctctataatgtgtttagtggacaggaggaggccagctataactgtcacaactcagccatcacacatcttgaaccttccagggatgggtccttgctgctgacatctgctacttggagccagcctttgtctgcactttggggaatgaagtcagtatttgatatgaagcattccttcacagaagatcactatgttgagttcagtaagcactcccaggatcgggtcatcggcacaaaaggagacattgcccacatttatgatattcagactggcaacaagctgttgactctgtttaacccagatcttgccaacaactacaagaggaactgtgccacctttaatcctacagatgatcttgtcttaaatgatggcgtcctctgggatgtccgctctgcacaggccatccacaagtttgacaagttcaatatgaacatcagtggtgttttccatccaaatggactggaggtgatcattaatactgagatttgggaccttcgaacttttcatcttttgcatactgttcccgctctggatcagtgtcgcgtggtgttcaatcacacgggaacagtgatgtatggagctatgttgcaggcagatgatgaagatgacttaatggaagagaggatgaaaagcccctttgggtcatccttccgaacatttaatgcaactgactacaaacctatagcaaccattgatgtgaaacggaacatctttgacctgtgtacagacaccaaagactgctatcttgctgtcattgagaatcaaggcagcatggatgccctgaacatggacacagtatgcaggctgtatgaagtgggcaggcagcgtctggcagaggatgaggatgaagaggaggaccaggaagaggaagaacaggaggaagaagatgatgatgaagatgatgatgacaccgatgatttagatgagcttgacactgaccagttgctggaggcggagttggaggaggacgacaataatgagaacgcaggggaagatggggacaatgacttctctccctctgatgaggagctagcaaaccttctagaggagggagaggacggggaggatgaagactctgatgcagatgaggaggtggaactgatcctgggggacactgacagctctgacaactctgatttggaagatgacatcatcttatctctgaatgagtgaggagccatcactgcttggaagagattcttggcagagagaagaggggacaaatttggttgtgaagtaaacaagaaacacaagacggctaaaactctccaggggcaggtaaagccctgctgggctcagaagcactatagaatttgctgtacacactgaagtgggtctgtgtcacacaggtatttcttggtcctctggagagcagaggactcactcagctctttgcttcatgcctcgctttaatggtagtaaacacttaaccagtggaatagtctgactgctggtactgatggcatcagaagaaaacaggttaacaatcaagtagtgaaagcactatattctagtcattaactcaacggagccagtctcaactctgctgggagcacccacaggtctctgtgggggagacagggactataacagggaggcagaattcaggttggcttgacaacacaccttaggaacatgtgctaaggggctaaggaggcatcagctgtcttccttattctaccagggctgaaaatcggagtcacttaggaggcagcatgagaacagtggcacaccaccagtgaggcacatgttgcctttttgtctttaagcaacaccttagacagggcctgaaccctgggtgggggcactggatgcctgaagtaagtaagttttctcagtggggcagtctcataaaatcaccaggacattgaccacctgacctcccctaactagtgctggccaaggcctgagagttcacagaacctgctaggtcttaagagccaaaggaaggaagtggttgagggccaggaaagagaaggaatgtcatgccagggtgttactcctcaccaaaacttggcagttctttttggggccatgggacacctttctctgaagaggggttggataaggcaaaggttgaagtgtcttctctaggcacgttttctagcatgtttccttttacttggttctgtctcacaaagctgggaggtagatgattcttccgggtcctgagcacctgcttcatgaaggaagataggtagcccagagaagaagttttggacttaacaacataccaaggcagctctggcctgtgactcaggcgtttgttggagagctgcaggaaaaccactgcagtgtgcctgcaacaggacaagacccactcctgtttctggcggtaccagctaccctggaatggtggcgtgtcctgctgtacccaactgacttgcttaggtacctggcagctgtgaccacagctcaagtaaaaaaacaaaaacaggcaaataaataaacatgcttaacatgtctttgtgttgctgttttgttatgaacgtgcttgctctcttgcgaggcacctgtccattccacatcaccgaggggtctacgagagcactgccaagtgttcctgtggaccagcatgacctctccacagcctgcagtgagcccca

SEQ ID NO: 280989 - DNA, 7041 bp, Homo sapiens
gggcggagccgcctcggacgataaggaaattgagatttggagaagttaaataaccaagacttcacagacaaagtctcactccttttgcccaggccggtgtgcattggggtaatctcggctgactgcaacctccgtcccctccgagttcaagtgattctcctgcctcaacctcccgagtagctgggattacaggcaaagccatgactacagtagtggtacatgtggactccaaagctgagctcactaccctgctggagcagtgggaaaaggaacatggcagtgggcaggacatggtacctatccttaccaggatgtctcaattgattgaaaaagaaactgaagagtatcgtaaaggggatccagacccatttgatgatcgacatcctggtcgagctgatccagagtgtatgctgggccacttgctgagaatactcttcaagaatgatgatttcatgaatgcactggtgaatgcatatgtgatgacaagccgagagccccctttaaacactgcagcttgcagactcctattagacatcatgccagggctggaaactgctgtcgtctttcaagaaaaggagggaattgtcgagaatcttttcaaatgggcccgagaggccgatcaaccattgaggacatattctactggactgttaggaggtgctatggaaaatcaagacattgctgccaactatagagatgaaaattcacagctggtggcaatagtgcttcgaagactgagggagctacagctacaggaagtggctttgcggcaggaaaacaagcgtcccagtccacggaagctctcttctgaaccccttttgcctctggatgaggaggctgtggatatggactatggtgacatggctgtagatgtagtggatggagaccaagaggaagcttctggagacatggagatctcctttcatcttgattcaggccacaagactagtagcagagtgaactcaacaaccaaacctgaggatggaggattaaagaaaaacaagtcagcaaaacagggtgacagagagaactttaggaaagccaagcaaaagttgggtttctcatcttctgatccagatcgcatgtttgttgagctgtctaatagcagttggtcagaaatgtctccctgggtgattggcaccaattataccctttatcctatgactcctgctatcgagcagcgactcattctccaatatttgacccctctaggagaatatcaggagctacttcccatattcatgcaacttggatcacgggagctgatgatgttctatattgacctgaagcaaactaatgatgtcctgcttacatttgaggcactaaagcacctagcatctctcctgctccataacaaatttgccacagaatttgttgcgcatggtggagtacagaaattactggaaatacctcgtccttctatggctgcaaccggtgtgtctatgtgtttgtattacctatcctacaatcaggatgccatggaaagagtttgcatgcatccccacaatgttctgtctgatgtggtgaactataccctgtggttaatggagtgttctcatgcttcaggatgctgccatgctaccatgtttttttcaatttgcttctcatttcgggccgtcttggagctctttgaccgctatgatggtcttcgtcgtctggtgaacttgatcagtactttggagattctaaatttggaagatcagggtgcacttctgagtgatgatgaaatatttgctagccgccaaactgggaaacatacctgcatggccttgcgcaaatactttgaggctcacctggccattaaattggaacaagtgaagcagtcacttcagaggactgagggtggcattcttgtccacccacaacccccgtacaaggcatgctcatatactcatgaacagattgtggaaatgatggaatttttgatagaatatggcccagcgcagctatattgggaaccagctgaagttttcctcaaactttcttgtgtgcaactcttgttgcagcttatttctattgcctgcaattggaagacctattatgcaaggaatgacactgtgcgctttgctttggatgtcctggctattcttactgtggtgccaaaaatccagctccagttggcagaatcagtggacgtgttggatgaggctggatctacagtctctactgtaggtatcagcattattttgggagtggctgagggtgagttcttcatccatgatgctgaaattcagaagtcagcacttcagattatcatcaattgtgtgtgtggcccagataaccgaatatccagtattggtaaatttatctctggtactcctcggagaaagctgcctcagaaccctaaaagcagtgagcacaccctggccaagatgtggaatgtggttcagtccaacaacggcatcaaggtgctcctgtccttactgtccattaagatgcccatcacagatgcagaccaaatccgggccctggcctgcaaagccctagtgggcctgtctcgcagtagcactgtccggcagatcatcagtaaactgccccttttcagcagctgccagatccagcagctgatgaaggagcctgtgctgcaggacaagcgcagtgaccatgtcaagttctgcaagtatgctgctgaactcattgaacgggtgtcaggaaaaccacttctcattggcactgatgtttccctagcacgactgcagaaagcagatgttgttgcccagtcaaggatctccttccctgagaaagagctgcttttgttgatacgaaaccatcttatttctaaagggcttggagaaacagcaaccgtgctgacaaaagaggctgacctgcccatgactgctgcctcccattcttctgcctttaccccagtcactgctgctgcttctcctgtctctctaccccgaacccctcgtatcgctaatggcattgcaactcgtctgggcagccatgctgctgtgggtgcctctgcgccttctgcccctactgctcatcctcagccacggcccccccagggtccgctagctctgcccggcccatcttatgcaggcaactcccctttgattggtagaatcagttttatcagagagaggccatcaccctgcaatggcaggaaaatcagagtgttgcggcagaagtcggaccatggtgcctacagccaaagcccagccataaaaaaacagctggacagacatcttccttccccacctacgctggacagtataatcacagagtatcttagagaacaacatgctcgctgcaagaatccagttgccacctgcccacctttctccctctttactcctcaccaatgtcctgagccaaaacagaggcggcaagcgccaataaactttacgtcaaggctaaaccgcagggcatcatttccaaagtatggaggggtggatggcggatgctttgataggcaccttatctttagcagattccgtcctatttcagtgttccgggaagccaatgaagatgagagtggcttcacctgctgtgcattctcagcacgggagcggttcctgatgcttggcacctgcacagggcagctgaagctctataatgtgtttagtggacaggaggaggccagctataactgtcacaactcagccatcacacatcttgaaccttccagggatgggtccttgctgctgacatctgctacttggagccagcctttgtctgcactttggggaatgaagtcagtatttgatatgaagcattccttcacagaagatcactatgttgagttcagtaagcactcccaggatcgggtcatcggcacaaaaggagacattgcccacatttatgatattcagactggcaacaagctgttgactctgtttaacccagatcttgccaacaactacaagaggaactgtgccacctttaatcctacagatgatcttgtcttaaatgatggcgtcctctgggatgtccgctctgcacaggccatccacaagtttgacaagttcaatatgaacatcagtggtgttttccatccaaatggactggaggtgatcattaatactgagatttgggaccttcgaacttttcatcttttgcatactgttcccgctctggatcagtgtcgcgtggtgttcaatcacacgggaacagtgatgtatggagctatgttgcaggcagatgatgaagatgacttaatggaagagaggatgaaaagcccctttgggtcatccttccgaacatttaatgcaactgactacaaacctatagcaaccattgatgtgaaacggaacatctttgacctgtgtacagacaccaaagactgctatcttgctgtcattgagaatcaaggcagcatggatgccctgaacatggacacagtatgcaggctgtatgaagtgggcaggcagcgtctggcagaggatgaggatgaagaggaggaccaggaagaggaagaacaggaggaagaagatgatgatgaagatgatgatgacaccgatgatttagatgagcttgacactgaccagttgctggaggcggagttggaggaggacgacaataatgagaacgcaggggaagatggggacaatgacttctctccctctgatgaggagctagcaaaccttctagaggagggagaggacggggaggatgaagactctgatgcagatgaggaggtggaactgatcctgggggacactgacagctctgacaactctgatttggaagatgacatcatcttatctctgaatgagtgaggagccatcactgcttggaagagattcttggcaggcgagaaactgagtcaaatgaattcagaacatattcccttctctttctcccagggctgtctgtcttttaaggagctgcatgccctgcattcagaagattatggcttagagagcctcattggcacccgagggtccttccagaatcaataaccaccacaaaaatgacaacagggactaggccctactctgcaccccccacatccaccccccaccatttcctaggatggacatatctttcaaggggaaaaaaaaaccatgtctctggggtatttcacaatatattttctttgtatagtgttctttacttaaagaacaagaaatagttttttataaaactttaaaaaggaaaaaaaaacaggcatttataactgagggtatgaacttatatccaccaggtctcttgtccctgcacttcattttctttggaagaaaatgatgtctaaagaacaatatagaggcatttttacatacgtatttaaatgaaaaggaaaatcgtggtttcttaaattgataaggattaagaatattttattataaatataatatatgattttttaacctgttttgttgcctcatatgctgtcaggttaatttgttttccttcgtgccagaggtggggaggaaggcactctgtctgctgggtaaatgcctaaattcactcaccttcatggtttgggggcagcatggtcattgtggatattggttttgtggagttgagggaacttaggatataagttcactccctctatttttctttgtgattcagtttttcaaaaatctttttttcttccctttctccccattgtggaaattacaaatcaaaggcctttttctttaatgtaaagtgtatttatttaaaaaaaatacaaaataaactacaagtctgtctttgttatggcctttccctattttcttttaccgaagtggggtgtgtcccttttttgcagctctagccaggccatagagaagacaccttccaggagaggcaaggagagcatgttctgcccacatagagcactccagggagagagaagaggggacaaatttggttgtgaagtaaacaagaaacacaagacggctaaaactctccaggggcaggtaaagccctgctgggctcagaagcactatagaatttgctgtacacactgaagtgggtctgtgtcacacaggtatttcttggtcctctggagagcagaggactcactcagctctttgcttcatgcctcgctttaatggtagtaaacacttaaccagtggaatagtctgactgctggtactgatggcatcagaagaaaacaggttaacaatcaagtagtgaaagcactatattctagtcattaactcaacggagccagtctcaactctgctgggagcacccacaggtctctgtgggggagacagggactataacagggaggcagaattcaggttggcttgacaacacaccttaggaacatgtgctaaggggctaaggaggcatcagctgtcttccttattctaccagggctgaaaatcggagtcacttaggaggcagcatgagaacagtggcacaccaccagtgaggcacatgttgcctttttgtctttaagcaacaccttagacagggcctgaaccctgggtgggggcactggatgcctgaagtaagtaagttttctcagtggggcagtctcataaaatcaccaggacattgaccacctgacctcccctaactagtgctggccaaggcctgagagttcacagaacctgctaggtcttaagagccaaaggaaggaagtggttgagggccaggaaagagaaggaatgtcatgccagggtgttactcctcaccaaaacttggcagttctttttggggccatgggacacctttctctgaagaggggttggataaggcaaaggttgaagtgtcttctctaggcacgttttctagcatgtttccttttacttggttctgtctcacaaagctgggaggtagatgattcttccgggtcctgagcacctgcttcatgaaggaagataggtagcccagagaagaagttttggacttaacaacataccaaggcagctctggcctgtgactcaggcgtttgttggagagctgcaggaaaaccactgcagtgtgcctgcaacaggacaagacccactcctgtttctggcggtaccagctaccctggaatggtggcgtgtcctgctgtacccaactgacttgcttaggtacctggcagctgtgaccacagctcaagtaaaaaaacaaaaacaggcaaataaataaacatgcttaacatgt

SEQ ID NO: 280990 - DNA, 5926 bp, Homo sapiens
gggcggagccgcctcggacgataaggaaattgagatttggagaagttaaataaccaagacttcacagacaaagtctcactccttttgcccaggccggtgtgcattggggtaatctcggctgactgcaacctccgtcccctccgagttcaagtgattctcctgcctcaacctcccgagtagctgggattacaggcaaagccatgactacagtagtggtacatgtggactccaaagctgagctcactaccctgctggagcagtgggaaaaggaacatggcagtgggcaggacatggtacctatccttaccaggatgtctcaattgattgaaaaagaaactgaagagtatcgtaaaggggatccagacccatttgatgatcgacatcctggtcgagctgatccagagtgtatgctgggccacttgctgagaatactcttcaagaatgatgatttcatgaatgcactggtgaatgcatatgtgatgacaagccgagagccccctttaaacactgcagcttgcagactcctattagacatcatgccagggctggaaactgctgtcgtctttcaagaaaaggagggaattgtcgagaatcttttcaaatgggcccgagaggccgatcaaccattgaggacatattctactggactgttaggaggtgctatggaaaatcaagacattgctgccaactatagagatgaaaattcacagctggtggcaatagtgcttcgaagactgagggagctacagctacaggaagtggctttgcggcaggaaaacaagcgtcccagtccacggaagctctcttctgaaccccttttgcctctggatgaggaggctgtggatatggactatggtgacatggctgtagatgtagtggatggagaccaagaggaagcttctggagacatggagatctcctttcatcttgattcaggccacaagactagtagcagagtgaactcaacaaccaaacctgaggatggaggattaaagaaaaacaagtcagcaaaacagggtgacagagagaactttaggaaagccaagcaaaagttgggtttctcatcttctgatccagatcgcatgtttgttgagctgtctaatagcagttggtcagaaatgtctccctgggtgattggcaccaattataccctttatcctatgactcctgctatcgagcagcgactcattctccaatatttgacccctctaggagaatatcaggagctacttcccatattcatgcaacttggatcacgggagctgatgatgttctatattgacctgaagcaaactaatgatgtcctgcttacatttgaggcactaaagcacctagcatctctcctgctccataacaaatttgccacagaatttgttgcgcatggtggagtacagaaattactggaaatacctcgtccttctatggctgcaaccggtgtgtctatgtgtttgtattacctatcctacaatcaggatgccatggaaagagtttgcatgcatccccacaatgttctgtctgatgtggtgaactataccctgtggttaatggagtgttctcatgcttcaggatgctgccatgctaccatgtttttttcaatttgcttctcatttcgggccgtcttggagctctttgaccgctatgatggtcttcgtcgtctggtgaacttgatcagtactttggagattctaaatttggaagatcagggtgcacttctgagtgatgatgaaatatttgctagccgccaaactgggaaacatacctgcatggccttgcgcaaatactttgaggctcacctggccattaaattggaacaagtgaagcagtcacttcagaggactgagggtggcattcttgtccacccacaacccccgtacaaggcatgctcatatactcatgaacagattgtggaaatgatggaatttttgatagaatatggcccagcgcagctatattgggaaccagctgaagttttcctcaaactttcttgtgtgcaactcttgttgcagcttatttctattgcctgcaattggaagacctattatgcaaggaatgacactgtgcgctttgctttggatgtcctggctattcttactgtggtgccaaaaatccagctccagttggcagaatcagtggacgtgttggatgaggctggatctacagtctctactgtaggtatcagcattattttgggagtggctgagggtgagttcttcatccatgatgctgaaattcagaagtcagcacttcagattatcatcaattgtgtgtgtggcccagataaccgaatatccagtattggtaaatttatctctggtactcctcggagaaagctgcctcagaaccctaaaagcagtgagcacaccctggccaagatgtggaatgtggttcagtccaacaacggcatcaaggtgctcctgtccttactgtccattaagatgcccatcacagatgcagaccaaatccgggccctggcctgcaaagccctagtgggcctgtctcgcagtagcactgtccggcagatcatcagtaaactgccccttttcagcagctgccagatccagcagctgatgaaggagcctgtgctgcaggacaagcgcagtgaccatgtcaagttctgcaagtatgctgctgaactcattgaacgggtgtcaggaaaaccacttctcattggcactgatgtttccctagcacgactgcagaaagcagatgttgttgcccagtcaaggatctccttccctgagaaagagctgcttttgttgatacgaaaccatcttatttctaaagggcttggagaaacagcaaccgtgctgacaaaagaggctgacctgcccatgactgctgcctcccattcttctgcctttaccccagtcactgctgctgcttctcctgtctctctaccccgaacccctcgtatcgctaatggcattgcaactcgtctgggcagccatgctgctgtgggtgcctctgcgccttctgcccctactgctcatcctcagccacggcccccccagggtccgctagctctgcccggcccatcttatgcaggcaactcccctttgattggtagaatcagttttatcagagagaggccatcaccctgcaatggcaggaaaatcagagtgttgcggcagaagtcggaccatggtgcctacagccaaagcccagccataaaaaaacagctggacagacatcttccttccccacctacgctggacagtataatcacagagtatcttagagaacaacatgctcgctgcaagaatccagttgccacctgcccacctttctccctctttactcctcaccaatgtcctgagccaaaacagaggcggcaagcgccaataaactttacgtcaaggctaaaccgcagggcatcatttccaaagtatggaggggtggatggcggatgctttgataggcaccttatctttagcagattccgtcctatttcagtgttccgggaagccaatgaagatgagagtggcttcacctgctgtgcattctcagcacgggagcggttcctgatgcttggcacctgcacagggcagctgaagctctataatgtgtttagtggacaggaggaggccagctataactgtcacaactcagccatcacacatcttgaaccttccagggatgggtccttgctgctgacatctgctacttggagccagcctttgtctgcactttggggaatgaagtcagtatttgatatgaagcattccttcacagaagatcactatgttgagttcagtaagcactcccaggatcgggtcatcggcacaaaaggagacattgcccacatttatgatattcagactggcaacaagctgttgactctgtttaacccagatcttgccaacaactacaagaggaactgtgccacctttaatcctacagatgatcttgtcttaaatgatggcgtcctctgggatgtccgctctgcacaggccatccacaagtttgacaagttcaatatgaacatcagtggtgttttccatccaaatggactggaggtgatcattaatactgagatttgggaccttcgaacttttcatcttttgcatactgttcccgctctggatcagtgtcgcgtggtgttcaatcacacgggaacagtgatgtatggagctatgttgcaggcagatgatgaagatgacttaatggaagagaggatgaaaagcccctttgggtcatccttccgaacatttaatgcaactgactacaaacctatagcaaccattgatgtgaaacggaacatctttgacctgtgtacagacaccaaagactgctatcttgctgtcattgagaatcaaggcagcatggatgccctgaacatggacacagtatgcaggctgtatgaagtgggcaggcagcgtctggcagaggatgaggatgaagaggaggaccaggaagaggaagaacaggaggaagaagatgatgatgaagatgatgatgacaccgatgatttagatgagcttgacactgaccagttgctggaggcggagttggaggaggacgacaataatgagaacgcaggggaagatggggacaatgacttctctccctctgatgaggagctagcaaaccttctagaggagggagaggacggggaggatgaagactctgatgcagatgaggaggtggaactgatcctgggggacactgacagctctgacaactctgatttggaagatgacatcatcttatctctgaatgagtgaggagccatcactgcttggaagagattcttggcaggcgagaaactgagtcaaatgaattcagaacatattcccttctctttctcccagggctgtctgtcttttaaggagctgcatgccctgcattcagaagattatggcttagagagcctcattggcacccgagggtccttccagaatcaataaccaccacaaaaatgacaacagggactaggccctactctgcaccccccacatccaccccccaccatttcctaggatggacatatctttcaaggggaaaaaaaaaccatgtctctggggtatttcacaatatattttctttgtatagtgttctttacttaaagaacaagaaatagttttttataaaactttaaaaaggaaaaaaaaacaggcatttataactgagggtatgaacttatatccaccaggtctcttgtccctgcacttcattttctttggaagaaaatgatgtctaaagaacaatatagaggcatttttacatacgtatttaaatgaaaaggaaaatcgtggtttcttaaattgataaggattaagaatattttattataaatataatatatgattttttaacctgttttgttgcctcatatgctgtcaggttaatttgttttccttcgtgccagaggtggggaggaaggcactctgtctgctgggtaaatgcctaaattcactcaccttcatggtttgggggcagcatggtcattgtggatattggttttgtggagttgagggaacttaggatataagttcactccctctatttttctttgtgattcagtttttcaaaaatctttttttcttccctttctccccattgtggaaattacaaatcaaaggcctttttctttaatgtaaagtgtatttatttaaaaaaaatacaaaataaactacaagtctgtctttgttatggcctttccctattttcttttaccgaagtggggtgtgtcccttttttgcagctctagccaggccatagagaagacaccttccaggagaggcaaggagagcatgttctgcccacatagagcactccagggaggaaagtagcttatactcacagtgtctgcccctgccgtgtagctctctcatggggagggcctgtttttgtaagggtaatgtggagagagaggtcagggctttgttccctgtggacgcagctctctgttgtcatgttctggatc

SEQ ID NO: 280991 - DNA, 5598 bp, Homo sapiens
gggcggagccgcctcggacgataaggaaattgagatttggagaagttaaataaccaagacttcacagacaaagtctcactccttttgcccaggccggtgtgcattggggtaatctcggctgactgcaacctccgtcccctccgagttcaagtgattctcctgcctcaacctcccgagtagctgggattacaggcaaagccatgactacagtagtggtacatgtggactccaaagctgagctcactaccctgctggagcagtgggaaaaggaacatggcagtgggcaggacatggtacctatccttaccaggatgtctcaattgattgaaaaagaaactgaagagtatcgtaaaggggatccagacccatttgatgatcgacatcctggtcgagctgatccagagtgtatgctgggccacttgctgagaatactcttcaagaatgatgatttcatgaatgcactggtgaatgcatatgtgatgacaagccgagagccccctttaaacactgcagcttgcagactcctattagacatcatgccagggctggaaactgctgtcgtctttcaagaaaaggagggaattgtcgagaatcttttcaaatgggcccgagaggccgatcaaccattgaggacatattctactggactgttaggaggtgctatggaaaatcaagacattgctgccaactatagagatgaaaattcacagctggtggcaatagtgcttcgaagactgagggagctacagctacaggaagtggctttgcggcaggaaaacaagcgtcccagtccacggaagctctcttctgaaccccttttgcctctggatgaggaggctgtggatatggactatggtgacatggctgtagatgtagtggatggagaccaagaggaagcttctggagacatggagatctcctttcatcttgattcaggccacaagactagtagcagagtgaactcaacaaccaaacctgaggatggaggattaaagaaaaacaagtcagcaaaacagggtgacagagagaactttaggaaagccaagcaaaagttgggtttctcatcttctgatccagatcgcatgtttgttgagctgtctaatagcagttggtcagaaatgtctccctgggtgattggcaccaattataccctttatcctatgactcctgctatcgagcagcgactcattctccaatatttgacccctctaggagaatatcaggagctacttcccatattcatgcaacttggatcacgggagctgatgatgttctatattgacctgaagcaaactaatgatgtcctgcttacatttgaggcactaaagcacctagcatctctcctgctccataacaaatttgccacagaatttgttgcgcatggtggagtacagaaattactggaaatacctcgtccttctatggctgcaaccggtgtgtctatgtgtttgtattacctatcctacaatcaggatgccatggaaagagtttgcatgcatccccacaatgttctgtctgatgtggtgaactataccctgtggttaatggagtgttctcatgcttcaggatgctgccatgctaccatgtttttttcaatttgcttctcatttcgggccgtcttggagctctttgaccgctatgatggtcttcgtcgtctggtgaacttgatcagtactttggagattctaaatttggaagatcagggtgcacttctgagtgatgatgaaatatttgctagccgccaaactgggaaacatacctgcatggccttgcgcaaatactttgaggctcacctggccattaaattggaacaagtgaagcagtcacttcagaggactgagggtggcattcttgtccacccacaacccccgtacaaggcatgctcatatactcatgaacagattgtggaaatgatggaatttttgatagaatatggcccagcgcagctatattgggaaccagctgaagttttcctcaaactttcttgtgtgcaactcttgttgcagcttatttctattgcctgcaattggaagacctattatgcaaggaatgacactgtgcgctttgctttggatgtcctggctattcttactgtggtgccaaaaatccagctccagttggcagaatcagtggacgtgttggatgaggctggatctacagtctctactgtaggtatcagcattattttgggagtggctgagggtgagttcttcatccatgatgctgaaattcagaagtcagcacttcagattatcatcaattgtgtgtgtggcccagataaccgaatatccagtattggtaaatttatctctggtactcctcggagaaagctgcctcagaaccctaaaagcagtgagcacaccctggccaagatgtggaatgtggttcagtccaacaacggcatcaaggtgctcctgtccttactgtccattaagatgcccatcacagatgcagaccaaatccgggccctggcctgcaaagccctagtgggcctgtctcgcagtagcactgtccggcagatcatcagtaaactgccccttttcagcagctgccagatccagcagctgatgaaggagcctgtgctgcaggacaagcgcagtgaccatgtcaagttctgcaagtatgctgctgaactcattgaacgggtgtcaggaaaaccacttctcattggcactgatgtttccctagcacgactgcagaaagcagatgttgttgcccagtcaaggatctccttccctgagaaagagctgcttttgttgatacgaaaccatcttatttctaaagggcttggagaaacagcaaccgtgctgacaaaagaggctgacctgcccatgactgctgcctcccattcttctgcctttaccccagtcactgctgctgcttctcctgtctctctaccccgaacccctcgtatcgctaatggcattgcaactcgtctgggcagccatgctgctgtgggtgcctctgcgccttctgcccctactgctcatcctcagccacggcccccccagggtccgctagctctgcccggcccatcttatgcaggcaactcccctttgattggtagaatcagttttatcagagagaggccatcaccctgcaatggcaggaaaatcagagtgttgcggcagaagtcggaccatggtgcctacagccaaagcccagccataaaaaaacagctggacagacatcttccttccccacctacgctggacagtataatcacagagtatcttagagaacaacatgctcgctgcaagaatccagttgccacctgcccacctttctccctctttactcctcaccaatgtcctgagccaaaacagaggcggcaagcgccaataaactttacgtcaaggctaaaccgcagggcatcatttccaaagtatggaggggtggatggcggatgctttgataggcaccttatctttagcagattccgtcctatttcagtgttccgggaagccaatgaagatgagagtggcttcacctgctgtgcattctcagcacgggagcggttcctgatgcttggcacctgcacagggcagctgaagctctataatgtgtttagtggacaggaggaggccagctataactgtcacaactcagccatcacacatcttgaaccttccagggatgggtccttgctgctgacatctgctacttggagccagcctttgtctgcactttggggaatgaagtcagtatttgatatgaagcattccttcacagaagatcactatgttgagttcagtaagcactcccaggatcgggtcatcggcacaaaaggagacattgcccacatttatgatattcagactggcaacaagctgttgactctgtttaacccagatcttgccaacaactacaagaggaactgtgccacctttaatcctacagatgatcttgtcttaaatgatggcgtcctctgggatgtccgctctgcacaggccatccacaagtttgacaagttcaatatgaacatcagtggtgttttccatccaaatggactggaggtgatcattaatactgagatttgggaccttcgaacttttcatcttttgcatactgttcccgctctggatcagtgtcgcgtggtgttcaatcacacgggaacagtgatgtatggagctatgttgcaggcagatgatgaagatgacttaatggaagagaggatgaaaagcccctttgggtcatccttccgaacatttaatgcaactgactacaaacctatagcaaccattgatgtgaaacggaacatctttgacctgtgtacagacaccaaagactgctatcttgctgtcattgagaatcaaggcagcatggatgccctgaacatggacacagtatgcaggctgtatgaagtgggcaggcagcgtctggcagaggatgaggatgaagaggaggaccaggaagaggaagaacaggaggaagaagatgatgatgaagatgatgatgacaccgatgatttagatgagcttgacactgaccagttgctggaggcggagttggaggaggacgacaataatgagaacgcaggggaagatggggacaatgacttctctccctctgatgaggagctagcaaaccttctagaggagggagaggacggggaggatgaagactctgatgcagatgaggaggtggaactgatcctgggggacactgacagctctgacaactctgatttggaagatgacatcatcttatctctgaatgagtgaggagccatcactgcttggaagagattcttggcaggcgagaaactgagtcaaatgaattcagaacatattcccttctctttctcccagggctgtctgtcttttaaggagctgcatgccctgcattcagaagattatggcttagagagcctcattggcacccgagggtccttccagaatcaataaccaccacaaaaatgacaacagggactaggccctactctgcaccccccacatccaccccccaccatttcctaggatggacatatctttcaaggggaaaaaaaaaccatgtctctggggtatttcacaatatattttctttgtatagtgttctttacttaaagaacaagaaatagttttttataaaactttaaaaaggaaaaaaaaacaggcatttataactgagggtatgaacttatatccaccaggtctcttgtccctgcacttcattttctttggaagaaaatgatgtctaaagaacaatatagaggcatttttacatacgtatttaaatgaaaaggaaaatcgtggtttcttaaattgataaggattaagaatattttattataaatataatatatgattttttaacctgttttgttgcctcatatgctgtcaggttaatttgttttccttcgtgccagaggtggggaggaaggcactctgtctgctgggtaaatgcctaaattcactcaccttcatggtttgggggcagcatggtcattgtggatattggttttgtggagttgagggaatctacgattttactccaccgccttcacctattctttgggattcattcctgatagtaaatatagcctttctcatcaatctccattgtgtggtctattaccctctcaaactcactattcac

SEQ ID NO: 280992 - DNA, 5196 bp, Homo sapiens
gggcggatcgtgtcaccacaaccccgtacaaggcatgctcatatactcatgaacagattgtggaaatgatggaatttttgatagaatatggcccagcgcagctatattgggaaccagctgaagttttcctcaaactttcttgtgtgcaactcttgttgcagcttatttctattgcctgcaattggaagacctattatgcaaggaatgacactgtgcgctttgctttggatgtcctggctattcttactgtggtgccaaaaatccagctccagttggcagaatcagtggacgtgttggatgaggctggatctacagtctctactgtaggtatcagcattattttgggagtggctgagggtgagttcttcatccatgatgctgaaattcagaagtcagcacttcagattatcatcaattgtgtgtgtggcccagataaccgaatatccagtattggtaaatttatctctggtactcctcggagaaagctgcctcagaaccctaaaagcagtgagcacaccctggccaagatgtggaatgtggttcagtccaacaacggcatcaaggtgctcctgtccttactgtccattaagatgcccatcacagatgcagaccaaatccgggccctggcctgcaaagccctagtgggcctgtctcgcagtagcactgtccggcagatcatcagtaaactgccccttttcagcagctgccagatccagcagctgatgaaggagcctgtgctgcaggacaagcgcagtgaccatgtcaagttctgcaagtatgctgctgaactcattgaacgggtgtcaggaaaaccacttctcattggcactgatgtttccctagcacgactgcagaaagcagatgttgttgcccagtcaaggatctccttccctgagaaagagctgcttttgttgatacgaaaccatcttatttctaaagggcttggagaaacagcaaccgtgctgacaaaagaggctgacctgcccatgactgctgcctcccattcttctgcctttaccccagtcactgctgctgcttctcctgtctctctaccccgaacccctcgtatcgctaatggcattgcaactcgtctgggcagccatgctgctgtgggtgcctctgcgccttctgcccctactgctcatcctcagccacggcccccccagggtccgctagctctgcccggcccatcttatgcaggcaactcccctttgattggtagaatcagttttatcagagagaggccatcaccctgcaatggcaggaaaatcagagtgttgcggcagaagtcggaccatggtgcctacagccaaagcccagccataaaaaaacagctggacagacatcttccttccccacctacgctggacagtataatcacagagtatcttagagaacaacatgctcgctgcaagaatccagttgccacctgcccacctttctccctctttactcctcaccaatgtcctgagccaaaacagaggcggcaagcgccaataaactttacgtcaaggctaaaccgcagggcatcatttccaaagtatggaggggtggatggcggatgctttgataggcaccttatctttagcagattccgtcctatttcagtgttccgggaagccaatgaagatgagagtggcttcacctgctgtgcattctcagcacgggagcggttcctgatgcttggcacctgcacagggcagctgaagctctataatgtgtttagtggacaggaggaggccagctataactgtcacaactcagccatcacacatcttgaaccttccagggatgggtccttgctgctgacatctgctacttggagccagcctttgtctgcactttggggaatgaagtcagtatttgatatgaagcattccttcacagaagatcactatgttgagttcagtaagcactcccaggatcgggtcatcggcacaaaaggagacattgcccacatttatgatattcagactggcaacaagctgttgactctgtttaacccagatcttgccaacaactacaagaggaactgtgccacctttaatcctacagatgatcttgtcttaaatgatggcgtcctctgggatgtccgctctgcacaggccatccacaagtttgacaagttcaatatgaacatcagtggtgttttccatccaaatggactggaggtgatcattaatactgagatttgggaccttcgaacttttcatcttttgcatactgttcccgctctggatcagtgtcgcgtggtgttcaatcacacgggaacagtgatgtatggagctatgttgcaggcagatgatgaagatgacttaatggaagagaggatgaaaagcccctttgggtcatccttccgaacatttaatgcaactgactacaaacctatagcaaccattgatgtgaaacggaacatctttgacctgtgtacagacaccaaagactgctatcttgctgtcattgagaatcaaggcagcatggatgccctgaacatggacacagtatgcaggctgtatgaagtgggcaggcagcgtctggcagaggatgaggatgaagaggaggaccaggaagaggaagaacaggaggaagaagatgatgatgaagatgatgatgacaccgatgatttagatgagcttgacactgaccagttgctggaggcggagttggaggaggacgacaataatgagaacgcaggggaagatggggacaatgacttctctccctctgatgaggagctagcaaaccttctagaggagggagaggacggggaggatgaagactctgatgcagatgaggaggtggaactgatcctgggggacactgacagctctgacaactctgatttggaagatgacatcatcttatctctgaatgagtgaggagccatcactgcttggaagagattcttggcaggcgagaaactgagtcaaatgaattcagaacatattcccttctctttctcccagggctgtctgtcttttaaggagctgcatgccctgcattcagaagattatggcttagagagcctcattggcacccgagggtccttccagaatcaataaccaccacaaaaatgacaacagggactaggccctactctgcaccccccacatccaccccccaccatttcctaggatggacatatctttcaaggggaaaaaaaaaccatgtctctggggtatttcacaatatattttctttgtatagtgttctttacttaaagaacaagaaatagttttttataaaactttaaaaaggaaaaaaaaacaggcatttataactgagggtatgaacttatatccaccaggtctcttgtccctgcacttcattttctttggaagaaaatgatgtctaaagaacaatatagaggcatttttacatacgtatttaaatgaaaaggaaaatcgtggtttcttaaattgataaggattaagaatattttattataaatataatatatgattttttaacctgttttgttgcctcatatgctgtcaggttaatttgttttccttcgtgccagaggtggggaggaaggcactctgtctgctgggtaaatgcctaaattcactcaccttcatggtttgggggcagcatggtcattgtggatattggttttgtggagttgagggaacttaggatataagttcactccctctatttttctttgtgattcagtttttcaaaaatctttttttcttccctttctccccattgtggaaattacaaatcaaaggcctttttctttaatgtaaagtgtatttatttaaaaaaaatacaaaataaactacaagtctgtctttgttatggcctttccctattttcttttaccgaagtggggtgtgtcccttttttgcagctctagccaggccatagagaagacaccttccaggagaggcaaggagagcatgttctgcccacatagagcactccagggagagagaagaggggacaaatttggttgtgaagtaaacaagaaacacaagacggctaaaactctccaggggcaggtaaagccctgctgggctcagaagcactatagaatttgctgtacacactgaagtgggtctgtgtcacacaggtatttcttggtcctctggagagcagaggactcactcagctctttgcttcatgcctcgctttaatggtagtaaacacttaaccagtggaatagtctgactgctggtactgatggcatcagaagaaaacaggttaacaatcaagtagtgaaagcactatattctagtcattaactcaacggagccagtctcaactctgctgggagcacccacaggtctctgtgggggagacagggactataacagggaggcagaattcaggttggcttgacaacacaccttaggaacatgtgctaaggggctaaggaggcatcagctgtcttccttattctaccagggctgaaaatcggagtcacttaggaggcagcatgagaacagtggcacaccaccagtgaggcacatgttgcctttttgtctttaagcaacaccttagacagggcctgaaccctgggtgggggcactggatgcctgaagtaagtaagttttctcagtggggcagtctcataaaatcaccaggacattgaccacctgacctcccctaactagtgctggccaaggcctgagagttcacagaacctgctaggtcttaagagccaaaggaaggaagtggttgagggccaggaaagagaaggaatgtcatgccagggtgttactcctcaccaaaacttggcagttctttttggggccatgggacacctttctctgaagaggggttggataaggcaaaggttgaagtgtcttctctaggcacgttttctagcatgtttccttttacttggttctgtctcacaaagctgggaggtagatgattcttccgggtcctgagcacctgcttcatgaaggaagataggtagcccagagaagaagttttggacttaacaacataccaaggcagctctggcctgtgactcaggcgtttgttggagagctgcaggaaaaccactgcagtgtgcctgcaacaggacaagacccactcctgtttctggcggtaccagctaccctggaatggtggcgtgtcctgctgtacccaactgacttgcttaggtacctggcagctgtgaccacagctcaagtaaaaaaacaaaaacaggcaaataaataaacatgcttaacatgt

SEQ ID NO: 280993 - DNA, 7003 bp, Homo sapiens
gggcggagccgcctcggacgataaggaaattgagatttggagaagttaaataaccaagacttcacagacaaagtctcactccttttgcccaggccggtgtgcattggggtaatctcggctgactgcaacctccgtcccctccgagttcaagtgattctcctgcctcaacctcccgagtagctgggattacaggcaaagccatgactacagtagtggtacatgtggactccaaagctgagctcactaccctgctggagcagtgggaaaaggaacatggcagtgggcaggacatggtacctatccttaccaggatgtctcaattgattgaaaaagaaactgaagagtatcgtaaaggggatccagacccatttgatgatcgacatcctggtcgagctgatccagagtgtatgctgggccacttgctgagaatactcttcaagaatgatgatttcatgaatgcactggtgaatgcatatgtgatgacaagccgagagccccctttaaacactgcagcttgcagactcctattagacatcatgccagggctggaaactgctgtcgtctttcaagaaaaggagggaattgtcgagaatcttttcaaatgggcccgagaggccgatcaaccattgaggacatattctactggactgttaggaggtgctatggaaaatcaagacattgctgccaactatagagatgaaaattcacagctggtggcaatagtgcttcgaagactgagggagctacagctacaggaagtggctttgcggcaggaaaacaagcgtcccagtccacggaagctctcttctgaaccccttttgcctctggatgaggaggctgtggatatggactatggtgacatggctgtagatgtagtggatggagaccaagaggaagcttctggagacatggagatctcctttcatcttgattcaggccacaagactagtagcagagtgaactcaacaaccaaacctgaggatggaggattaaagaaaaacaagtcagcaaaacagggtgacagagagaactttaggaaagccaagcaaaagttgggtttctcatcttctgatccagatcgcatgtttgttgagctgtctaatagcagttggtcagaaatgtctccctgggtgattggcaccaattataccctttatcctatgactcctgctatcgagcagcgactcattctccaatatttgacccctctaggagaatatcaggagctacttcccatattcatgcaacttggatcacgggagctgatgatgttctatattgacctgaagcaaactaatgatgtcctgcttacatttgaggcactaaagcacctagcatctctcctgctccataacaaatttgccacagaatttgttgcgcatggtggagtacagaaattactggaaatacctcgtccttctatggctgcaaccggtgtgtctatgtgtttgtattacctatcctacaatcaggatgccatggaaagagtttgcatgcatccccacaatgttctgtctgatgtggtgaactataccctgtggttaatggagtgttctcatgcttcaggatgctgccatgctaccatgtttttttcaatttgcttctcatttcgggccgtcttggagctctttgaccgctatgatggtcttcgtcgtctggtgaacttgatcagtactttggagattctaaatttggaagatcagggtgcacttctgagtgatgatgaaatatttgctagccgccaaactgggaaacatacctgcatggccttgcgcaaatactttgaggctcacctggccattaaattggaacaagtgaagcagtcacttcagaggactgagggtggcattcttgtccacccacaacccccgtacaaggcatgctcatatactcatgaacagattgtggaaatgatggaatttttgatagaatatggcccagcgcagctatattgggaaccagctgaagttttcctcaaactttcttgtgtgcaactcttgttgcagcttatttctattgcctgcaattggaagacctattatgcaaggaatgacactgtgcgctttgctttggatgtcctggctattcttactgtggtgccaaaaatccagctccagttggcagaatcagtggacgtgttggatgaggctggatctacagtctctactgtaggtatcagcattattttgggagtggctgagggtgagttcttcatccatgatgctgaaattcagaagtcagcacttcagattatcatcaattgtgtgtgtggcccagataaccgaatatccagtattggtaaatttatctctggtactcctcggagaaagctgcctcagaaccctaaaagcagtgagcacaccctggccaagatgtggaatgtggttcagtccaacaacggcatcaaggtgctcctgtccttactgtccattaagatgcccatcacagatgcagaccaaatccgggccctggcctgcaaagccctagtgggcctgtctcgcagtagcactgtccggcagatcatcagtaaactgccccttttcagcagctgccagatccagcagctgatgaaggagcctgtgctgcaggacaagcgcagtgaccatgtcaagttctgcaagtatgctgctgaactcattgaacgggtgtcaggaaaaccacttctcattggcactgatgtttccctagcacgactgcagaaagcagatgttgttgcccagtcaaggatctccttccctgagaaagagctgcttttgttgatacgaaaccatcttatttctaaagggcttggagaaacagcaaccgtgctgacaaaagaggctgacctgcccatgactgctgcctcccattcttctgcctttaccccagtcactgctgctgcttctcctgtctctctaccccgaacccctcgtatcgctaatggcattgcaactcgtctgggcagccatgctgctgtgggtgcctctgcgccttctgcccctactgctcatcctcagccacggcccccccagggtccgctagctctgcccggcccatcttatgcaggcaactcccctttgattggtagaatcagttttatcagagagaggccatcaccctgcaatggcaggaaaatcagagtgttgcggcagaagtcggaccatggtgcctacagccaaagcccagccataaaaaaacagctggacagacatcttccttccccacctacgctggacagtataatcacagagtatcttagagaacaacatgctcgctgcaagaatccagttgccacctgcccacctttctccctctttactcctcaccaatgtcctgagccaaaacagaggcggcaagcgccaataaactttacgtcaaggctaaaccgcagggcatcatttccaaagtatggaggggtggatggcggatgctttgataggcaccttatctttagcagattccgtcctatttcagtgttccgggaagccaatgaagatgagagtggcttcacctgctgtgcattctcagcacgggagcggttcctgatgcttggcacctgcacagggcagctgaagctctataatgtgtttagtggacaggaggaggccagctataactgtcacaactcagccatcacacatcttgaaccttccagggatgggtccttgctgctgacatctgctacttggagccagcctttgtctgcactttggggaatgaagtcagtatttgatatgaagcattccttcacagaagatcactatgttgagttcagtaagcactcccaggatcgggtcatcggcacaaaaggagacattgcccacatttatgatattcagactggcaacaagctgttgactctgtttaacccagatcttgccaacaactacaagaggaactgtgccacctttaatcctacagatgatcttgtcttaaatgatggcgtcctctgggatgtccgctctgcacaggccatccacaagtttgacaagttcaatatgaacatcagtggtgttttccatccaaatggactggaggtgatcattaatactgagatttgggaccttcgaacttttcatcttttgcatactgttcccgctctggatcagtgtcgcgtggtgttcaatcacacgggaacagtgatgtatggagctatgttgcaggcagatgatgaagatgacttaatggaagagaggatgaaaagcccctttgggtcatccttccgaacatttaatgcaactgactacaaacctatagcaaccattgatgtgaaacggaacatctttgacctgtgtacagacaccaaagactgctatcttgctgtcattgagaatcaaggcagcatggatgccctgaacatggacacagtatgcaggctgtatgaagtgggcaggcagcgtctggcagaggatgaggatgaagaggaggaccaggaagaggaagaacaggaggaagaagatgatgatgaagatgatgatgacaccgatgatttagatgagcttgacactgaccagttgctggaggcggagttggaggaggacgacaataatgagaacgcaggggaagatggggacaatgacttctctccctctgatgaggagctagcaaaccttctagaggagggagaggacggggaggatgaagactctgatgcagatgaggaggtggaactgatcctgggggacactgacagctctgacaactctgatttggaagatgacatcatcttatctctgaatgagtgaggagccatcactgcttggaagagattcttggcaggcgagaaactgagtcaaatgaattcagaacatattcccttctctttctcccagggctgtctgtcttttaaggagctgcatgccctgcattcagaagattatggcttagagagcctcattggcacccgagggtccttccagaatcaataaccaccccccacatccaccccccaccatttcctaggatggacatatctttcaaggggaaaaaaaaaccatgtctctggggtatttcacaatatattttctttgtatagtgttctttacttaaagaacaagaaatagttttttataaaactttaaaaaggaaaaaaaaacaggcatttataactgagggtatgaacttatatccaccaggtctcttgtccctgcacttcattttctttggaagaaaatgatgtctaaagaacaatatagaggcatttttacatacgtatttaaatgaaaaggaaaatcgtggtttcttaaattgataaggattaagaatattttattataaatataatatatgattttttaacctgttttgttgcctcatatgctgtcaggttaatttgttttccttcgtgccagaggtggggaggaaggcactctgtctgctgggtaaatgcctaaattcactcaccttcatggtttgggggcagcatggtcattgtggatattggttttgtggagttgagggaacttaggatataagttcactccctctatttttctttgtgattcagtttttcaaaaatctttttttcttccctttctccccattgtggaaattacaaatcaaaggcctttttctttaatgtaaagtgtatttatttaaaaaaaatacaaaataaactacaagtctgtctttgttatggcctttccctattttcttttaccgaagtggggtgtgtcccttttttgcagctctagccaggccatagagaagacaccttccaggagaggcaaggagagcatgttctgcccacatagagcactccagggagagagaagaggggacaaatttggttgtgaagtaaacaagaaacacaagacggctaaaactctccaggggcaggtaaagccctgctgggctcagaagcactatagaatttgctgtacacactgaagtgggtctgtgtcacacaggtatttcttggtcctctggagagcagaggactcactcagctctttgcttcatgcctcgctttaatggtagtaaacacttaaccagtggaatagtctgactgctggtactgatggcatcagaagaaaacaggttaacaatcaagtagtgaaagcactatattctagtcattaactcaacggagccagtctcaactctgctgggagcacccacaggtctctgtgggggagacagggactataacagggaggcagaattcaggttggcttgacaacacaccttaggaacatgtgctaaggggctaaggaggcatcagctgtcttccttattctaccagggctgaaaatcggagtcacttaggaggcagcatgagaacagtggcacaccaccagtgaggcacatgttgcctttttgtctttaagcaacaccttagacagggcctgaaccctgggtgggggcactggatgcctgaagtaagtaagttttctcagtggggcagtctcataaaatcaccaggacattgaccacctgacctcccctaactagtgctggccaaggcctgagagttcacagaacctgctaggtcttaagagccaaaggaaggaagtggttgagggccaggaaagagaaggaatgtcatgccagggtgttactcctcaccaaaacttggcagttctttttggggccatgggacacctttctctgaagaggggttggataaggcaaaggttgaagtgtcttctctaggcacgttttctagcatgtttccttttacttggttctgtctcacaaagctgggaggtagatgattcttccgggtcctgagcacctgcttcatgaaggaagataggtagcccagagaagaagttttggacttaacaacataccaaggcagctctggcctgtgactcaggcgtttgttggagagctgcaggaaaaccactgcagtgtgcctgcaacaggacaagacccactcctgtttctggcggtaccagctaccctggaatggtggcgtgtcctgctgtacccaactgacttgcttaggtacctggcagctgtgaccacagctcaagtaaaaaaacaaaaacaggcaaataaataaacatgcttaacatgt

SEQ ID NO: 280994 - DNA, 7020 bp, Homo sapiens
gggcggagccgcctcggacgataaggaaattgagatttggagaagttaaataaccaagacttcacagacaaagtctcactccttttgcccaggccggtgtgcattggggtaatctcggctgactgcaacctccgtcccctccgagttcaagtgattctcctgcctcaacctcccgagtagctgggattacaggcaaagccatgactacagtagtggtacatgtggactccaaagctgagctcactaccctgctggagcagtgggaaaaggaacatggcagtgggcaggacatggtacctatccttaccaggatgtctcaattgattgaaaaagaaactgaagagtatcgtaaaggggatccagacccatttgatgatcgacatcctggtcgagctgatccagagtgtatgctgggccacttgctgagaatactcttcaagaatgatgatttcatgaatgcactggtgaatgcatatgtgatgacaagccgagagccccctttaaacactgcagcttgcagactcctattagacatcatgccagggctggaaactgctgtcgtctttcaagaaaaggagggaattgtcgagaatcttttcaaatgggcccgagaggccgatcaaccattgaggacatattctactggactgttaggaggtgctatggaaaatcaagacattgctgccaactatagagatgaaaattcacagctggtggcaatagtgcttcgaagactgagggagctacagctacaggaagtggctttgcggcaggaaaacaagcgtcccagtccacggaagctctcttctgaaccccttttgcctctggatgaggaggctgtggatatggactatggtgacatggctgtagatgtagtggatggagaccaagaggaagcttctggagacatggagatctcctttcatcttgattcaggccacaagactagtagcagagtgaactcaacaaccaaacctgaggatggaggattaaagaaaaacaagtcagcaaaacagggtgacagagagaactttaggaaagccaagcaaaagttgggtttctcatcttctgatccagatcgcatgtttgttgagctgtctaatagcagttggtcagaaatgtctccctgggtgattggcaccaattataccctttatcctatgactcctgctatcgagcagcgactcattctccaatatttgacccctctaggagaatatcaggagctacttcccatattcatgcaacttggatcacgggagctgatgatgttctatattgacctgaagcaaactaatgatgtcctgcttacatttgaggcactaaagcacctagcatctctcctgctccataacaaatttgccacagaatttgttgcgcatggtggagtacagaaattactggaaatacctcgtccttctatggctgcaaccggtgtgtctatgtgtttgtattacctatcctacaatcaggatgccatggaaagagtttgcatgcatccccacaatgttctgtctgatgtggtgaactataccctgtggttaatggagtgttctcatgcttcaggatgctgccatgctaccatgtttttttcaatttgcttctcatttcgggccgtcttggagctctttgaccgctatgatggtcttcgtcgtctggtgaacttgatcagtactttggagattctaaatttggaagatcagggtgcacttctgagtgatgatgaaatatttgctagccgccaaactgggaaacatacctgcatggccttgcgcaaatactttgaggctcacctggccattaaattggaacaagtgaagcagtcacttcagaggactgagggtggcattcttgtccacccacaacccccgtacaaggcatgctcatatactcatgaacagattgtggaaatgatggaatttttgatagaatatggcccagcgcagctatattgggaaccagctgaagttttcctcaaactttcttgtgtgcaactcttgttgcagcttatttctattgcctgcaattggaagacctattatgcaaggaatgacactgtgcgctttgctttggatgtcctggctattcttactgtggtgccaaaaatccagctccagttggcagaatcagtggacgtgttggatgaggctggatctacagtctctactgtaggtatcagcattattttgggagtggctgagggtgagttcttcatccatgatgctgaaattcagaagtcagcacttcagattatcatcaattgtgtgtgtggcccagataaccgaatatccagtattggtaaatttatctctggtactcctcggagaaagctgcctcagaaccctaaaagcagtgagcacaccctggccaagatgtggaatgtggttcagtccaacaacggcatcaaggtgctcctgtccttactgtccattaagatgcccatcacagatgcagaccaaatccgggccctggcctgcaaagccctagtgggcctgtctcgcagtagcactgtccggcagatcatcagtaaactgccccttttcagcagctgccagatccagcagctgatgaaggagcctgtgctgcaggacaagcgcagtgaccatgtcaagttctgcaagtatgctgctgaactcattgaacgggtgtcaggaaaaccacttctcattggcactgatgtttccctagcacgactgcagaaagcagatgttgttgcccagtcaaggatctccttccctgagaaagagctgcttttgttgatacgaaaccatcttatttctaaagggcttggagaaacagcaaccgtgctgacaaaagaggctgacctgcccatgactgctgcctcccattcttctgcctttaccccagtcactgctgctgcttctcctgtctctctaccccgaacccctcgtatcgctaatggcattgcaactcgtctgggcagccatgctgctgtgggtgcctctgcgccttctgcccctactgctcatcctcagccacggcccccccagggtccgctagctctgcccggcccatcttatgcaggcaactcccctttgattggtagaatcagttttatcagagagaggccatcaccctgcaatggcaggaaaatcagagtgttgcggcagaagtcggaccatggtgcctacagccaaagcccagccataaaaaaacagctggacagacatcttccttccccacctacgctggacagtataatcacagagtatcttagagaacaacatgctcgctgcaagaatccagttgccacctgcccacctttctccctctttactcctcaccaatgtcctgagccaaaacagaggcggcaagcgccaataaactttacgtcaaggctaaaccgcagggcatcatttccaaagtatggaggggtggatggcggatgctttgataggcaccttatctttagcagattccgtcctatttcagtgttccgggaagccaatgaagatgagagtggcttcacctgctgtgcattctcagcacgggagcggttcctgatgcttggcacctgcacagggcagctgaagctctataatgtgtttagtggacaggaggaggccagctataactgtcacaactcagccatcacacatcttgaaccttccagggatgggtccttgctgctgacatctgctacttggagccagcctttgtctgcactttggggaatgaagtcagtatttgatatgaagcattccttcacagaagatcactatgttgagttcagtaagcactcccaggatcgggtcatcggcacaaaaggagacattgcccacatttatgatattcagactggcaacaagctgttgactctgtttaacccagatcttgccaacaactacaagaggaactgtgccacctttaatcctacagatgatcttgtcttaaatgatggcgtcctctgggatgtccgctctgcacaggccatccacaagtttgacaagttcaatatgaacatcagtggtgttttccatccaaatggactggagtgggaccttcgaacttttcatcttttgcatactgttcccgctctggatcagtgtcgcgtggtgttcaatcacacgggaacagtgatgtatggagctatgttgcaggcagatgatgaagatgacttaatggaagagaggatgaaaagcccctttgggtcatccttccgaacatttaatgcaactgactacaaacctatagcaaccattgatgtgaaacggaacatctttgacctgtgtacagacaccaaagactgctatcttgctgtcattgagaatcaaggcagcatggatgccctgaacatggacacagtatgcaggctgtatgaagtgggcaggcagcgtctggcagaggatgaggatgaagaggaggaccaggaagaggaagaacaggaggaagaagatgatgatgaagatgatgatgacaccgatgatttagatgagcttgacactgaccagttgctggaggcggagttggaggaggacgacaataatgagaacgcaggggaagatggggacaatgacttctctccctctgatgaggagctagcaaaccttctagaggagggagaggacggggaggatgaagactctgatgcagatgaggaggtggaactgatcctgggggacactgacagctctgacaactctgatttggaagatgacatcatcttatctctgaatgagtgaggagccatcactgcttggaagagattcttggcaggcgagaaactgagtcaaatgaattcagaacatattcccttctctttctcccagggctgtctgtcttttaaggagctgcatgccctgcattcagaagattatggcttagagagcctcattggcacccgagggtccttccagaatcaataaccaccacaaaaatgacaacagggactaggccctactctgcaccccccacatccaccccccaccatttcctaggatggacatatctttcaaggggaaaaaaaaaccatgtctctggggtatttcacaatatattttctttgtatagtgttctttacttaaagaacaagaaatagttttttataaaactttaaaaaggaaaaaaaaacaggcatttataactgagggtatgaacttatatccaccaggtctcttgtccctgcacttcattttctttggaagaaaatgatgtctaaagaacaatatagaggcatttttacatacgtatttaaatgaaaaggaaaatcgtggtttcttaaattgataaggattaagaatattttattataaatataatatatgattttttaacctgttttgttgcctcatatgctgtcaggttaatttgttttccttcgtgccagaggtggggaggaaggcactctgtctgctgggtaaatgcctaaattcactcaccttcatggtttgggggcagcatggtcattgtggatattggttttgtggagttgagggaacttaggatataagttcactccctctatttttctttgtgattcagtttttcaaaaatctttttttcttccctttctccccattgtggaaattacaaatcaaaggcctttttctttaatgtaaagtgtatttatttaaaaaaaatacaaaataaactacaagtctgtctttgttatggcctttccctattttcttttaccgaagtggggtgtgtcccttttttgcagctctagccaggccatagagaagacaccttccaggagaggcaaggagagcatgttctgcccacatagagcactccagggagagagaagaggggacaaatttggttgtgaagtaaacaagaaacacaagacggctaaaactctccaggggcaggtaaagccctgctgggctcagaagcactatagaatttgctgtacacactgaagtgggtctgtgtcacacaggtatttcttggtcctctggagagcagaggactcactcagctctttgcttcatgcctcgctttaatggtagtaaacacttaaccagtggaatagtctgactgctggtactgatggcatcagaagaaaacaggttaacaatcaagtagtgaaagcactatattctagtcattaactcaacggagccagtctcaactctgctgggagcacccacaggtctctgtgggggagacagggactataacagggaggcagaattcaggttggcttgacaacacaccttaggaacatgtgctaaggggctaaggaggcatcagctgtcttccttattctaccagggctgaaaatcggagtcacttaggaggcagcatgagaacagtggcacaccaccagtgaggcacatgttgcctttttgtctttaagcaacaccttagacagggcctgaaccctgggtgggggcactggatgcctgaagtaagtaagttttctcagtggggcagtctcataaaatcaccaggacattgaccacctgacctcccctaactagtgctggccaaggcctgagagttcacagaacctgctaggtcttaagagccaaaggaaggaagtggttgagggccaggaaagagaaggaatgtcatgccagggtgttactcctcaccaaaacttggcagttctttttggggccatgggacacctttctctgaagaggggttggataaggcaaaggttgaagtgtcttctctaggcacgttttctagcatgtttccttttacttggttctgtctcacaaagctgggaggtagatgattcttccgggtcctgagcacctgcttcatgaaggaagataggtagcccagagaagaagttttggacttaacaacataccaaggcagctctggcctgtgactcaggcgtttgttggagagctgcaggaaaaccactgcagtgtgcctgcaacaggacaagacccactcctgtttctggcggtaccagctaccctggaatggtggcgtgtcctgctgtacccaactgacttgcttaggtacctggcagctgtgaccacagctcaagtaaaaaaacaaaaacaggcaaataaataaacatgcttaacatgt

SEQ ID NO: 280995 - DNA, 6987 bp, Homo sapiens
gggcggagccgcctcggacgataaggaaattgagatttggagaagttaaataaccaagacttcacagacaaagtctcactccttttgcccaggccggtgtgcattggggtaatctcggctgactgcaacctccgtcccctccgagttcaagtgattctcctgcctcaacctcccgagtagctgggattacaggcaaagccatgactacagtagtggtacatgtggactccaaagctgagctcactaccctgctggagcagtgggaaaaggaacatggcagtgggcaggacatggtacctatccttaccaggatgtctcaattgattgaaaaagaaactgaagagtatcgtaaaggggatccagacccatttgatgatcgacatcctggtcgagctgatccagagtgtatgctgggccacttgctgagaatactcttcaagaatgatgatttcatgaatgcactggtgaatgcatatgtgatgacaagccgagagccccctttaaacactgcagcttgcagactcctattagacatcatgccagggctggaaactgctgtcgtctttcaagaaaaggagggaattgtcgagaatcttttcaaatgggcccgagaggccgatcaaccattgaggacatattctactggactgttaggaggtgctatggaaaatcaagacattgctgccaactatagagatgaaaattcacagctggtggcaatagtgcttcgaagactgagggagctacagctacaggaagtggctttgcggcaggaaaacaagcgtcccagtccacggaagctctcttctgaaccccttttgcctctggatgaggaggctgtggatatggactatggtgacatggctgtagatgtagtggatggagaccaagaggaagcttctggagacatggagatctcctttcatcttgattcaggccacaagactagtagcagagtgaactcaacaaccaaacctgaggatggaggattaaagaaaaacaagtcagcaaaacagggtgacagagagaactttaggaaagccaagcaaaagttgggtttctcatcttctgatccagatcgcatgtttgttgagctgtctaatagcagttggtcagaaatgtctccctgggtgattggcaccaattataccctttatcctatgactcctgctatcgagcagcgactcattctccaatatttgacccctctaggagaatatcaggagctacttcccatattcatgcaacttggatcacgggagctgatgatgttctatattgacctgaagcaaactaatgatgtcctgcttacatttgaggcactaaagcacctagcatctctcctgctccataacaaatttgccacagaatttgttgcgcatggtggagtacagaaattactggaaatacctcgtccttctatggctgcaaccggtgtgtctatgtgtttgtattacctatcctacaatcaggatgccatggaaagagtttgcatgcatccccacaatgttctgtctgatgtggtgaactataccctgtggttaatggagtgttctcatgcttcaggatgctgccatgctaccatgtttttttcaatttgcttctcatttcgggccgtcttggagctctttgaccgctatgatggtcttcgtcgtctggtgaacttgatcagtactttggagattctaaatttggaagatcagggtgcacttctgagtgatgatgaaatatttgctagccgccaaactgggaaacatacctgcatggccttgcgcaaatactttgaggctcacctggccattaaattggaacaagtgaagcagtcacttcagaggactgagggtggcattcttgtccacccacaacccccgtacaaggcatgctcatatactcatgaacagattgtggaaatgatggaatttttgatagaatatggcccagcgcagctatattgggaaccagctgaagttttcctcaaactttcttgtgtgcaactcttgttgcagcttatttctattgcctgcaattggaagacctattatgcaaggaatgacactgtgcgctttgctttggatgtcctggctattcttactgtggtgccaaaaatccagctccagttggcagaatcagtggacgtgttggatgaggctggatctacagtctctactgtaggtatcagcattattttgggagtggctgagggtgagttcttcatccatgatgctgaaattcagaagtcagcacttcagattatcatcaattgtgtgtgtggcccagataaccgaatatccagtattggtaaatttatctctggtactcctcggagaaagctgcctcagaaccctaaaagcagtgagcacaccctggccaagatgtggaatgtggttcagtccaacaacggcatcaaggtgctcctgtccttactgtccattaagatgcccatcacagatgcagaccaaatccgggccctggcctgcaaagccctagtgggcctgtctcgcagtagcactgtccggcagatcatcagtaaactgccccttttcagcagctgccagatccagcagctgatgaaggagcctgtgctgcaggacaagcgcagtgaccatgtcaagttctgcaagtatgctgctgaactcattgaacgggtgtcaggaaaaccacttctcattggcactgatgtttccctagcacgactgcagaaagcagatgttgttgcccagtcaaggatctccttccctgagaaagagctgcttttgttgatacgaaaccatcttatttctaaagggcttggagaaacagcaaccgtgctgacaaaagaggctgacctgcccatgactgctgcctcccattcttctgcctttaccccagtcactgctgctgcttctcctgtctctctaccccgaacccctcgtatcgctaatggcattgcaactcgtctgggcagccatgctgctgtgggtgcctctgcgccttctgcccctactgctcatcctcagccacggcccccccagggtccgctagctctgcccggcccatcttatgcaggcaactcccctttgattggtagaatcagttttatcagagagaggccatcaccctgcaatggcaggaaaatcagagtgttgcggcagaagtcggaccatggtgcctacagccaaagcccagccataaaaaaacagctggacagacatcttccttccccacctacgctggacagtataatcacagagtatcttagagaacaacatgctcgctgcaagaatccagttgccacctgcccacctttctccctctttactcctcaccaatgtcctgaggcatcatttccaaagtatggaggggtggatggcggatgctttgataggcaccttatctttagcagattccgtcctatttcagtgttccgggaagccaatgaagatgagagtggcttcacctgctgtgcattctcagcacgggagcggttcctgatgcttggcacctgcacagggcagctgaagctctataatgtgtttagtggacaggaggaggccagctataactgtcacaactcagccatcacacatcttgaaccttccagggatgggtccttgctgctgacatctgctacttggagccagcctttgtctgcactttggggaatgaagtcagtatttgatatgaagcattccttcacagaagatcactatgttgagttcagtaagcactcccaggatcgggtcatcggcacaaaaggagacattgcccacatttatgatattcagactggcaacaagctgttgactctgtttaacccagatcttgccaacaactacaagaggaactgtgccacctttaatcctacagatgatcttgtcttaaatgatggcgtcctctgggatgtccgctctgcacaggccatccacaagtttgacaagttcaatatgaacatcagtggtgttttccatccaaatggactggaggtgatcattaatactgagatttgggaccttcgaacttttcatcttttgcatactgttcccgctctggatcagtgtcgcgtggtgttcaatcacacgggaacagtgatgtatggagctatgttgcaggcagatgatgaagatgacttaatggaagagaggatgaaaagcccctttgggtcatccttccgaacatttaatgcaactgactacaaacctatagcaaccattgatgtgaaacggaacatctttgacctgtgtacagacaccaaagactgctatcttgctgtcattgagaatcaaggcagcatggatgccctgaacatggacacagtatgcaggctgtatgaagtgggcaggcagcgtctggcagaggatgaggatgaagaggaggaccaggaagaggaagaacaggaggaagaagatgatgatgaagatgatgatgacaccgatgatttagatgagcttgacactgaccagttgctggaggcggagttggaggaggacgacaataatgagaacgcaggggaagatggggacaatgacttctctccctctgatgaggagctagcaaaccttctagaggagggagaggacggggaggatgaagactctgatgcagatgaggaggtggaactgatcctgggggacactgacagctctgacaactctgatttggaagatgacatcatcttatctctgaatgagtgaggagccatcactgcttggaagagattcttggcaggcgagaaactgagtcaaatgaattcagaacatattcccttctctttctcccagggctgtctgtcttttaaggagctgcatgccctgcattcagaagattatggcttagagagcctcattggcacccgagggtccttccagaatcaataaccaccacaaaaatgacaacagggactaggccctactctgcaccccccacatccaccccccaccatttcctaggatggacatatctttcaaggggaaaaaaaaaccatgtctctggggtatttcacaatatattttctttgtatagtgttctttacttaaagaacaagaaatagttttttataaaactttaaaaaggaaaaaaaaacaggcatttataactgagggtatgaacttatatccaccaggtctcttgtccctgcacttcattttctttggaagaaaatgatgtctaaagaacaatatagaggcatttttacatacgtatttaaatgaaaaggaaaatcgtggtttcttaaattgataaggattaagaatattttattataaatataatatatgattttttaacctgttttgttgcctcatatgctgtcaggttaatttgttttccttcgtgccagaggtggggaggaaggcactctgtctgctgggtaaatgcctaaattcactcaccttcatggtttgggggcagcatggtcattgtggatattggttttgtggagttgagggaacttaggatataagttcactccctctatttttctttgtgattcagtttttcaaaaatctttttttcttccctttctccccattgtggaaattacaaatcaaaggcctttttctttaatgtaaagtgtatttatttaaaaaaaatacaaaataaactacaagtctgtctttgttatggcctttccctattttcttttaccgaagtggggtgtgtcccttttttgcagctctagccaggccatagagaagacaccttccaggagaggcaaggagagcatgttctgcccacatagagcactccagggagagagaagaggggacaaatttggttgtgaagtaaacaagaaacacaagacggctaaaactctccaggggcaggtaaagccctgctgggctcagaagcactatagaatttgctgtacacactgaagtgggtctgtgtcacacaggtatttcttggtcctctggagagcagaggactcactcagctctttgcttcatgcctcgctttaatggtagtaaacacttaaccagtggaatagtctgactgctggtactgatggcatcagaagaaaacaggttaacaatcaagtagtgaaagcactatattctagtcattaactcaacggagccagtctcaactctgctgggagcacccacaggtctctgtgggggagacagggactataacagggaggcagaattcaggttggcttgacaacacaccttaggaacatgtgctaaggggctaaggaggcatcagctgtcttccttattctaccagggctgaaaatcggagtcacttaggaggcagcatgagaacagtggcacaccaccagtgaggcacatgttgcctttttgtctttaagcaacaccttagacagggcctgaaccctgggtgggggcactggatgcctgaagtaagtaagttttctcagtggggcagtctcataaaatcaccaggacattgaccacctgacctcccctaactagtgctggccaaggcctgagagttcacagaacctgctaggtcttaagagccaaaggaaggaagtggttgagggccaggaaagagaaggaatgtcatgccagggtgttactcctcaccaaaacttggcagttctttttggggccatgggacacctttctctgaagaggggttggataaggcaaaggttgaagtgtcttctctaggcacgttttctagcatgtttccttttacttggttctgtctcacaaagctgggaggtagatgattcttccgggtcctgagcacctgcttcatgaaggaagataggtagcccagagaagaagttttggacttaacaacataccaaggcagctctggcctgtgactcaggcgtttgttggagagctgcaggaaaaccactgcagtgtgcctgcaacaggacaagacccactcctgtttctggcggtaccagctaccctggaatggtggcgtgtcctgctgtacccaactgacttgcttaggtacctggcagctgtgaccacagctcaagtaaaaaaacaaaaacaggcaaataaataaacatgcttaacatgt

SEQ ID NO: 280996 - DNA, 6788 bp, Homo sapiens
gggcggagccgcctcggacgataaggaaattgagatttggagaagttaaataaccaagacttcacagacaaagtctcactccttttgcccaggccggtgtgcattggggtaatctcggctgactgcaacctccgtcccctccgagttcaagtgattctcctgcctcaacctcccgagtagctgggattacaggcaaagccatgactacagtagtggtacatgtggactccaaagctgagctcactaccctgctggagcagtgggaaaaggaacatggcagtgggcaggacatggtacctatccttaccaggatgtctcaattgattgaaaaagaaactgaagagtatcgtaaaggggatccagacccatttgatgatcgacatcctggtcgagctgatccagagtgtatgctgggccacttgctgagaatactcttcaagaatgatgatttcatgaatgcactggtgaatgcatatgtgatgacaagccgagagccccctttaaacactgcagcttgcagactcctattagacatcatgccagggctggaaactgctgtcgtctttcaagaaaaggagggaattgtcgagaatcttttcaaatgggcccgagaggccgatcaaccattgaggacatattctactggactgttaggaggtgctatggaaaatcaagacattgctgccaactatagagatgaaaattcacagctggtggcaatagtgcttcgaagactgagggagctacagctacaggaagtggctttgcggcaggaaaacaagcgtcccagtccacggaagctctcttctgaaccccttttgcctctggatgaggaggctgtggatatggactatggtgacatggctgtagatgtagtggatggagaccaagaggaagcttctggagacatggagatctcctttcatcttgattcaggccacaagactagtagcagagtgaactcaacaaccaaacctgaggatggaggattaaagaaaaacaagtcagcaaaacagggtgacagagagaactttaggaaagccaagcaaaagttgggtttctcatcttctgatccagatcgcatgtttgttgagctgtctaatagcagttggtcagaaatgtctccctgggtgattggcaccaattataccctttatcctatgactcctgctatcgagcagcgactcattctccaatatttgacccctctaggagaatatcaggagctacttcccatattcatgcaacttggatcacgggagctgatgatgttctatattgacctgaagcaaactaatgatgtcctgcttacatttgaggcactaaagcacctagcatctctcctgctccataacaaatttgccacagaatttgttgcgcatggtggagtacagaaattactggaaatacctcgtccttctatggctgcaaccggtgtgtctatgtgtttgtattacctatcctacaatcaggatgccatggaaagagtttgcatgcatccccacaatgttctgtctgatgtggtgaactataccctgtggttaatggagtgttctcatgcttcaggatgctgccatgctaccatgtttttttcaatttgcttctcatttcgggccgtcttggagctctttgaccgctatgatggtcttcgtcgtctggtgaacttgatcagtactttggagattctaaatttggaagatcagggtgcacttctgagtgatgatgaaatatttgctagccgccaaactgggaaacatacctgcatggccttgcgcaaatactttgaggctcacctggccattaaattggaacaagtgaagcagtcacttcagaggactgagggtggcattcttgtccacccacaacccccgtacaaggcatgctcatatactcatgaacagattgtggaaatgatggaatttttgatagaatatggcccagcgcagctatattgggaaccagctgaagttttcctcaaactttcttgtgtgcaactcttgttgcagcttatttctattgcctgcaattggaagacctattatgcaaggaatgacactgtgcgctttgctttggatgtcctggctattcttactgtggtgccaaaaatccagctccagttggcagaatcagtggacgtgttggatgaggctggatctacagtctctactgtaggtatcagcattattttgggagtggctgagggtgagttcttcatccatgatgctgaaattcagaagtcagcacttcagattatcatcaattgtgtgtgtggcccagataaccgaatatccagtattggtaaatttatctctggtactcctcggagaaagctgcctcagaaccctaaaagcagtgagcacaccctggccaagatgtggaatgtggttcagtccaacaacggcatcaaggtgctcctgtccttactgtccattaagatgcccatcacagatgcagaccaaatccgggccctggcctgcaaagccctagtgggcctgtctcgcagtagcactgtccggcagatcatcagtaaactgccccttttcagcagctgccagatccagcagctgatgaaggagcctgtgctgcaggacaagcgcagtgaccatgtcaagttctgcaagtatgctgctgaactcattgaacgggtgtcaggaaaaccacttctcattggcactgatgtttccctagcacgactgcagaaagcagatgttgttgcccagtcaaggatctccttccctgagaaagagctgcttttgttgatacgaaaccatcttatttctaaagggcttggagaaacagcaaccgtgctgacaaaagaggctgacctgcccatgactgctgcctcccattcttctgcctttaccccagtcactgctgctgcttctcctgtctctctaccccgaacccctcgtatcgctaatggcattgcaactcgtctgggcagccatgctgctgtgggtgcctctgcgccttctgcccctactgctcatcctcagccacggcccccccagggtccgctagctctgcccggcccatcttatgcaggcaactcccctttgattggtagaatcagttttatcagagagaggccatcaccctgcaatggcaggaaaatcagagtgttgcggcagaagtcggaccatggtgcctacagccaaagcccagccataaaaaaacagctggacagacatcttccttccccacctacgctggacagtataatcacagagtatcttagagaacaacatgctcgctgcaagaatccagttgccacctgcccacctttctccctctttactcctcaccaatgtcctgagccaaaacagaggcggcaagcgccaataaactttacgtcaaggctaaaccgcagggcatcatttccaaagtatggaggggtggatggcggatgctttgataggcaccttatctttagcagattccgtcctatttcagtgttccgggaagccaatgaagatgagagtggcttcacctgctgtgcattctcagcacgggagcggttcctgatgcttggcacctgcacagggcagctgaagctctataatgtgtttagtggacaggaggaggccagctataactgtcacaactcagccatcacacatcttgaaccttccagggatgggtccttgctgctgacatctgctacttggagccagcctttgtctgcactttggggaatgaagtcagtatttgatatgaagcattccttcacagaagatcactatgttgagttcagtaagcactcccaggatcgggtcatcggcacaaaaggagacattgcccacatttatgatattcagactggcaacaagctgttgactctgtttaacccagatcttgccaacaactacaagaggaactgtgccacctttaatcctacagatgatcttgtcttaaatgatggcgtcctctgggatgtccgctctgcacaggccatccacaagtttgacaagttcaatatgaacatcagtggtgttttccatccaaatggactggaggtgatcattaatactgagatttgggaccttcgaacttttcatcttttgcatactgttcccgctctggatcagtgtcgcgtggtgttcaatcacacgggaacagtgatgtatggagctatgttgcaggcagatgatgaagatgacttaatggaagagaggatgaaaagcccctttgggtcatccttccgaacatttaatgcaactgactacaaacctatagcaaccattgatgtgaaacggaacatctttgacctgtgtacagacaccaaagactgctatcttgctgtcattgagaatcaaggcagcatggatgccctgaacatggacacagtatgcaggctgtatgaagtgggcaggcagcgtctggcagaggatgaggatgaagaggaggaccagctgacagctctgacaactctgatttggaagatgacatcatcttatctctgaatgagtgaggagccatcactgcttggaagagattcttggcaggcgagaaactgagtcaaatgaattcagaacatattcccttctctttctcccagggctgtctgtcttttaaggagctgcatgccctgcattcagaagattatggcttagagagcctcattggcacccgagggtccttccagaatcaataaccaccacaaaaatgacaacagggactaggccctactctgcaccccccacatccaccccccaccatttcctaggatggacatatctttcaaggggaaaaaaaaaccatgtctctggggtatttcacaatatattttctttgtatagtgttctttacttaaagaacaagaaatagttttttataaaactttaaaaaggaaaaaaaaacaggcatttataactgagggtatgaacttatatccaccaggtctcttgtccctgcacttcattttctttggaagaaaatgatgtctaaagaacaatatagaggcatttttacatacgtatttaaatgaaaaggaaaatcgtggtttcttaaattgataaggattaagaatattttattataaatataatatatgattttttaacctgttttgttgcctcatatgctgtcaggttaatttgttttccttcgtgccagaggtggggaggaaggcactctgtctgctgggtaaatgcctaaattcactcaccttcatggtttgggggcagcatggtcattgtggatattggttttgtggagttgagggaacttaggatataagttcactccctctatttttctttgtgattcagtttttcaaaaatctttttttcttccctttctccccattgtggaaattacaaatcaaaggcctttttctttaatgtaaagtgtatttatttaaaaaaaatacaaaataaactacaagtctgtctttgttatggcctttccctattttcttttaccgaagtggggtgtgtcccttttttgcagctctagccaggccatagagaagacaccttccaggagaggcaaggagagcatgttctgcccacatagagcactccagggagagagaagaggggacaaatttggttgtgaagtaaacaagaaacacaagacggctaaaactctccaggggcaggtaaagccctgctgggctcagaagcactatagaatttgctgtacacactgaagtgggtctgtgtcacacaggtatttcttggtcctctggagagcagaggactcactcagctctttgcttcatgcctcgctttaatggtagtaaacacttaaccagtggaatagtctgactgctggtactgatggcatcagaagaaaacaggttaacaatcaagtagtgaaagcactatattctagtcattaactcaacggagccagtctcaactctgctgggagcacccacaggtctctgtgggggagacagggactataacagggaggcagaattcaggttggcttgacaacacaccttaggaacatgtgctaaggggctaaggaggcatcagctgtcttccttattctaccagggctgaaaatcggagtcacttaggaggcagcatgagaacagtggcacaccaccagtgaggcacatgttgcctttttgtctttaagcaacaccttagacagggcctgaaccctgggtgggggcactggatgcctgaagtaagtaagttttctcagtggggcagtctcataaaatcaccaggacattgaccacctgacctcccctaactagtgctggccaaggcctgagagttcacagaacctgctaggtcttaagagccaaaggaaggaagtggttgagggccaggaaagagaaggaatgtcatgccagggtgttactcctcaccaaaacttggcagttctttttggggccatgggacacctttctctgaagaggggttggataaggcaaaggttgaagtgtcttctctaggcacgttttctagcatgtttccttttacttggttctgtctcacaaagctgggaggtagatgattcttccgggtcctgagcacctgcttcatgaaggaagataggtagcccagagaagaagttttggacttaacaacataccaaggcagctctggcctgtgactcaggcgtttgttggagagctgcaggaaaaccactgcagtgtgcctgcaacaggacaagacccactcctgtttctggcggtaccagctaccctggaatggtggcgtgtcctgctgtacccaactgacttgcttaggtacctggcagctgtgaccacagctcaagtaaaaaaacaaaaacaggcaaataaataaacatgcttaacatgt

SEQ ID NO: 280997 - DNA, 5294 bp, Homo sapiens
gggcggagccgcctcggacgataaggaaattgagatttggagaagttaaataaccaagacttcacagacaaagtctcactccttttgcccaggccggtgtgcattggggtaatctcggctgactgcaacctccgtcccctccgagttcaagtgattctcctgcctcaacctcccgagtagctgggattacaggcaaagccatgactacagtagtggtacatgtggactccaaagctgagctcactaccctgctggagcagtgggaaaaggaacatggcagtgggcaggacatggtacctatccttaccaggatgtctcaattgattgaaaaagaaactgaagagtatcgtaaaggggatccagacccatttgatgatcgacatcctggtcgagctgatccagagtgtatgctgggccacttgctgagaatactcttcaagaatgatgatttcatgaatgcactggtgaatgcatatgtgatgacaagccgagagccccctttaaacactgcagcttgcagactcctattagacatcatgccagggctggaaactgctgtcgtctttcaagaaaaggagggaattgtcgagaatcttttcaaatgggcccgagaggccgatcaaccattgaggacatattctactggactgttaggaggtgctatggaaaatcaagacattgctgccaactatagagatgaaaattcacagctggtggcaatagtgcttcgaagactgagggagctacagctacaggaagtggctttgcggcaggaaaacaagcgtcccagtccacggaagctctcttctgaaccccttttgcctctggatgaggaggctgtggatatggactatggtgacatggctgtagatgtagtggatggagaccaagaggaagcttctggagacatggagatctcctttcatcttgattcaggccacaagactagtagcagagtgaactcaacaaccaaacctgaggatggaggattaaagaaaaacaagtcagcaaaacagggtgacagagagaactttaggaaagccaagcaaaagttgggtttctcatcttctgatccagatcgcatgtttgttgagctgtctaatagcagttggtcagaaatgtctccctgggtgattggcaccaattataccctttatcctatgactcctgctatcgagcagcgactcattctccaatatttgacccctctaggagaatatcaggagctacttcccatattcatgcaacttggatcacgggagctgatgatgttctatattgacctgaagcaaactaatgatgtcctgcttacatttgaggcactaaagcacctagcatctctcctgctccataacaaatttgccacagaatttgttgcgcatggtggagtacagaaattactggaaatacctcgtccttctatggctgcaaccggtgtgtctatgtgtttgtattacctatcctacaatcaggatgccatggaaagagtttgcatgcatccccacaatgttctgtctgatgtggtgaactataccctgtggttaatggagtgttctcatgcttcaggatgctgccatgctaccatgtttttttcaatttgcttctcatttcgggccgtcttggagctctttgaccgctatgatggtcttcgtcgtctggtgaacttgatcagtactttggagattctaaatttggaagatcagggtgcacttctgagtgatgatgaaatatttgctagccgccaaactgggaaacatacctgcatggccttgcgcaaatactttgaggctcacctggccattaaattggaacaagtgaagcagtcacttcagaggactgagggtggcattcttgtccacccacaacccccgtacaaggcatgctcatatactcatgaacagattgtggaaatgatggaatttttgatagaatatggcccagcgcagctatattgggaaccagctgaagttttcctcaaactttcttgtgtgcaactcttgttgcagcttatttctattgcctgcaattggaagacctattatgcaaggaatgacactgtgcgctttgctttggatgtcctggctattcttactgtggtgccaaaaatccagctccagttggcagaatcagtggacgtgttggatgaggctggatctacagtctctactgtaggtatcagcattattttgggagtggctgagggtgagttcttcatccatgatgctgaaattcagaagtcagcacttcagattatcatcaattgtgtgtgtggcccagataaccgaatatccagtattggtaaatttatctctggtactcctcggagaaagctgcctcagaaccctaaaagcagtgagcacaccctggccaagatgtggaatgtggttcagtccaacaacggcatcaaggtgctcctgtccttactgtccattaagatgcccatcacagatgcagaccaaatccgggccctggcctgcaaagccctagtgggcctgtctcgcagtagcactgtccggcagatcatcagtaaactgccccttttcagcagctgccagatccagcagctgatgaaggagcctgtgctgcaggacaagcgcagtgaccatgtcaagttctgcaagtatgctgctgaactcattgaacgggtgtcaggaaaaccacttctcattggcactgatgtttccctagcacgactgcagaaagcagatgttgttgcccagtcaaggatctccttccctgagaaagagctgcttttgttgatacgaaaccatcttatttctaaagggcttggagaaacagcaaccgtgctgacaaaagaggctgacctgcccatgactgctgcctcccattcttctgcctttaccccagtcactgctgctgcttctcctgtctctctaccccgaacccctcgtatcgctaatggcattgcaactcgtctgggcagccatgctgctgtgggtgcctctgcgccttctgcccctactgctcatcctcagccacggcccccccagggtccgctagctctgcccggcccatcttatgcaggcaactcccctttgattggtagaatcagttttatcagagagaggccatcaccctgcaatggcaggaaaatcagagtgttgcggcagaagtcggaccatggtgcctacagccaaagcccagccataaaaaaacagctggacagacatcttccttccccacctacgctggacagtataatcacagagtatcttagagaacaacatgctcgctgcaagaatccagttgccacctgcccacctttctccctctttactcctcaccaatgtcctgagccaaaacagaggcggcaagcgccaataaactttacgtcaaggctaaaccgcagggcatcatttccaaagtatggaggggtggatggcggatgctttgataggcaccttatctttagcagattccgtcctatttcagtgttccgggaagccaatgaagatgagagtggcttcacctgctgtgcattctcagcacgggagcggttcctgatgcttggcacctgcacagggcagctgaagctctataatgtgtttagtggacaggaggaggccagctataactgtcacaactcagccatcacacatcttgaaccttccagggatgggtccttgctgctgacatctgctacttggagccagcctttgtctgcactttggggaatgaagtcagtatttgatatgaagcattccttcacagaagatcactatgttgagttcagtaagcactcccaggatcgggtcatcggcacaaaaggagacattgcccacatttatgatattcagactggcaacaagctgttgactctgtttaacccagatcttgccaacaactacaagaggaactgtgccacctttaatcctacagatgatcttgtcttaaatgatggcgtcctctgggatgtccgctctgcacaggccatccacaagtttgacaagttcaatatgaacatcagtggtgttttccatccaaatggactggaggtgatcattaatactgagatttgggaccttcgaacttttcatcttttgcatactgttcccgctctggatcagtgtcgcgtggtgttcaatcacacgggaacagtgatgtatggagctatgttgcaggcagatgatgaagatgacttaatggaagagaggatgaaaagcccctttgggtcatccttccgaacatttaatgcaactgactacaaacctatagcaaccattgatgtgaaacggaacatctttgacctgtgtacagacaccaaagactgctatcttgctgtcattgagaatcaaggcagcatggatgccctgaacatggacacagtatgcaggctgtatgaagtgggcaggcagcgtctggcagaggatgaggatgaagaggaggaccaggaagaggaagaacaggaggaagaagatgatgatgaagatgatgatgacaccgatgatttagatgagcttgacactgaccagttgctggaggcggagttggaggaggacgacaataatgagaacgcaggggaagatggggacaatgacttctctccctctgatgaggagctagcaaaccttctagaggagggagaggacggggaggatgaagactctgatgcagatgaggaggtggaactgatcctgggggacactgacagctctgacaactctgatttggaagatgacatcatcttatctctgaatgagtgaggagccatcactgcttggaagagattcttggcagagagaagaggggacaaatttggttgtgaagtaaacaagaaacacaagacggctaaaactctccaggggcagctgggaggtagatgattcttccgggtcctgagcacctgcttcatgaaggaagataggtagcccagagaagaagttttggacttaacaacataccaaggcagctctggcctgtgactcaggcgtttgttggagagctgcaggaaaaccactgcagtgtgcctgcaacaggacaagacccactcctgtttctggcggtaccagctaccctggaatggtggcgtgtcctgctgtacccaactgacttgcttaggtacctggcagctgtgaccacagctcaagtaaaaaaacaaaaacaggcaaataaataaacatgcttaacatgtctttgtgttgctgttttgttatgaacgtgcttgctctcttgcgaggcacctgtccattccacatcaccgaggggtctacgagagcactgccaagtgttcctgtggaccagcatgacctctccacagcctgcagtgagcccca

SEQ ID NO: 280998 - DNA, 892 bp, Homo sapiens
gggcggagccgcctcggacgataaggaaattgagatttggagaagttaaataaccaagacttcacaggcaaagccatgactacagtagtggtacatgtggactccaaagctgagctcactaccctgctggagcagtgggaaaaggaacatggcagtgggcaggacatggtacctatccttaccaggatgtctcaattgattgaaaaagaaactgaagagtatcgtaaaggggatccagacccatttgatgatcgacatcctggtcgagctgatccagagtgtatgctgggccacttgctgagaatactcttcaagaatgatgatttcatgaatgcagtaggtttgcttcttacttttctccagcgattatcatctgtagatgctgtatctttattgttttttcgtgaatagtttgccttctcctaaggccttgaccaagttgggagtagagttttttgccaaagtcctggttgtggccataatgctttctctttggtatgtactttgatattggtgaggcctcccaaggtatctacgctcattcttgggcaaaatgattttgaatttgagaatataggggccctcttcagtttttcaatggaaaaataagagtgatgcatacagcatgattctgcactgacactgtggggtatgcattgggcatgtagagggatagaaagttgctttctgtctatcttgaggaggatgtgaggagtaaataagaatatacatattttactcagctcctgaacatagtaattgctcaacaaattgtggctgataggtttgtttttggaggtgggatggcatgatgcttgagaacgtgggctttgggggtccatgttttggatttaaatccagctccatagttcactgacagacttaagcctct

SEQ ID NO: 280999 - DNA, 510 bp, Homo sapiens
tagaggatctttaaaggcgagctggctaaaactctccaggtgcagctgggaggtagatgattcttccgggtcctgagcacctgcttcatgaaggaagataggtagcccagagaagaagttttggacttaacaacataccaaggcagctctggcctgtgactcaggcgtttgttggagagctgcaggaaaaccactgcagtgtgcctgcaacaggacaagacccactcctgtttctggcggtaccagctaccctggaatggtggcgtgtcctgctgtacccaactgacttgcttaggtacctggcagctgtgaccacagctcaagtaaaaaaacaaaaacaggcaaataaataaacatgcttaacatgtctttgtgttgctgttttgttatgaacgtgcttgctctcttgcgaggcacctgtccattccacatcaccgaggggtctacgagagcactgccaagtgttcctgtggaccagcatgacctctccacagcctgcagtgagcccca

SEQ ID NO: 281000 - DNA, 135 bp, Homo sapiens
ggactccaaagctgagctcactaccctgctggagcagtgggaaaaggaacatggcagtgggcaggacatggtacctatccttaccaggtatgaataacttttttaaaacctagtttaataaaaaacctcggacac

SEQ ID NO: 281001 - DNA, 302 bp, Homo sapiens
ctataggtgtatgtattcaaatcctagtggcttctgaccatttcttggtttctggggattataaaattgtctctttaattcaacaacatttttatgcaaatctttaaaaatgctaatggcaggtagtgacatctgcatgtatgtaaatacgtggttacccaccttgcgcctttttcttttaggatgggtccttgctgctgacatctgctacttggagccagcctttgtctgcactttggggaatgaagtcagtatttgatatgaagtatgtatctgcttttggaacctagtctgtgctttat

SEQ ID NO: 281002 - DNA, 474 bp, Homo sapiens
taagttgcaggcctgtcatccctaaataccctagcagatgcttgttaggataagaaaattttacataagtatttcttgaggctttatattatcccatcatggggacaatattgtcatttaaccccgcacaacaactgtttccatcttgcagataaggaaattgagatttggagaagttaaataaccaagacttcacaggtatgtcagcagagttgggatttgaatccttgaaaccttttttctacctagtactagctggtcttggggacctctctgagctagtttcctcatgtgtgaaaaagggtaggatggttgtgaaaattcagaataatgtaagtatggtaaattacttagctcaatgtctgtcccatactagatattcactaattggtaactaccgtgtcaccattggacagaccatcatttcttcatagcacttaaaggaactcacttaagaacttgagtaatgcaccc

SEQ ID NO: 281003 - DNA, 3957 bp, Homo sapiens
gactctatatgatcccctgccttcatgtcctgcttacatttgaggcactaaagcacctagcatctctcctgctccataacaaatttgccacagaatttgttgcgcatggtggagtacagaaattactggaaatacctcgtccttctatggctgcaaccggtgtgtctatgtgtttgtattacctatcctacaatcaggatgccatggaaagagtttgcatgcatccccacaatgttctgtctgatgtggtgaactataccctgtggttaatggagtgttctcatgcttcaggatgctgccatgctaccatgtttttttcaatttgcttctcatttcgggccgtcttggagctctttgaccgctatgatggtcttcgtcgtctggtgaacttgatcagtactttggagattctaaatttggaagatcagggtgcacttctgagtgatgatgaaatatttgctagccgccaaactgggaaacatacctgcatggccttgcgcaaatactttgaggctcacctggccattaaattggaacaagtgaagcagtcacttcagaggactgagggtggcattcttgtccacccacaacccccgtacaaggcatgctcatatactcatgaacagattgtggaaatgatggaatttttgatagaatatggcccagcgcagctatattgggaaccagctgaagttttcctcaaactttcttgtgtgcaactcttgttgcagcttatttctattgcctgcaattggaagacctattatgcaaggaatgacactgtgcgctttgctttggatgtcctggctattcttactgtggtgccaaaaatccagctccagttggcagaatcagtggacgtgttggatgaggctggatctacagtctctactgtaggtatcagcattattttgggagtggctgagggtgagttcttcatccatgatgctgaaattcagaagtcagcacttcagattatcatcaattgtgtgtgtggcccagataaccgaatatccagtattggtaaatttatctctggtactcctcggagaaagctgcctcagaaccctaaaagcagtgagcacaccctggccaagatgtggaatgtggttcagtccaacaacggcatcaaggtgctcctgtccttactgtccattaagatgcccatcacagatgcagaccaaatccgggccctggcctgcaaagccctagtgggcctgtctcgcagtagcactgtccggcagatcatcagtaaactgccccttttcagcagctgccagatccagcagctgatgaaggagcctgtgctgcaggacaagcgcagtgaccatgtcaagttctgcaagtatgctgctgaactcattgaacgggtgtcaggaaaaccacttctcattggcactgatgtttccctagcacgactgcagaaagcagatgttgttgcccagtcaaggatctccttccctgagaaagagctgcttttgttgatacgaaaccatcttatttctaaagggcttggagaaacagcaaccgtgctgacaaaagaggctgacctgcccatgactgctgcctcccattcttctgcctttaccccagtcactgctgctgcttctcctgtctctctaccccgaacccctcgtatcgctaatggcattgcaactcgtctgggcagccatgctgctgtgggtgcctctgcgccttctgcccctactgctcatcctcagccacggcccccccagggtccgctagctctgcccggcccatcttatgcaggcaactcccctttgattggtagaatcagttttatcagagagaggccatcaccctgcaatggcaggaaaatcagagtgttgcggcagaagtcggaccatggtgcctacagccaaagcccagccataaaaaaacagctggacagacatcttccttccccacctacgctggacagtataatcacagagtatcttagagaacaacatgctcgctgcaagaatccagttgccacctgcccacctttctccctctttactcctcaccaatgtcctgagccaaaacagaggcggcaagcgccaataaactttacgtcaaggctaaaccgcagggcatcatttccaaagtatggaggggtggatggcggatgctttgataggcaccttatctttagcagattccgtcctatttcagtgttccgggaagccaatgaagatgagagtggcttcacctgctgtgcattctcagcacgggagcggttcctgatgcttggcacctgcacagggcagctgaagctctataatgtgtttagtggacaggaggaggccagctataactgtcacaactcagccatcacacatcttgaaccttccagggatgggtccttgctgctgacatctgctacttggagccagcctttgtctgcactttggggaatgaagtcagtatttgatatgaagcattccttcacagaagatcactatgttgagttcagtaagcactcccaggatcgggtcatcggcacaaaaggagacattgcccacatttatgatattcagactggcaacaagctgttgactctgtttaacccagatcttgccaacaactacaagaggaactgtgccacctttaatcctacagatgatcttgtcttaaatgatggcgtcctctgggatgtccgctctgcacaggccatccacaagtttgacaagttcaatatgaacatcagtggtgttttccatccaaatggactggaggtgatcattaatactgagatttgggaccttcgaacttttcatcttttgcatactgttcccgctctggatcagtgtcgcgtggtgttcaatcacacgggaacagtgatgtatggagctatgttgcaggcagatgatgaagatgacttaatggaagagaggatgaaaagcccctttgggtcatccttccgaacatttaatgcaactgactacaaacctatagcaaccattgatgtgaaacggaacatctttgacctgtgtacagacaccaaagactgctatcttgctgtcattgagaatcaaggcagcatggatgccctgaacatggacacagtatgcaggctgtatgaagtgggcaggcagcgtctggcagaggatgaggatgaagaggaggaccaggaagaggaagaacaggaggaagaagatgatgatgaagatgatgatgacaccgatgatttagatgagcttgacactgaccagttgctggaggcggagttggaggaggacgacaataatgagaacgcaggggaagatggggacaatgacttctctccctctgatgaggagctagcaaaccttctagaggagggagaggacggggaggatgaagactctgatgcagatgaggaggtggaactgatcctgggggacactgacagctctgacaactctgatttggaagatgacatcatcttatctctgaatgagtgaggagccatcactgcttggaagagattcttggcagctctagccaggccatagagaagacaccttccaggagaggcaaggagagcatgttctgcccacatagagcactccagggagagagaagaggggacaaatttggttgtgaagtaaacaagaaacacaagacggctaaaactctccaggggcagctgggaggtagatgattcttccgggtcctgagcacctgcttcatgaaggaagataggtagcccagagaagaagttttggacttaacaacataccaaggcagctctggcctgtgactcaggcgtttgttggagagctgcaggaaaaccactgcagtgtgcctgcaacaggacaagacccactcctgtttctggcggtaccagctaccctggaatggtggcgtgtcctgctgtacccaactgacttgcttaggtacctggcagctgtgaccacagctcaagtaaaaaaacaaaaacaggcaaataaataaacatgcttaacatgt

SEQ ID NO: 281004 - DNA, 6986 bp, Homo sapiens
agcagggcagagggggctcccctcaggaacatcatgagacttttcacacagagacatcgccacctctaagggatgaagaacttccccacgataaggaaattgagatttggagaagttaaataaccaagacttcacaggcaaagccatgactacagtagtggtacatgtggactccaaagctgagctcactaccctgctggagcagtgggaaaaggaacatggcagtgggcaggacatggtacctatccttaccaggatgtctcaattgattgaaaaagaaactgaagagtatcgtaaaggggatccagacccatttgatgatcgacatcctggtcgagctgatccagagtgtatgctgggccacttgctgagaatactcttcaagaatgatgatttcatgaatgcactggtgaatgcatatgtgatgacaagccgagagccccctttaaacactgcagcttgcagactcctattagacatcatgccagggctggaaactgctgtcgtctttcaagaaaaggagggaattgtcgagaatcttttcaaatgggcccgagaggccgatcaaccattgaggacatattctactggactgttaggaggtgctatggaaaatcaagacattgctgccaactatagagatgaaaattcacagctggtggcaatagtgcttcgaagactgagggagctacagctacaggaagtggctttgcggcaggaaaacaagcgtcccagtccacggaagctctcttctgaaccccttttgcctctggatgaggaggctgtggatatggactatggtgacatggctgtagatgtagtggatggagaccaagaggaagcttctggagacatggagatctcctttcatcttgattcaggccacaagactagtagcagagtgaactcaacaaccaaacctgaggatggaggattaaagaaaaacaagtcagcaaaacagggtgacagagagaactttaggaaagccaagcaaaagttgggtttctcatcttctgatccagatcgcatgtttgttgagctgtctaatagcagttggtcagaaatgtctccctgggtgattggcaccaattataccctttatcctatgactcctgctatcgagcagcgactcattctccaatatttgacccctctaggagaatatcaggagctacttcccatattcatgcaacttggatcacgggagctgatgatgttctatattgacctgaagcaaactaatgatgtcctgcttacatttgaggcactaaagcacctagcatctctcctgctccataacaaatttgccacagaatttgttgcgcatggtggagtacagaaattactggaaatacctcgtccttctatggctgcaaccggtgtgtctatgtgtttgtattacctatcctacaatcaggatgccatggaaagagtttgcatgcatccccacaatgttctgtctgatgtggtgaactataccctgtggttaatggagtgttctcatgcttcaggatgctgccatgctaccatgtttttttcaatttgcttctcatttcgggccgtcttggagctctttgaccgctatgatggtcttcgtcgtctggtgaacttgatcagtactttggagattctaaatttggaagatcagggtgcacttctgagtgatgatgaaatatttgctagccgccaaactgggaaacatacctgcatggccttgcgcaaatactttgaggctcacctggccattaaattggaacaagtgaagcagtcacttcagaggactgagggtggcattcttgtccacccacaacccccgtacaaggcatgctcatatactcatgaacagattgtggaaatgatggaatttttgatagaatatggcccagcgcagctatattgggaaccagctgaagttttcctcaaactttcttgtgtgcaactcttgttgcagcttatttctattgcctgcaattggaagacctattatgcaaggaatgacactgtgcgctttgctttggatgtcctggctattcttactgtggtgccaaaaatccagctccagttggcagaatcagtggacgtgttggatgaggctggatctacagtctctactgtaggtatcagcattattttgggagtggctgagggtgagttcttcatccatgatgctgaaattcagaagtcagcacttcagattatcatcaattgtgtgtgtggcccagataaccgaatatccagtattggtaaatttatctctggtactcctcggagaaagctgcctcagaaccctaaaagcagtgagcacaccctggccaagatgtggaatgtggttcagtccaacaacggcatcaaggtgctcctgtccttactgtccattaagatgcccatcacagatgcagaccaaatccgggccctggcctgcaaagccctagtgggcctgtctcgcagtagcactgtccggcagatcatcagtaaactgccccttttcagcagctgccagatccagcagctgatgaaggagcctgtgctgcaggacaagcgcagtgaccatgtcaagttctgcaagtatgctgctgaactcattgaacgggtgtcaggaaaaccacttctcattggcactgatgtttccctagcacgactgcagaaagcagatgttgttgcccagtcaaggatctccttccctgagaaagagctgcttttgttgatacgaaaccatcttatttctaaagggcttggagaaacagcaaccgtgctgacaaaagaggctgacctgcccatgactgctgcctcccattcttctgcctttaccccagtcactgctgctgcttctcctgtctctctaccccgaacccctcgtatcgctaatggcattgcaactcgtctgggcagccatgctgctgtgggtgcctctgcgccttctgcccctactgctcatcctcagccacggcccccccagggtccgctagctctgcccggcccatcttatgcaggcaactcccctttgattggtagaatcagttttatcagagagaggccatcaccctgcaatggcaggaaaatcagagtgttgcggcagaagtcggaccatggtgcctacagccaaagcccagccataaaaaaacagctggacagacatcttccttccccacctacgctggacagtataatcacagagtatcttagagaacaacatgctcgctgcaagaatccagttgccacctgcccacctttctccctctttactcctcaccaatgtcctgagccaaaacagaggcggcaagcgccaataaactttacgtcaaggctaaaccgcagggcatcatttccaaagtatggaggggtggatggcggatgctttgataggcaccttatctttagcagattccgtcctatttcagtgttccgggaagccaatgaagatgagagtggcttcacctgctgtgcattctcagcacgggagcggttcctgatgcttggcacctgcacagggcagctgaagctctataatgtgtttagtggacaggaggaggccagctataactgtcacaactcagccatcacacatcttgaaccttccagggatgggtccttgctgctgacatctgctacttggagccagcctttgtctgcactttggggaatgaagtcagtatttgatatgaagcattccttcacagaagatcactatgttgagttcagtaagcactcccaggatcgggtcatcggcacaaaaggagacattgcccacatttatgatattcagactggcaacaagctgttgactctgtttaacccagatcttgccaacaactacaagaggaactgtgccacctttaatcctacagatgatcttgtcttaaatgatggcgtcctctgggatgtccgctctgcacaggccatccacaagtttgacaagttcaatatgaacatcagtggtgttttccatccaaatggactggaggtgatcattaatactgagatttgggaccttcgaacttttcatcttttgcatactgttcccgctctggatcagtgtcgcgtggtgttcaatcacacgggaacagtgatgtatggagctatgttgcaggcagatgatgaagatgacttaatggaagagaggatgaaaagcccctttgggtcatccttccgaacatttaatgcaactgactacaaacctatagcaaccattgatgtgaaacggaacatctttgacctgtgtacagacaccaaagactgctatcttgctgtcattgagaatcaaggcagcatggatgccctgaacatggacacagtatgcaggctgtatgaagtgggcaggcagcgtctggcagaggatgaggatgaagaggaggaccaggaagaggaagaacaggaggaagaagatgatgatgaagatgatgatgacaccgatgatttagatgagcttgacactgaccagttgctggaggcggagttggaggaggacgacaataatgagaacgcaggggaagatggggacaatgacttctctccctctgatgaggagctagcaaaccttctagaggagggagaggacggggaggatgaagactctgatgcagatgaggaggtggaactgatcctgggggacactgacagctctgacaactctgatttggaagatgacatcatcttatctctgaatgagtgaggagccatcactgcttggaagagattcttggcaggcgagaaactgagtcaaatgaattcagaacatattcccttctctttctcccagggctgtctgtcttttaaggagctgcatgccctgcattcagaagattatggcttagagagcctcattggcacccgagggtccttccagaatcaataaccaccacaaaaatgacaacagggactaggccctactctgcaccccccacatccaccccccaccatttcctaggatggacatatctttcaaggggaaaaaaaaaccatgtctctggggtatttcacaatatattttctttgtatagtgttctttacttaaagaacaagaaatagttttttataaaactttaaaaaggaaaaaaaaacaggcatttataactgagggtatgaacttatatccaccaggtctcttgtccctgcacttcattttctttggaagaaaatgatgtctaaagaacaatatagaggcatttttacatacgtatttaaatgaaaaggaaaatcgtggtttcttaaattgataaggattaagaatattttattataaatataatatatgattttttaacctgttttgttgcctcatatgctgtcaggttaatttgttttccttcgtgccagaggtggggaggaaggcactctgtctgctgggtaaatgcctaaattcactcaccttcatggtttgggggcagcatggtcattgtggatattggttttgtggagttgagggaacttaggatataagttcactccctctatttttctttgtgattcagtttttcaaaaatctttttttcttccctttctccccattgtggaaattacaaatcaaaggcctttttctttaatgtaaagtgtatttatttaaaaaaaatacaaaataaactacaagtctgtctttgttatggcctttccctattttcttttaccgaagtggggtgtgtcccttttttgcagctctagccaggccatagagaagacaccttccaggagaggcaaggagagcatgttctgcccacatagagcactccagggagagagaagaggggacaaatttggttgtgaagtaaacaagaaacacaagacggctaaaactctccaggggcaggtaaagccctgctgggctcagaagcactatagaatttgctgtacacactgaagtgggtctgtgtcacacaggtatttcttggtcctctggagagcagaggactcactcagctctttgcttcatgcctcgctttaatggtagtaaacacttaaccagtggaatagtctgactgctggtactgatggcatcagaagaaaacaggttaacaatcaagtagtgaaagcactatattctagtcattaactcaacggagccagtctcaactctgctgggagcacccacaggtctctgtgggggagacagggactataacagggaggcagaattcaggttggcttgacaacacaccttaggaacatgtgctaaggggctaaggaggcatcagctgtcttccttattctaccagggctgaaaatcggagtcacttaggaggcagcatgagaacagtggcacaccaccagtgaggcacatgttgcctttttgtctttaagcaacaccttagacagggcctgaaccctgggtgggggcactggatgcctgaagtaagtaagttttctcagtggggcagtctcataaaatcaccaggacattgaccacctgacctcccctaactagtgctggccaaggcctgagagttcacagaacctgctaggtcttaagagccaaaggaaggaagtggttgagggccaggaaagagaaggaatgtcatgccagggtgttactcctcaccaaaacttggcagttctttttggggccatgggacacctttctctgaagaggggttggataaggcaaaggttgaagtgtcttctctaggcacgttttctagcatgtttccttttacttggttctgtctcacaaagctgggaggtagatgattcttccgggtcctgagcacctgcttcatgaaggaagataggtagcccagagaagaagttttggacttaacaacataccaaggcagctctggcctgtgactcaggcgtttgttggagagctgcaggaaaaccactgcagtgtgcctgcaacaggacaagacccactcctgtttctggcggtaccagctaccctggaatggtggcgtgtcctgctgtacccaactgacttgcttaggtacctggcagctgtgaccacagctcaagtaaaaaaacaaaaacaggcaaataaataaacatgcttaacatgt

SEQ ID NO: 281005 - DNA, 5766 bp, Homo sapiens
gactctatatgatcccctgccttcatgtcctgcttacatttgaggcactaaagcacctagcatctctcctgctccataacaaatttgccacagaatttgttgcgcatggtggagtacagaaattactggaaatacctcgtccttctatggctgcaaccggtgtgtctatgtgtttgtattacctatcctacaatcaggatgccatggaaagagtttgcatgcatccccacaatgttctgtctgatgtggtgaactataccctgtggttaatggagtgttctcatgcttcaggatgctgccatgctaccatgtttttttcaatttgcttctcatttcgggccgtcttggagctctttgaccgctatgatggtcttcgtcgtctggtgaacttgatcagtactttggagattctaaatttggaagatcagggtgcacttctgagtgatgatgaaatatttgctagccgccaaactgggaaacatacctgcatggccttgcgcaaatactttgaggctcacctggccattaaattggaacaagtgaagcagtcacttcagaggactgagggtggcattcttgtccacccacaacccccgtacaaggcatgctcatatactcatgaacagattgtggaaatgatggaatttttgatagaatatggcccagcgcagctatattgggaaccagctgaagttttcctcaaactttcttgtgtgcaactcttgttgcagcttatttctattgcctgcaattggaagacctattatgcaaggaatgacactgtgcgctttgctttggatgtcctggctattcttactgtggtgccaaaaatccagctccagttggcagaatcagtggacgtgttggatgaggctggatctacagtctctactgtaggtatcagcattattttgggagtggctgagggtgagttcttcatccatgatgctgaaattcagaagtcagcacttcagattatcatcaattgtgtgtgtggcccagataaccgaatatccagtattggtaaatttatctctggtactcctcggagaaagctgcctcagaaccctaaaagcagtgagcacaccctggccaagatgtggaatgtggttcagtccaacaacggcatcaaggtgctcctgtccttactgtccattaagatgcccatcacagatgcagaccaaatccgggccctggcctgcaaagccctagtgggcctgtctcgcagtagcactgtccggcagatcatcagtaaactgccccttttcagcagctgccagatccagcagctgatgaaggagcctgtgctgcaggacaagcgcagtgaccatgtcaagttctgcaagtatgctgctgaactcattgaacgggtgtcaggaaaaccacttctcattggcactgatgtttccctagcacgactgcagaaagcagatgttgttgcccagtcaaggatctccttccctgagaaagagctgcttttgttgatacgaaaccatcttatttctaaagggcttggagaaacagcaaccgtgctgacaaaagaggctgacctgcccatgactgctgcctcccattcttctgcctttaccccagtcactgctgctgcttctcctgtctctctaccccgaacccctcgtatcgctaatggcattgcaactcgtctgggcagccatgctgctgtgggtgcctctgcgccttctgcccctactgctcatcctcagccacggcccccccagggtccgctagctctgcccggcccatcttatgcaggcaactcccctttgattggtagaatcagttttatcagagagaggccatcaccctgcaatggcaggaaaatcagagtgttgcggcagaagtcggaccatggtgcctacagccaaagcccagccataaaaaaacagctggacagacatcttccttccccacctacgctggacagtataatcacagagtatcttagagaacaacatgctcgctgcaagaatccagttgccacctgcccacctttctccctctttactcctcaccaatgtcctgagccaaaacagaggcggcaagcgccaataaactttacgtcaaggctaaaccgcagggcatcatttccaaagtatggaggggtggatggcggatgctttgataggcaccttatctttagcagattccgtcctatttcagtgttccgggaagccaatgaagatgagagtggcttcacctgctgtgcattctcagcacgggagcggttcctgatgcttggcacctgcacagggcagctgaagctctataatgtgtttagtggacaggaggaggccagctataactgtcacaactcagccatcacacatcttgaaccttccagggatgggtccttgctgctgacatctgctacttggagccagcctttgtctgcactttggggaatgaagtcagtatttgatatgaagcattccttcacagaagatcactatgttgagttcagtaagcactcccaggatcgggtcatcggcacaaaaggagacattgcccacatttatgatattcagactggcaacaagctgttgactctgtttaacccagatcttgccaacaactacaagaggaactgtgccacctttaatcctacagatgatcttgtcttaaatgatggcgtcctctgggatgtccgctctgcacaggccatccacaagtttgacaagttcaatatgaacatcagtggtgttttccatccaaatggactggaggtgatcattaatactgagatttgggaccttcgaacttttcatcttttgcatactgttcccgctctggatcagtgtcgcgtggtgttcaatcacacgggaacagtgatgtatggagctatgttgcaggcagatgatgaagatgacttaatggaagagaggatgaaaagcccctttgggtcatccttccgaacatttaatgcaactgactacaaacctatagcaaccattgatgtgaaacggaacatctttgacctgtgtacagacaccaaagactgctatcttgctgtcattgagaatcaaggcagcatggatgccctgaacatggacacagtatgcaggctgtatgaagtgggcaggcagcgtctggcagaggatgaggatgaagaggaggaccaggaagaggaagaacaggaggaagaagatgatgatgaagatgatgatgacaccgatgatttagatgagcttgacactgaccagttgctggaggcggagttggaggaggacgacaataatgagaacgcaggggaagatggggacaatgacttctctccctctgatgaggagctagcaaaccttctagaggagggagaggacggggaggatgaagactctgatgcagatgaggaggtggaactgatcctgggggacactgacagctctgacaactctgatttggaagatgacatcatcttatctctgaatgagtgaggagccatcactgcttggaagagattcttggcaggcgagaaactgagtcaaatgaattcagaacatattcccttctctttctcccagggctgtctgtcttttaaggagctgcatgccctgcattcagaagattatggcttagagagcctcattggcacccgagggtccttccagaatcaataaccaccacaaaaatgacaacagggactaggccctactctgcaccccccacatccaccccccaccatttcctaggatggacatatctttcaaggggaaaaaaaaaccatgtctctggggtatttcacaatatattttctttgtatagtgttctttacttaaagaacaagaaatagttttttataaaactttaaaaaggaaaaaaaaacaggcatttataactgagggtatgaacttatatccaccaggtctcttgtccctgcacttcattttctttggaagaaaatgatgtctaaagaacaatatagaggcatttttacatacgtatttaaatgaaaaggaaaatcgtggtttcttaaattgataaggattaagaatattttattataaatataatatatgattttttaacctgttttgttgcctcatatgctgtcaggttaatttgttttccttcgtgccagaggtggggaggaaggcactctgtctgctgggtaaatgcctaaattcactcaccttcatggtttgggggcagcatggtcattgtggatattggttttgtggagttgagggaacttaggatataagttcactccctctatttttctttgtgattcagtttttcaaaaatctttttttcttccctttctccccattgtggaaattacaaatcaaaggcctttttctttaatgtaaagtgtatttatttaaaaaaaatacaaaataaactacaagtctgtctttgttatggcctttccctattttcttttaccgaagtggggtgtgtcccttttttgcagctctagccaggccatagagaagacaccttccaggagaggcaaggagagcatgttctgcccacatagagcactccagggagagagaagaggggacaaatttggttgtgaagtaaacaagaaacacaagacggctaaaactctccaggggcaggtaaagccctgctgggctcagaagcactatagaatttgctgtacacactgaagtgggtctgtgtcacacaggtatttcttggtcctctggagagcagaggactcactcagctctttgcttcatgcctcgctttaatggtagtaaacacttaaccagtggaatagtctgactgctggtactgatggcatcagaagaaaacaggttaacaatcaagtagtgaaagcactatattctagtcattaactcaacggagccagtctcaactctgctgggagcacccacaggtctctgtgggggagacagggactataacagggaggcagaattcaggttggcttgacaacacaccttaggaacatgtgctaaggggctaaggaggcatcagctgtcttccttattctaccagggctgaaaatcggagtcacttaggaggcagcatgagaacagtggcacaccaccagtgaggcacatgttgcctttttgtctttaagcaacaccttagacagggcctgaaccctgggtgggggcactggatgcctgaagtaagtaagttttctcagtggggcagtctcataaaatcaccaggacattgaccacctgacctcccctaactagtgctggccaaggcctgagagttcacagaacctgctaggtcttaagagccaaaggaaggaagtggttgagggccaggaaagagaaggaatgtcatgccagggtgttactcctcaccaaaacttggcagttctttttggggccatgggacacctttctctgaagaggggttggataaggcaaaggttgaagtgtcttctctaggcacgttttctagcatgtttccttttacttggttctgtctcacaaagctgggaggtagatgattcttccgggtcctgagcacctgcttcatgaaggaagataggtagcccagagaagaagttttggacttaacaacataccaaggcagctctggcctgtgactcaggcgtttgttggagagctgcaggaaaaccactgcagtgtgcctgcaacaggacaagacccactcctgtttctggcggtaccagctaccctggaatggtggcgtgtcctgctgtacccaactgacttgcttaggtacctggcagctgtgaccacagctcaagtaaaaaaacaaaaacaggcaaataaataaacatgcttaacatgt

SEQ ID NO: 281006 - DNA, 5481 bp, Homo sapiens
gggcggagccgcctcggacgataaggaaattgagatttggagaagttaaataaccaagacttcacagacaaagtctcactccttttgcccaggccggtgtgcattggggtaatctcggctgactgcaacctccgtcccctccgagttcaagtgattctcctgcctcaacctcccgagtagctgggattacaggcaaagccatgactacagtagtggtacatgtggactccaaagctgagctcactaccctgctggagcagtgggaaaaggaacatggcagtgggcaggacatggtacctatccttaccaggatgtctcaattgattgaaaaagaaactgaagagtatcgtaaaggggatccagacccatttgatgatcgacatcctggtcgagctgatccagagtgtatgctgggccacttgctgagaatactcttcaagaatgatgatttcatgaatgcactggtgaatgcatatgtgatgacaagccgagagccccctttaaacactgcagcttgcagactcctattagacatcatgccagggctggaaactgctgtcgtctttcaagaaaaggagggaattgtcgagaatcttttcaaatgggcccgagaggccgatcaaccattgaggacatattctactggactgttaggaggtgctatggaaaatcaagacattgctgccaactatagagatgaaaattcacagctggtggcaatagtgcttcgaagactgagggagctacagctacaggaagtggctttgcggcaggaaaacaagcgtcccagtccacggaagctctcttctgaaccccttttgcctctggatgaggaggctgtggatatggactatggtgacatggctgtagatgtagtggatggagaccaagaggaagcttctggagacatggagatctcctttcatcttgattcaggccacaagactagtagcagagtgaactcaacaaccaaacctgaggatggaggattaaagaaaaacaagtcagcaaaacagggtgacagagagaactttaggaaagccaagcaaaagttgggtttctcatcttctgatccagatcgcatgtttgttgagctgtctaatagcagttggtcagaaatgtctccctgggtgattggcaccaattataccctttatcctatgactcctgctatcgagcagcgactcattctccaatatttgacccctctaggagaatatcaggagctacttcccatattcatgcaacttggatcacgggagctgatgatgttctatattgacctgaagcaaactaatgatgtcctgcttacatttgaggcactaaagcacctagcatctctcctgctccataacaaatttgccacagaatttgttgcgcatggtggagtacagaaattactggaaatacctcgtccttctatggctgcaaccggtgtgtctatgtgtttgtattacctatcctacaatcaggatgccatggaaagagtttgcatgcatccccacaatgttctgtctgatgtggtgaactataccctgtggttaatggagtgttctcatgcttcaggatgctgccatgctaccatgtttttttcaatttgcttctcatttcgggccgtcttggagctctttgaccgctatgatggtcttcgtcgtctggtgaacttgatcagtactttggagattctaaatttggaagatcagggtgcacttctgagtgatgatgaaatatttgctagccgccaaactgggaaacatacctgcatggccttgcgcaaatactttgaggctcacctggccattaaattggaacaagtgaagcagtcacttcagaggactgagggtggcattcttgtccacccacaacccccgtacaaggcatgctcatatactcatgaacagattgtggaaatgatggaatttttgatagaatatggcccagcgcagctatattgggaaccagctgaagttttcctcaaactttcttgtgtgcaactcttgttgcagcttatttctattgcctgcaattggaagacctattatgcaaggaatgacactgtgcgctttgctttggatgtcctggctattcttactgtggtgccaaaaatccagctccagttggcagaatcagtggacgtgttggatgaggctggatctacagtctctactgtaggtatcagcattattttgggagtggctgagggtgagttcttcatccatgatgctgaaattcagaagtcagcacttcagattatcatcaattgtgtgtgtggcccagataaccgaatatccagtattggtaaatttatctctggtactcctcggagaaagctgcctcagaaccctaaaagcagtgagcacaccctggccaagatgtggaatgtggttcagtccaacaacggcatcaaggtgctcctgtccttactgtccattaagatgcccatcacagatgcagaccaaatccgggccctggcctgcaaagccctagtgggcctgtctcgcagtagcactgtccggcagatcatcagtaaactgccccttttcagcagctgccagatccagcagctgatgaaggagcctgtgctgcaggacaagcgcagtgaccatgtcaagttctgcaagtatgctgctgaactcattgaacgggtgtcaggaaaaccacttctcattggcactgatgtttccctagcacgactgcagaaagcagatgttgttgcccagtcaaggatctccttccctgagaaagagctgcttttgttgatacgaaaccatcttatttctaaagggcttggagaaacagcaaccgtgctgacaaaagaggctgacctgcccatgactgctgcctcccattcttctgcctttaccccagtcactgctgctgcttctcctgtctctctaccccgaacccctcgtatcgctaatggcattgcaactcgtctgggcagccatgctgctgtgggtgcctctgcgccttctgcccctactgctcatcctcagccacggcccccccagggtccgctagctctgcccggcccatcttatgcaggcaactcccctttgattggtagaatcagttttatcagagagaggccatcaccctgcaatggcaggaaaatcagagtgttgcggcagaagtcggaccatggtgcctacagccaaagcccagccataaaaaaacagctggacagacatcttccttccccacctacgctggacagtataatcacagagtatcttagagaacaacatgctcgctgcaagaatccagttgccacctgcccacctttctccctctttactcctcaccaatgtcctgagccaaaacagaggcggcaagcgccaataaactttacgtcaaggctaaaccgcagggcatcatttccaaagtatggaggggtggatggcggatgctttgataggcaccttatctttagcagattccgtcctatttcagtgttccgggaagccaatgaagatgagagtggcttcacctgctgtgcattctcagcacgggagcggttcctgatgcttggcacctgcacagggcagctgaagctctataatgtgtttagtggacaggaggaggccagctataactgtcacaactcagccatcacacatcttgaaccttccagggatgggtccttgctgctgacatctgctacttggagccagcctttgtctgcactttggggaatgaagtcagtatttgatatgaagcattccttcacagaagatcactatgttgagttcagtaagcactcccaggatcgggtcatcggcacaaaaggagacattgcccacatttatgatattcagactggcaacaagctgttgactctgtttaacccagatcttgccaacaactacaagaggaactgtgccacctttaatcctacagatgatcttgtcttaaatgatggcgtcctctgggatgtccgctctgcacaggccatccacaagtttgacaagttcaatatgaacatcagtggtgttttccatccaaatggactggaggtgatcattaatactgagatttgggaccttcgaacttttcatcttttgcatactgttcccgctctggatcagtgtcgcgtggtgttcaatcacacgggaacagtgatgtatggagctatgttgcaggcagatgatgaagatgacttaatggaagagaggatgaaaagcccctttgggtcatccttccgaacatttaatgcaactgactacaaacctatagcaaccattgatgtgaaacggaacatctttgacctgtgtacagacaccaaagactgctatcttgctgtcattgagaatcaaggcagcatggatgccctgaacatggacacagtatgcaggctgtatgaagtgggcaggcagcgtctggcagaggatgaggatgaagaggaggaccaggaagaggaagaacaggaggaagaagatgatgatgaagatgatgatgacaccgatgatttagatgagcttgacactgaccagttgctggaggcggagttggaggaggacgacaataatgagaacgcaggggaagatggggacaatgacttctctccctctgatgaggagctagcaaaccttctagaggagggagaggacggggaggatgaagactctgatgcagatgaggaggtggaactgatcctgggggacactgacagctctgacaactctgatttggaagatgacatcatcttatctctgaatgagtgaggagccatcactgcttggaagagattcttggcaggcgagaaactgagtcaaatgaattcagaacatattcccttctctttctcccagggctgtctgtcttttaaggagctgcatgccctgcattcagaagattatggcttagagagcctcattggcacccgagggtccttccagaatcaataaccaccacaaaaatgacaacagggactaggccctactctgcaccccccacatccaccccccaccatttcctaggatggacatatctttcaaggggaaaaaaaaaccatgtctctggggtatttcacaatatattttctttgtatagtgttctttacttaaagaacaagaaatagttttttataaaactttaaaaaggaaaaaaaaacaggcatttataactgagggtatgaacttatatccaccaggtctcttgtccctgcacttcattttctttggaagaaaatgatgtctaaagaacaatatagaggcatttttacatacgtatttaaatgaaaaggaaaatcgtggtttcttaaattgataaggattaagaatattttattataaatataatatatgattttttaacctgttttgttgcctcatatgctgtcaggttaatttgttttccttcgtgccagaggtggggaggaaggcactctgtctgctgggtaaatgcctaaattcactcaccatttcctaggatggacatatctttcaaggggaaaaaaaaaccatgtctctggggtatttc

SEQ ID NO: 281007 - DNA, 6992 bp, Homo sapiens
gggcggagccgcctcggacgataaggaaattgagatttggagaagttaaataaccaagacttcacagacaaagtctcactccttttgcccaggccggtgtgcattggggtaatctcggctgactgcaacctccgtcccctccgagttcaagtgattctcctgcctcaacctcccgagtagctgggattacaggcaaagccatgactacagtagtggtacatgtggactccaaagctgagctcactaccctgctggagcagtgggaaaaggaacatggcagtgggcaggacatggtacctatccttaccaggatgtctcaattgattgaaaaagaaactgaagagtatcgtaaaggggatccagacccatttgatgatcgacatcctggtcgagctgatccagagtgtatgctgggccacttgctgagaatactcttcaagaatgatgatttcatgaatgcactggtgaatgcatatgtgatgacaagccgagagccccctttaaacactgcagcttgcagactcctattagacatcatgccagggctggaaactgctgtcgtctttcaagaaaaggagggaattgtcgagaatcttttcaaatgggcccgagaggccgatcaaccattgaggacatattctactggactgttaggaggtgctatggaaaatcaagacattgctgccaactatagagatgaaaattcacagctggtggcaatagtgcttcgaagactgagggagctacagctacaggaagtggctttgcggcaggaaaacaagcgtcccagtccacggaagctctcttctgaaccccttttgcctctggatgaggaggctgtggatatggactatggtgacatggctgtagatgtagtggatggagaccaagaggaagcttctggagacatggagatctcctttcatcttgattcaggccacaagactagtagcagagtgaactcaacaaccaaacctgaggatggaggattaaagaaaaacaagtcagcaaaacagggtgacagagagaactttaggaaagccaagcaaaagttgggtttctcatcttctgatccagatcgcatgtttgttgagctgtctaatagcagttggtcagaaatgtctccctgggtgattggcaccaattataccctttatcctatgactcctgctatcgagcagcgactcattctccaatatttgacccctctaggagaatatcaggagctacttcccatattcatgcaacttggatcacgggagctgatgatgttctatattgacctgaagcaaactaatgatgtcctgcttacatttgaggcactaaagcacctagcatctctcctgctccataacaaatttgccacagaatttgttgcgcatggtggagtacagaaattactggaaatacctcgtccttctatggctgcaaccggtgtgtctatgtgtttgtattacctatcctacaatcaggatgccatggaaagagtttgcatgcatccccacaatgttctgtctgatgtggtgaactataccctgtggttaatggagtgttctcatgcttcaggatgctgccatgctaccatgtttttttcaatttgcttctcatttcgggccgtcttggagctctttgaccgctatgatggtcttcgtcgtctggtgaacttgatcagtactttggagattctaaatttggaagatcagggtgcacttctgagtgatgatgaaatatttgctagccgccaaactgggaaacatacctgcatggccttgcgcaaatactttgaggctcacctggccattaaattggaacaagtgaagcagtcacttcagaggactgagggtggcattcttgtccacccacaacccccgtacaaggcatgctcatatactcatgaacagattgtggaaatgatggaatttttgatagaatatggcccagcgcagctatattgggaaccagctgaagttttcctcaaactttcttgtgtgcaactcttgttgcagcttatttctattgcctgcaattggaagacctattatgcaaggaatgacactgtgcgctttgctttggatgtcctggctattcttactgtggtgccaaaaatccagctccagttggcagaatcagtggacgtgttggatgaggctggatctacagtctctactgtaggtatcagcattattttgggagtggctgagggtgagttcttcatccatgatgctgaaattcagaagtcagcacttcagattatcatcaattgtgtgtgtggcccagataaccgaatatccagtattggtaaatttatctctggtactcctcggagaaagctgcctcagaaccctaaaagcagtgagcacaccctggccaagatgtggaatgtggttcagtccaacaacggcatcaaggtgctcctgtccttactgtccattaagatgcccatcacagatgcagaccaaatccgggccctggcctgcaaagccctagtgggcctgtctcgcagtagcactgtccggcagatcatcagtaaactgccccttttcagcagctgccagatccagcagctgatgaaggagcctgtgctgcaggacaagcgcagtgaccatgtcaagttctgcaagtatgctgctgaactcattgaacgggtgtcaggaaaaccacttctcattggcactgatgtttccctagcacgactgcagaaagcagatgttgttgcccagtcaaggatctccttccctgagaaagagctgcttttgttgatacgaaaccatcttatttctaaagggcttggagaaacagcaaccgtgctgacaaaagaggctgacctgcccatgactgctgcctcccattcttctgcctttaccccagtcactgctgctgcttctcctgtctctctaccccgaacccctcgtatcgctaatggcattgcaactcgtctgggcagccatgctgctgtgggtgcctctgcgccttctgcccctactgctcatcctcagccacggcccccccagggtccgctagctctgcccggcccatcttatgcaggcaactcccctttgattggtagaatcagttttatcagagagaggccatcaccctgcaatggcaggaaaatcagagtgttgcggcagaagtcggaccatggtgcctacagccaaagcccagccataaaaaaacagctggacagacatcttccttccccacctacgctggacagtataatcacagagtatcttagagaacaacatgctcgctgcaagaatccagttgccacctgcccacctttctccctctttactcctcaccaatgtcctgagccaaaacagaggcggcaagcgccaataaactttacgtcaaggctaaaccgcagggcatcatttccaaagtatggaggggtggatggcggatgctttgataggcaccttatctttagcagattccgtcctatttcagtgttccgggaagccaatgaagatgagagtggcttcacctgctgtgcattctcagcacgggagcggttcctgatgcttggcacctgcacagggcagctgaagctctataatgtgtttagtggacaggaggaggccagctataactgtcacaactcagccatcacacatcttgaaccttccagggatgggtccttgctgctgacatctgctacttggagccagcctttgtctgcactttggggaatgaagtcagtatttgatatgaagcattccttcacagaagatcactatgttgagttcagtaagcactcccaggatcgggtcatcggcacaaaaggagacattgcccacatcttgccaacaactacaagaggaactgtgccacctttaatcctacagatgatcttgtcttaaatgatggcgtcctctgggatgtccgctctgcacaggccatccacaagtttgacaagttcaatatgaacatcagtggtgttttccatccaaatggactggaggtgatcattaatactgagatttgggaccttcgaacttttcatcttttgcatactgttcccgctctggatcagtgtcgcgtggtgttcaatcacacgggaacagtgatgtatggagctatgttgcaggcagatgatgaagatgacttaatggaagagaggatgaaaagcccctttgggtcatccttccgaacatttaatgcaactgactacaaacctatagcaaccattgatgtgaaacggaacatctttgacctgtgtacagacaccaaagactgctatcttgctgtcattgagaatcaaggcagcatggatgccctgaacatggacacagtatgcaggctgtatgaagtgggcaggcagcgtctggcagaggatgaggatgaagaggaggaccaggaagaggaagaacaggaggaagaagatgatgatgaagatgatgatgacaccgatgatttagatgagcttgacactgaccagttgctggaggcggagttggaggaggacgacaataatgagaacgcaggggaagatggggacaatgacttctctccctctgatgaggagctagcaaaccttctagaggagggagaggacggggaggatgaagactctgatgcagatgaggaggtggaactgatcctgggggacactgacagctctgacaactctgatttggaagatgacatcatcttatctctgaatgagtgaggagccatcactgcttggaagagattcttggcaggcgagaaactgagtcaaatgaattcagaacatattcccttctctttctcccagggctgtctgtcttttaaggagctgcatgccctgcattcagaagattatggcttagagagcctcattggcacccgagggtccttccagaatcaataaccaccacaaaaatgacaacagggactaggccctactctgcaccccccacatccaccccccaccatttcctaggatggacatatctttcaaggggaaaaaaaaaccatgtctctggggtatttcacaatatattttctttgtatagtgttctttacttaaagaacaagaaatagttttttataaaactttaaaaaggaaaaaaaaacaggcatttataactgagggtatgaacttatatccaccaggtctcttgtccctgcacttcattttctttggaagaaaatgatgtctaaagaacaatatagaggcatttttacatacgtatttaaatgaaaaggaaaatcgtggtttcttaaattgataaggattaagaatattttattataaatataatatatgattttttaacctgttttgttgcctcatatgctgtcaggttaatttgttttccttcgtgccagaggtggggaggaaggcactctgtctgctgggtaaatgcctaaattcactcaccttcatggtttgggggcagcatggtcattgtggatattggttttgtggagttgagggaacttaggatataagttcactccctctatttttctttgtgattcagtttttcaaaaatctttttttcttccctttctccccattgtggaaattacaaatcaaaggcctttttctttaatgtaaagtgtatttatttaaaaaaaatacaaaataaactacaagtctgtctttgttatggcctttccctattttcttttaccgaagtggggtgtgtcccttttttgcagctctagccaggccatagagaagacaccttccaggagaggcaaggagagcatgttctgcccacatagagcactccagggagagagaagaggggacaaatttggttgtgaagtaaacaagaaacacaagacggctaaaactctccaggggcaggtaaagccctgctgggctcagaagcactatagaatttgctgtacacactgaagtgggtctgtgtcacacaggtatttcttggtcctctggagagcagaggactcactcagctctttgcttcatgcctcgctttaatggtagtaaacacttaaccagtggaatagtctgactgctggtactgatggcatcagaagaaaacaggttaacaatcaagtagtgaaagcactatattctagtcattaactcaacggagccagtctcaactctgctgggagcacccacaggtctctgtgggggagacagggactataacagggaggcagaattcaggttggcttgacaacacaccttaggaacatgtgctaaggggctaaggaggcatcagctgtcttccttattctaccagggctgaaaatcggagtcacttaggaggcagcatgagaacagtggcacaccaccagtgaggcacatgttgcctttttgtctttaagcaacaccttagacagggcctgaaccctgggtgggggcactggatgcctgaagtaagtaagttttctcagtggggcagtctcataaaatcaccaggacattgaccacctgacctcccctaactagtgctggccaaggcctgagagttcacagaacctgctaggtcttaagagccaaaggaaggaagtggttgagggccaggaaagagaaggaatgtcatgccagggtgttactcctcaccaaaacttggcagttctttttggggccatgggacacctttctctgaagaggggttggataaggcaaaggttgaagtgtcttctctaggcacgttttctagcatgtttccttttacttggttctgtctcacaaagctgggaggtagatgattcttccgggtcctgagcacctgcttcatgaaggaagataggtagcccagagaagaagttttggacttaacaacataccaaggcagctctggcctgtgactcaggcgtttgttggagagctgcaggaaaaccactgcagtgtgcctgcaacaggacaagacccactcctgtttctggcggtaccagctaccctggaatggtggcgtgtcctgctgtacccaactgacttgcttaggtacctggcagctgtgaccacagctcaagtaaaaaaacaaaaacaggcaaataaataaacatgcttaacatgt

SEQ ID NO: 281008 - DNA, 6347 bp, Homo sapiens
gggcggagccgcctcggacgataaggaaattgagatttggagaagttaaataaccaagacttcacagacaaagtctcactccttttgcccaggccggtgtgcattggggtaatctcggctgactgcaacctccgtcccctccgagttcaagtgattctcctgcctcaacctcccgagtagctgggattacaggcaaagccatgactacagtagtggtacatgtggactccaaagctgagctcactaccctgctggagcagtgggaaaaggaacatggcagtgggcaggacatggtacctatccttaccaggatgtctcaattgattgaaaaagaaactgaagagtatcgtaaaggggatccagacccatttgatgatcgacatcctggtcgagctgatccagagtgtatgctgggccacttgctgagaatactcttcaagaatgatgatttcatgaatgcactggtgaatgcatatgtgatgacaagccgagagccccctttaaacactgcagcttgcagactcctattagacatcatgccagggctggaaactgctgtcgtctttcaagaaaaggagggaattgtcgagaatcttttcaaatgggcccgagaggccgatcaaccattgaggacatattctactggactgttaggaggtgctatggaaaatcaagacattgctgccaactatagagatgaaaattcacagctggtggcaatagtgcttcgaagactgagggagctacagctacaggaagtggctttgcggcaggaaaacaagcgtcccagtccacggaagctctcttctgaaccccttttgcctctggatgaggaggctgtggatatggactatggtgacatggctgtagatgtagtggatggagaccaagaggaagcttctggagacatggagatctcctttcatcttgattcaggccacaagactagtagcagagtgaactcaacaaccaaacctgaggatggaggattaaagaaaaacaagtcagcaaaacagggtgacagagagaactttaggaaagccaagcaaaagttgggtttctcatcttctgatccagatcgcatgtttgttgagctgtctaatagcagttggtcagaaatgtctccctgggtgattggcaccaattataccctttatcctatgactcctgctatcgagcagcgactcattctccaatatttgacccctctaggagaatatcaggagctacttcccatattcatgcaacttggatcacgggagctgatgatgttctatattgacctgaagcaaactaatgatgtcctgcttacatttgaggcactaaagcacctagcatctctcctgctccataacaaatttgccacagaatttgttgcgcatggtggagtacagaaattactggaaatacctcgtccttctatggctgcaaccggtgtgtctatgtgtttgtattacctatcctacaatcaggatgccatggaaagagtttgcatgcatccccacaatgttctgtctgatgtggtgaactataccctgtggttaatggagtgttctcatgcttcaggatgctgccatgctaccatgtttttttcaatttgcttctcatttcgggccgtcttggagctctttgaccgctatgatggtcttcgtcgtctggtgaacttgatcagtactttggagattctaaatttggaagatcagggtgcacttctgagtgatgatgaaatatttgctagccgccaaactgggaaacatacctgcatggccttgcgcaaatactttgaggctcacctggccattaaattggaacaagtgaagcagtcacttcagaggactgagggtggcattcttgtccacccacaacccccgtacaaggcatgctcatatactcatgaacagattgtggaaatgatggaatttttgatagaatatggcccagcgcagctatattgggaaccagctgaagttttcctcaaactttcttgtgtgcaactcttgttgcagcttatttctattgcctgcaattggaagacctattatgcaaggaatgacactgtgcgctttgctttggatgtcctggctattcttactgtggtgccaaaaatccagctccagttggcagaatcagtggacgtgttggatgaggctggatctacagtctctactgtaggtatcagcattattttgggagtggctgagggtgagttcttcatccatgatgctgaaattcagaagtcagcacttcagattatcatcaattgtgtgtgtggcccagataaccgaatatccagtattggtaaatttatctctggtactcctcggagaaagctgcctcagaaccctaaaagcagtgagcacaccctggccaagatgtggaatgtggttcagtccaacaacggcatcaaggtgctcctgtccttactgtccattaagatgcccatcacagatgcagaccaaatccgggccctggcctgcaaagccctagtgggcctgtctcgcagtagcactgtccggcagatcatcagtaaactgccccttttcagcagctgccagatccagcagctgatgaaggagcctgtgctgcaggacaagcgcagtgaccatgtcaagttctgcaagtatgctgctgaactcattgaacgggtgtcaggaaaaccacttctcattggcactgatgtttccctagcacgactgcagaaagcagatgttgttgcccagtcaaggatctccttccctgagaaagagctgcttttgttgatacgaaaccatcttatttctaaagggcttggagaaacagcaaccgtgctgacaaaagaggctgacctgcccatgactgctgcctcccattcttctgcctttaccccagtcactgctgctgcttctcctgtctctctaccccgaacccctcgtatcgctaatggcattgcaactcgtctgggcagccatgctgctgtgggtgcctctgcgccttctgcccctactgctcatcctcagccacggcccccccagggtccgctagctctgcccggcccatcttatgcaggcaactcccctttgattggtagaatcagttttatcagagagaggccatcaccctgcaatggcaggaaaatcagagtgttgcggcagaagtcggaccatggtgcctacagccaaagcccagccataaaaaaacagctggacagacatcttccttccccacctacgctggacagtataatcacagagtatcttagagaacaacatgctcgctgcaagaatccagttgccacctgcccacctttctccctctttactcctcaccaatgtcctgagccaaaacagaggcggcaagcgccaataaactttacgtcaaggctaaaccgcagggcatcatttccaaagtatggaggggtggatggcggatgctttgataggcaccttatctttagcagattccgtcctatttcagtgttccgggaagccaatgaagatgagagtggcttcacctgctgtgcattctcagcacgggagcggttcctgatgcttggcacctgcacagggcagctgaagctctataatgtgtttagtggacaggaggaggccagctataactgtcacaactcagccatcacacatcttgaaccttccagggatgggtccttgctgctgacatctgctacttggagccagcctttgtctgcactttggggaatgaagtcagtatttgatatgaagcattccttcacagaagatcactatgttgagttcagtaagcactcccaggatcgggtcatcggcacaaaaggagacattgcccacatttatgatattcagactggcaacaagctgttgactctgtttaacccagatcttgccaacaactacaagaggaactgtgccacctttaatcctacagatgatcttgtcttaaatgatggcgtcctctgggatgtccgctctgcacaggccatccacaagtttgacaagttcaatatgaacatcagtggtgttttccatccaaatggactggaggtgatcattaatactgagatttgggaccttcgaacttttcatcttttgcatactgttcccgctctggatcagtgtcgcgtggtgttcaatcacacgggaacagtgatgtatggagctatgttgcaggcagatgatgaagatgacttaatggaagagaggatgaaaagcccctttgggtcatccttccgaacatttaatgcaactgactacaaacctatagcaaccattgatgtgaaacggaacatctttgacctgtgtacagacaccaaagactgctatcttgctgtcattgagaatcaaggcagcatggatgccctgaacatggacacagtatgcaggctgtatgaagtgggcaggcagcgtctggcagaggatgaggatgaagaggaggaccaggaagaggaagaacaggaggaagaagatgatgatgaagatgatgatgacaccgatgatttagatgagcttgacactgaccagttgctggaggcggagttggaggaggacgacaataatgagaacgcaggggaagatggggacaatgacttctctccctctgatgaggagctagcaaaccttctagaggagggagaggacggggaggatgaagactctgatgcagatgaggaggtggaactgatcctgggggacactgacagctctgacaactctgatttggaagatgacatcatcttatctctgaatgagtgaggagccatcactgcttggaagagattcttggcaggcgagaaactgagtcaaatgaattcagaacatattcccttctctttctcccagggctgtctgtcttttaaggagctgcatgccctgcattcagaagattatggcttagagagcctcattggcacccgagggtccttccagaatcaataaccaccacaaaaatgacaacagggactaggccctactctgcaccccccacatccaccccccaccatttcctaggatggacatatctttcaacactgacagctctgacaactctgatttggaagatgacatcatcttatctctgaatgagtgaggagccatcactgcttggaagagattcttggcagagaagaggggacaaatttggttgtgaagtaaacaagaaacacaagacggctaaaactctccaggggcaggtaaagccctgctgggctcagaagcactatagaatttgctgtacacactgaagtgggtctgtgtcacacaggtatttcttggtcctctggagagcagaggactcactcagctctttgcttcatgcctcgctttaatggtagtaaacacttaaccagtggaatagtctgactgctggtactgatggcatcagaagaaaacaggttaacaatcaagtagtgaaagcactatattctagtcattaactcaacggagccagtctcaactctgctgggagcacccacaggtctctgtgggggagacagggactataacagggaggcagaattcaggttggcttgacaacacaccttaggaacatgtgctaaggggctaaggaggcatcagctgtcttccttattctaccagggctgaaaatcggagtcacttaggaggcagcatgagaacagtggcacaccaccagtgaggcacatgttgcctttttgtctttaagcaacaccttagacagggcctgaaccctgggtgggggcactggatgcctgaagtaagtaagttttctcagtggggcagtctcataaaatcaccaggacattgaccacctgacctcccctaactagtgctggccaaggcctgagagttcacagaacctgctaggtcttaagagccaaaggaaggaagtggttgagggccaggaaagagaaggaatgtcatgccagggtgttactcctcaccaaaacttggcagttctttttggggccatgggacacctttctctgaagaggggttggataaggcaaaggttgaagtgtcttctctaggcacgttttctagcatgtttccttttacttggttctgtctcacaaagctgggaggtagatgattcttccgggtcctgagcacctgcttcatgaaggaagataggtagcccagagaagaagttttggacttaacaacataccaaggcagctctggcctgtgactcaggcgtttgttggagagctgcaggaaaaccactgcagtgtgcctgcaacaggacaagacccactcctgtttctggcggtaccagctaccctggaatggtggcgtgtcctgctgtacccaactgacttgcttaggtacctggcagctgtgaccacagctcaagtaaaaaaacaaaaacaggcaaataaataaacatgcttaacatgt

SEQ ID NO: 281009 - DNA, 5484 bp, Homo sapiens
gggcggagccgcctcggacgataaggaaattgagatttggagaagttaaataaccaagacttcacagacaaagtctcactccttttgcccaggccggtgtgcattggggtaatctcggctgactgcaacctccgtcccctccgagttcaagtgattctcctgcctcaacctcccgagtagctgggattacaggcaaagccatgactacagtagtggtacatgtggactccaaagctgagctcactaccctgctggagcagtgggaaaaggaacatggcagtgggcaggacatggtacctatccttaccaggatgtctcaattgattgaaaaagaaactgaagagtatcgtaaaggggatccagacccatttgatgatcgacatcctggtcgagctgatccagagtgtatgctgggccacttgctgagaatactcttcaagaatgatgatttcatgaatgcactggtgaatgcatatgtgatgacaagccgagagccccctttaaacactgcagcttgcagactcctattagacatcatgccagggctggaaactgctgtcgtctttcaagaaaaggagggaattgtcgagaatcttttcaaatgggcccgagaggccgatcaaccattgaggacatattctactggactgttaggaggtgctatggaaaatcaagacattgctgccaactatagagatgaaaattcacagctggtggcaatagtgcttcgaagactgagggagctacagctacaggaagtggctttgcggcaggaaaacaagcgtcccagtccacggaagctctcttctgaaccccttttgcctctggatgaggaggctgtggatatggactatggtgacatggctgtagatgtagtggatggagaccaagaggaagcttctggagacatggagatctcctttcatcttgattcaggccacaagactagtagcagagtgaactcaacaaccaaacctgaggatggaggattaaagaaaaacaagtcagcaaaacagggtgacagagagaactttaggaaagccaagcaaaagttgggtttctcatcttctgatccagatcgcatgtttgttgagctgtctaatagcagttggtcagaaatgtctccctgggtgattggcaccaattataccctttatcctatgactcctgctatcgagcagcgactcattctccaatatttgacccctctaggagaatatcaggagctacttcccatattcatgcaacttggatcacgggagctgatgatgttctatattgacctgaagcaaactaatgatgtcctgcttacatttgaggcactaaagcacctagcatctctcctgctccataacaaatttgccacagaatttgttgcgcatggtggagtacagaaattactggaaatacctcgtccttctatggctgcaaccggtgtgtctatgtgtttgtattacctatcctacaatcaggatgccatggaaagagtttgcatgcatccccacaatgttctgtctgatgtggtgaactataccctgtggttaatggagtgttctcatgcttcaggatgctgccatgctaccatgtttttttcaatttgcttctcatttcgggccgtcttggagctctttgaccgctatgatggtcttcgtcgtctggtgaacttgatcagtactttggagattctaaatttggaagatcagggtgcacttctgagtgatgatgaaatatttgctagccgccaaactgggaaacatacctgcatggccttgcgcaaatactttgaggctcacctggccattaaattggaacaagtgaagcagtcacttcagaggactgagggtggcattcttgtccacccacaacccccgtacaaggcatgctcatatactcatgaacagattgtggaaatgatggaatttttgatagaatatggcccagcgcagctatattgggaaccagctgaagttttcctcaaactttcttgtgtgcaactcttgttgcagcttatttctattgcctgcaattggaagacctattatgcaaggaatgacactgtgcgctttgctttggatgtcctggctattcttactgtggtgccaaaaatccagctccagttggcagaatcagtggacgtgttggatgaggctggatctacagtctctactgtaggtatcagcattattttgggagtggctgagggtgagttcttcatccatgatgctgaaattcagaagtcagcacttcagattatcatcaattgtgtgtgtggcccagataaccgaatatccagtattggtaaatttatctctggtactcctcggagaaagctgcctcagaaccctaaaagcagtgagcacaccctggccaagatgtggaatgtggttcagtccaacaacggcatcaaggtgctcctgtccttactgtccattaagatgcccatcacagatgcagaccaaatccgggccctggcctgcaaagccctagtgggcctgtctcgcagtagcactgtccggcagatcatcagtaaactgccccttttcagcagctgccagatccagcagctgatgaaggagcctgtgctgcaggacaagcgcagtgaccatgtcaagttctgcaagtatgctgctgaactcattgaacgggtgtcaggaaaaccacttctcattggcactgatgtttccctagcacgactgcagaaagcagatgttgttgcccagtcaaggatctccttccctgagaaagagctgcttttgttgatacgaaaccatcttatttctaaagggcttggagaaacagcaaccgtgctgacaaaagaggctgacctgcccatgactgctgcctcccattcttctgcctttaccccagtcactgctgctgcttctcctgtctctctaccccgaacccctcgtatcgctaatggcattgcaactcgtctgggcagccatgctgctgtgggtgcctctgcgccttctgcccctactgctcatcctcagccacggcccccccagggtccgctagctctgcccggcccatcttatgcaggcaactcccctttgattggtagaatcagttttatcagagagaggccatcaccctgcaatggcaggaaaatcagagtgttgcggcagaagtcggaccatggtgcctacagccaaagcccagccataaaaaaacagctggacagacatcttccttccccacctacgctggacagtataatcacagagtatcttagagaacaacatgctcgctgcaagaatccagttgccacctgcccacctttctccctctttactcctcaccaatgtcctgagccaaaacagaggcggcaagcgccaataaactttacgtcaaggctaaaccgcagggcatcatttccaaagtatggaggggtggatggcggatgctttgataggcaccttatctttagcagattccgtcctatttcagtgttccgggaagccaatgaagatgagagtggcttcacctgctgtgcattctcagcacgggagcggttcctgatgcttggcacctgcacagggcagctgaagctctataatgtgtttagtggacaggaggaggccagctataactgtcacaactcagccatcacacatcttgaaccttccagggatgggtccttgctgctgacatctgctacttggagccagcctttgtctgcactttggggaatgaagtcagtatttgatatgaagcattccttcacagaagatcactatgttgagttcagtaagcactcccaggatcgggtcatcggcacaaaaggagacattgcccacatttatgatattcagactggcaacaagctgttgactctgtttaacccagatcttgccaacaactacaagaggaactgtgccacctttaatcctacagatgatcttgtcttaaatgatggcgtcctctgggatgtccgctctgcacaggccatccacaagtttgacaagttcaatatgaacatcagtggtgttttccatccaaatggactggaggtgatcattaatactgagatttgggaccttcgaacttttcatcttttgcatactgttcccgctctggatcagtgtcgcgtggtgttcaatcacacgggaacagtgatgtatggagctatgttgcaggcagatgatgaagatgacttaatggaagagaggatgaaaagcccctttgggtcatccttccgaacatttaatgcaactgactacaaacctatagcaaccattgatgtgaaacggaacatctttgacctgtgtacagacaccaaagactgctatcttgctgtcattgagaatcaaggcagcatggatgccctgaacatggacacagtatgcaggctgtatgaagtgggcaggcagcgtctggcagaggatgaggatgaagaggaggaccaggaagaggaagaacaggaggaagaagatgatgatgaagatgatgatgacaccgatgatttagatgagcttgacactgaccagttgctggaggcggagttggaggaggacgacaataatgagaacgcaggggaagatggggacaatgacttctctccctctgatgaggagctagcaaaccttctagaggagggagaggacggggaggatgaagactctgatgcagatgaggaggtggaactgatcctgggggacactgacagctctgacaactctgatttggaagatgacatcatcttatctctgaatgagtgaggagccatcactgcttggaagagattcttggcaggcgagaaactgagtcaaatgaattcagaacatattcccttctctttctcccagggctgtctgtcttttaaggagctgcatgccctgcattcagaagattatggcttagagagcctcattggcacccgagggtccttccagaatcaataaccaccacaaaaatgacaacagggactaggccctactctgcaccccccacatccaccccccaccatttcctaggatggacatatctttcaacactgacagctctgacaactctgatttggaagatgacatcatcttatctctgaatgagtgaggagccatcactgcttggaagagattcttggcagagaagaggggacaaatttggttgtgaagtaaacaagaaacacaagacggctaaaactctccaggggcagctgggaggtagatgattcttccgggtcctgagcacctgcttcatgaaggaagataggtagcccagagaagaagttttggacttaacaacataccaaggcagctctggcctgtgactcaggcgtttgttggagagctgcaggaaaaccactgcagtgtgcctgcaacaggacaagacccactcctgtttctggcggtaccagctaccctggaatggtggcgtgtcctgctgtacccaactgacttgcttaggtacctggcagctgtgaccacagctcaagtaaaaaaacaaaaacaggcaaataaataaacatgcttaacatgt

SEQ ID NO: 281010 - DNA, 3890 bp, Homo sapiens
gggcggagccgcctcggacgataaggaaattgagatttggagaagttaaataaccaagacttcacagacaaagtctcactccttttgcccaggccggtgtgcattggggtaatctcggctgactgcaacctccgtcccctccgagttcaagtgattctcctgcctcaacctcccgagtagctgggattacaggcaaagccatgactacagtagtggtacatgtggactccaaagctgagctcactaccctgctggagcagtgggaaaaggaacatggcagtgggcaggacatggtacctatccttaccaggatgtctcaattgattgaaaaagaaactgaagagtatcgtaaaggggatccagacccatttgatgatcgacatcctggtcgagctgatccagagtgtatgctgggccacttgctgagaatactcttcaagaatgatgatttcatgaatgcactggtgaatgcatatgtgatgacaagccgagagccccctttaaacactgcagcttgcagactcctattagacatcatgccagggctggaaactgctgtcgtctttcaagaaaaggagggaattgtcgagaatcttttcaaatgggcccgagaggccgatcaaccattgaggacatattctactggactgttaggaggtgctatggaaaatcaagacattgctgccaactatagagatgaaaattcacagctggtggcaatagtgcttcgaagactgagggagctacagctacaggaagtggctttgcggcaggaaaacaagcgtcccagtccacggaagctctcttctgaaccccttttgcctctggatgaggaggctgtggatatggactatggtgacatggctgtagatgtagtggatggagaccaagaggaagcttctggagacatggagatctcctttcatcttgattcaggccacaagactagtagcagagtgaactcaacaaccaaacctgaggatggaggattaaagaaaaacaagtcagcaaaacagggtgacagagagaactttaggaaagccaagcaaaagttgggtttctcatcttctgatccagatcgcatgtttgttgagctgtctaatagcagttggtcagaaatgtctccctgggtgattggcaccaattataccctttatcctatgactcctgctatcgagcagcgactcattctccaatatttgacccctctaggagaatatcaggagctacttcccatattcatgcaacttggatcacgggagctgatgatgttctatattgacctgaagcaaactaatgatgtcctgcttacatttgaggcactaaagcacctagcatctctcctgctccataacaaatttgccacagaatttgttgcgcatggtggagtacagaaattactggaaatacctcgtccttctatggctgcaaccggtgtgtctatgtgtttgtattacctatcctacaatcaggatgccatggaaagagtttgcatgcatccccacaatgttctgtctgatgtggtgaactataccctgtggttaatggagtgttctcatgcttcaggatgctgccatgctaccatgtttttttcaatttgcttctcatttcgggccgtcttggagctctttgaccgctatgatggtcttcgtcgtctggtgaacttgatcagtactttggagattctaaatttggaagatcagggtgcacttctgagtgatgatgaaatatttgctagccgccaaactgggaaacatacctgcatggccttgcgcaaatactttgaggctcacctggccattaaattggaacaagtgaagcagtcacttcagaggactgagggtggcattcttgtccacccacaacccccgtacaaggcatgctcatatactcatgaacagattgtggaaatgatggaatttttgatagaatatggcccagcgcagctatattgggaaccagctgaagttttcctcaaactttcttgtgtgcaactcttgttgcagcttatttctattgcctgcaattggaagacctattatgcaaggaatgacactgtgcgctttgctttggatgtcctggctattcttactgtggtgccaaaaatccagctccagttggcagaatcagtggacgtgttggatgaggctggatctacagtctctactgtaggtatcagcattattttgggagtggctgagggtgagttcttcatccatgatgctgaaattcagaagtcagcacttcagattatcatcaattgtgtgtgtggcccagataaccgaatatccagtattggtaaatttatctctggtactcctcggagaaagctgcctcagaaccctaaaagcagtgagcacaccctggccaagatgtggaatgtggttcagtccaacaacggcatcaaggtgctcctgtccttactgtccattaagatgcccatcacagatgcagaccaaatccgggccctggcctgcaaagccctagtgggcctgtctcgcagtagcactgtccggcagatcatcagtaaactgccccttttcagcagctgccagatccagcagctgatgaaggagcctgtgctgcaggacaagcgcagtgaccatgtcaagttctgcaagtatgctgctgaactcattgaacgggtgtcaggaaaaccacttctcattggcactgatgtttccctagcacgactgcagaaagcagatgttgttgcccagtcaaggatctccttccctgagaaagagctgcttttgttgatacgaaaccatcttatttctaaagggcttggagaaacagcaaccgtgctgacaaaagaggctgacctgcccatgactgctgcctcccattcttctgcctttaccccagtcactgctgctgcttctcctgtctctctaccccgaacccctcgtatcgctaatggcattgcaactcgtctgggcagccatgctgctgtgggtgcctctgcgccttctgcccctactgctcatcctcagccacggcccccccagggtccgctagctctgcccggcccatcttatgcaggcaactcccctttgattggtagaatcagttttatcagagagaggccatcaccctgcaatggcaggaaaatcagagtgttgcggcagaagtcggaccatggtgcctacagccaaagcccagccataaaaaaacagctggacagacatcttccttccccacctacgctggacagtataatcacagagtatcttagagaacaacatgctcgctgcaagaatccagttgccacctgcccacctttctccctctttactcctcaccaatgtcctgagccaaaacagaggcggcaagcgccaataaactttacgtcaaggctaaaccgcagggcatcatttccaaagtatggaggggtggatggcggatgctttgataggcaccttatctttagcagattccgtcctatttcagtgttccgggaagccaatgaagatgagagtggcttcacctgctgtgcattctcagcacgggagcggttcctgatgcttggcacctgcacagggcagctgaagctctataatgtgtttagtggacaggaggaggccagctataactgtcacaactcagccatcacacatcttgaaccttccagggatgggtccttgctgctgacatctgctacttggagccagcctttgtctgcactttggggaatgaagtcagtatttgatatgaagtatgtatctgcttttggaacctagtctgtgctttatttacctagtttataccccccttcatttggttcttagactggaagccttttggggaaagaggatgctgtcggttattgttaacttctctcttcctcatctaagactcatgtttaataagactttatctttcttaat

SEQ ID NO: 281011 - DNA, 1216 bp, Homo sapiens
cagccaggtggaaggcgccccgcttgcagcaaggtaacgcgcagcagccccagccgtccgcagtgaaacagccggagcagaagatacttttatttctcggcccgtattaacactcagctctacaaaataacctataggttttaacttccttctctttcattgaaaaaggttccttgaaaaatcctgtcctcccattccccggggttcccttacttttagttcatacagataatttccctgtcagatttcctcattgcattttgaactcataaaacatgcacataaaaatagcatgttacaaatttatggagaaaatgggctctgtctcttaaatttgttgactcgaaacattttgggtggggggtcttttttcgtttttagaagaaaggctttttagaaaactatgtacataatctgacttctcctccccgcattgcaacgccgaaaataaaatttttcacaatgcatttacaagaaataatacaaaacccaaaaaaaaaaatggaaatgctcagatacataaagttttacaaaacccagaatataactccgccgtctgaaggagggggtggtggtggtaatctctttgtataaattaacaaaccaacccaaaagagcggtaacaactacaaaaaacttgtaagtgcttggacctgccttactacatttataacaaatgcgacgagctccgcgtcacttgggctccggcggtcggcgccgtccggaagcaacgcggaggaaagtgagcgcgccggccggtatacaaaagtgggcttcgcctctcgcctcgttttgacttttttgtcccctcgagcaaagaaaacgctttccgcttcctccgtaggtgataaatactgtacaaaaagtctcaagaaaacaccgaagttcagtctaaaacccaagtctggtgtcagcgcccggcggtcgccagggtctccggggaaggtgagtgggggacacgcgtcacccggcgttcgtctccagtattttccttttgacaagaatgtgggaacgtctgtacaaaagccaggccgcgccggggcggggcgggagccgggcgcgggccgcgagctcgtgggtcgccgccgcagagtccccggcgtcccgaaggcgctagatgtgcgtcaggggcaccgtgccgttcacgcccacgcccgcgcccgcgccctggtagtgctgcggcagcgagtgcagccggctctgcgccgcggccgca

SEQ ID NO: 281012 - DNA, 134 bp, Homo sapiens
ccaaggtggcagagtcaggtagggccctacccccagccccgcctccagagcagcgagtgctacccagatgcatgatgtacaggaacatgcaatagaaatgctgaaaagtgacgaggattcaaacggaacttgtc

SEQ ID NO: 281013 - DNA, 1538 bp, Homo sapiens
ccggcagggggagcgaggaggaagggaaccgcggccgggccagcggaggcggcggagcgcaccgcccaccagggctcagggtcctccgaccgggtgaagcttcgctggctgccaggatccccggcagggatgcacttcagcaccgtcaccagggacatggaagccttcacggccagcagcctgagcagcctgggggccgcggggggcttcccgggcgccgcgtcgcccggcgccgacccgtacggcccgcgcgagcccccgccgccgccgccgcgctacgacccgtgcgccgccgccgcccccggcgccccgggcccgccgccgccgccgcacgcctacccgtttgcgccggccgccggggccgccaccagcgccgccgccgagcccgagggccccggggccagctgcgcggccgcagccaaggcgccggtgaagaagaacgcgaaggtggccggtgtgagcgtgcagctagagatgaaggcgctgtgggacgagttcaaccagctgggcaccgagatgatcgtcaccaaggccggcaggcggatgtttcccaccttccaagtgaagctcttcggcatggatcccatggccgactatatgctgctcatggacttcgtgccggtggacgataagcgctaccggtacgccttccacagctcctcctggctggtggcggggaaggccgaccctgccacgccaggccgcgtgcactaccacccggactcgcctgccaagggcgcgcagtggatgaagcaaatcgtgtccttcgacaagctcaagctgaccaacaacctactggacgacaacggccacattattctgaattccatgcacagataccagccccgcttccacgtggtctatgtggacccacgcaaagatagcgagaaatatgccgaggagaacttcaaaacctttgtgttcgaggagacacgattcaccgcggtcactgcctaccagaaccatcggatcacgcagctcaagattgccagcaatcccttcgcgaaaggcttccgggactgtgaccctgaggactggccccggaaccaccggcccggcgcactgccgctcatgagcgccttcgcgcgctcgcggaaccccgtggcttccccgacgcagcccagcggcacggagaaagggctggtcacagaaggctctgggctccaacctggcttgctggacgtgctcttgaagcccccaagtaagaagtctgagtccctgagaccaccacactgcaaggacacttgaaggtactcaggtttcagagcccaagtcaggaggtcaagtgtgcatgcaagaggtggcaggggacagatgtgctgctgttcccaggccacctgcacagctggatggtggaagcagttcacttaaaggccatgagttactcgggaggctgaggcaggaggatcacttgagcctattagttggaggctgcagtaagctatgatcatgccactgcactccagcctgggtgacagagtgagacccccactgtccctggtctcttaaaagaaaaaacaaacaaacaaaccaaaaaa

SEQ ID NO: 281014 - DNA, 2087 bp, Homo sapiens
ccggcagggggagcgaggaggaagggaaccgcggccgggccagcggaggcggcggagcgcaccgcccaccagggctcagggtcctccgaccgggtgaagcttcgctggctgccaggatccccggcagggatgcacttcagcaccgtcaccagggacatggaagccttcacggccagcagcctgagcagcctgggggccgcggggggcttcccgggcgccgcgtcgcccggcgccgacccgtacggcccgcgcgagcccccgccgccgccgccgcgctacgacccgtgcgccgccgccgcccccggcgccccgggcccgccgccgccgccgcacgcctacccgtttgcgccggccgccggggccgccaccagcgccgccgccgagcccgagggccccggggccagctgcgcggccgcagccaaggcgccggtgaagaagaacgcgaaggtggccggtgtgagcgtgcagctagagatgaaggcgctgtgggacgagttcaaccagctgggcaccgagatgatcgtcaccaaggccggcaggcggatgtttcccaccttccaagtgaagctcttcggcatggatcccatggccgactatatgctgctcatggacttcgtgccggtggacgataagcgctaccggtacgccttccacagctcctcctggctggtggcggggaaggccgaccctgccacgccaggccgcgtgcactaccacccggactcgcctgccaagggcgcgcagtggatgaagcaaatcgtgtccttcgacaagctcaagctgaccaacaacctactggacgacaacggccacattattctgaattccatgcacagataccagccccgcttccacgtggtctatgtggacccacgcaaagatagcgagaaatatgccgaggagaacttcaaaacctttgtgttcgaggagacacgattcaccgcggtcactgcctaccagaaccatcggatcacgcagctcaagattgccagcaatcccttcgcgaaaggcttccgggactgtgaccctgaggactggccccggaaccaccggcccggcgcactgccgctcatgagcgccttcgcgcgctcgcggaaccccgtggcttccccgacgcagcccagcggcacggagaaagacgcggctgaggcccggcgagaattccagcgcgacgcgggcgggccagcagtgctcggggacccggcgcatcctccgcagctgctggcccgggtgctaagcccctcgctgcccggggccggcggcgccggcggcttagtcccgctgcccggcgcgcccggaggccggcccagtcccccgaaccccgagctgcgcctggaggcgcccggcgcatcggagccgctgcaccaccacccctacaaatatccggccgccgcctacgaccactatctcggggccaagagccggccggcgccctacccgctgcccggcctgcgtggccacggctaccacccgcacgcgcatccgcaccaccaccaccaccccgtgagtccagccgccgcggccgccgccgccgctgccgcagctgccgcggccgccaacatgtactcgtcggccggagccgcgccgcccggctcctacgactattgccccagataacacgggccctgtcgcgctcccgccccggtcctgcacagccccgaagttcgccgggcccggccaccctgccccaagggcaagcaaggaatacgttcccccagccccaggggccaccgcggctctccccttccccagcctcgaagccatgggggccccctcgccacccccagccccttgggctatcgaagtatccggttccccagtccctggagccaccgcgggtccttccccggccccgagggccaagggggtccccgcccgccagtgccaaagcgcccggtcggaggcggaaggaagtgatatttattgttctccccgagaccgcgtcgcccgcggcccggccggcagttgcagtgtagacagcccgagagccccgcctgcaggcggtgtagatacatgtagatactgtagatactgtagataccgccccggcgccgacttgataaacggtttcgcctcttttggaaaaa

SEQ ID NO: 281015 - DNA, 1462 bp, Homo sapiens
ccggcagggggagcgaggaggaagggaaccgcggccgggccagcggaggcggcggagcgcaccgcccaccagggctcagggtcctccgaccgggtgaagcttcgctggctgccaggatccccggcagggatgcacttcagcaccgtcaccagggacatggaagccttcacggccagcagcctgagcagcctgggggccgcggggggcttcccgggcgccgcgtcgcccggcgccgacccgtacggcccgcgcgagcccccgccgccgccgccgcgctacgacccgtgcgccgccgccgcccccggcgccccgggcccgccgccgccgccgcacgcctacccgtttgcgccggccgccggggccgccaccagcgccgccgccgagcccgagggccccggggccagctgcgcggccgcagccaaggcgccggtgaagaagaacgcgaaggtggccggtgtgagcgtgcagctagagatgaaggcgctgtgggacgagttcaaccagctgggcaccgagatgatcgtcaccaaggccggcaggcggatgtttcccaccttccaagtgaagctcttcggcatggatcccatggccgactatatgctgctcatggacttcgtgccggtggacgataagcgctaccggtacgccttccacagctcctcctggctggtggcggggaaggccgaccctgccacgccaggccgcgtgcactaccacccggactcgcctgccaagggcgcgcagtggatgaagcaaatcgtgtccttcgacaagctcaagctgaccaacaacctactggacgacaacggccacattattctgaattccatgcacagataccagccccgcttccacgtggtctatgtggacccacgcaaagatagcgagaaatatgccgaggagaacttcaaaacctttgtgttcgaggagacacgattcaccgcggtcactgcctaccagaaccatcggatcacgcagctcaagattgccagcaatcccttcgcgaaaggcttccgggactgtgaccctgaggactggccccggaaccaccggcccggcgcactgccgctcatgagcgccttcgcgcgctcgcggaaccccgtggcttccccgacgcagcccagcggcacggagaaaggtggacatgtcctgaaggacaaggaagtgaaagctgagacgtctaggaacacaccagagagagaagtggagcttctgagggatgcaggtggctgtgtgaacctggggctcccctgccccgcagagtgccaacccttcaatacccagggcctggtggctgggaggaccgcaggtgaccgtctttgttgaatgctgaggccgggccatgggcacatggagttgtcgtgtttcccttcactttggttcatgtttgaaatttccaaaattaaaaaaacagtgacttgttcagtaaattccaatatgaataaagtgcatgttttgtaat

SEQ ID NO: 281016 - DNA, 1001 bp, Homo sapiens
ccggcagggggagcgaggaggaagggaaccgcggccgggccagcggaggcggcggagcgcaccgcccaccagggctcagggtcctccgaccgggtgaagcttcgctggctgccaggatccccggcagggatgcacttcagcaccgtcaccagggacatggaagccttcacggccagcagcctgagcagcctgggggccgcggggggcttcccgggcgccgcgtcgcccggcgccgacccgtacggcccgcgcgagcccccgccgccgccgccgcgctacgacccgtgcgccgccgccgcccccggcgccccgggcccgccgccgccgccgcacgcctacccgtttgcgccggccgccggggccgccaccagcgccgccgccgagcccgagggccccggggccagctgcgcggccgcagccaaggcgccggtgaagaagaacgcgaaggtggccggtgtgagcgtgcagctagagatgaaggcgctgtgggacgagttcaaccagctgggcaccgagatgatcgtcaccaaggccggcaggcggatgtttcccaccttccaagtgaagctcttcggcatggatcccatggccgactatatgctgctcatggacttcgtgccggtggacgataagcgctaccggtgagcgagtggttgtaagcgtgagggaccgggagggcaccctggaaagtggcgggtctccgcctggtgacccaactccaagggtcgtctgcaccatgaaactctttaggcacctgcgatgctgcccgatcaacccgctccctcctccactcccatctgaccccagacccacaaccctactccatgccctctcagaacccgcctctggagccgcaggctgcagacagctcttgctcccctgggctggtgtggccctagggtggtcagccaagtactcagccccggacttcttcaagtctccctctcccaggaggccggcctgagcgcctagtccccttcccccatccccagggaactctg

SEQ ID NO: 281017 - DNA, 1310 bp, Homo sapiens
ccggcagggggagcgaggaggaagggaaccgcggccgggccagcggaggcggcggagcgcaccgcccaccagggctcagggtcctccgaccgggtgaagcttcgctggctgccaggatccccggcagggatgcacttcagcaccgtcaccagggacatggaagccttcacggccagcagcctgagcagcctgggggccgcggggggcttcccgggcgccgcgtcgcccggcgccgacccgtacggcccgcgcgagcccccgccgccgccgccgcgctacgacccgtgcgccgccgccgcccccggcgccccgggcccgccgccgccgccgcacgcctacccgtttgcgccggccgccggggccgccaccagcgccgccgccgagcccgagggccccggggccagctgcgcggccgcagccaaggcgccggtgaagaagaacgcgaaggtggccggtgtgagcgtgcagctagagatgaaggcgctgtgggacgagttcaaccagctgggcaccgagatgatcgtcaccaaggccggcaggcggatgtttcccaccttccaagtgaagctcttcggcatggatcccatggccgactatatgctgctcatggacttcgtgccggtggacgataagcgctaccggtacgccttccacagctcctcctggctggtggcggggaaggccgaccctgccacgccaggccgcgtgcactaccacccggactcgcctgccaagggcgcgcagtggatgaagcaaatcgtgtccttcgacaagctcaagctgaccaacaacctactggacgacaacggccacattattctgaattccatgcacagataccagccccgcttccacgtggtctatgtggacccacgcaaagatagcgagaaatatgccgaggagaacttcaaaacctttgtgttcgaggagacacgattcaccgcggtcactgcctaccagaaccatcggatcacgcagctcaagattgccagcaatcccttcgcgaaaggcttccgggactgtgaccctgaggactggccccggaaccaccggcccggcgcactgccgctcatgagcgccttcgcgcgctcgcggaaccccgtggcttccccgacgcagcccagcggcacggagaaaggtagggccggggtcgtgggatccgggttccggccctgtgcgcgctctaccccgggccggcggcctcgcccgacctcgcctgcgcccccggggcgctccaggctttcgcgccggttgcacaacggccgcggcggcgggcaagcgcgcactcgcccgcccggcccgacggctgc

SEQ ID NO: 281018 - DNA, 819 bp, Homo sapiens
ccggcagggggagcgaggaggaagggaaccgcggccgggccagcggaggcggcggagcgcaccgcccaccagggctcagggtcctccgaccgggtgaagcttcgctggctgccaggatccccggcagggatgcacttcagcaccgtcaccagggacatggaagccttcacggccagcagcctgagcagcctgggggccgcggggggcttcccgggcgccgcgtcgcccggcgccgacccgtacggcccgcgcgagcccccgccgccgccgccgcgctacgacccgtgcgccgccgccgcccccggcgccccgggcccgccgccgccgccgcacgcctacccgtttgcgccggccgccggggccgccaccagcgccgccgccgagcccgagggccccggggccagctgcgcggccgcagccaaggcgccggtgaagaagaacgcgaaggtggccggtgtgagcgtgcagctagagatgaaggcgctgtgggacgagttcaaccagctgggcaccgagatgatcgtcaccaaggccggcaggcggatgtttcccaccttccaagtgaagctcttcggcatggatcccatggccgactatatgctgctcatggacttcgtgccggtggacgataagcgctaccggtgagcgagtggttgtaagcgtgagggaccgggagggcaccctggaaagtggcgggtctccgcctggtgacccaactccaagggtcgtctgcaccatgaaactctttagtgtacccgccaggaagcacctacgaccaggattatggattccctgccggtcgtttttcctaaggaatca

SEQ ID NO: 281019 - DNA, 719 bp, Homo sapiens
gaggacacacagaagtcaccatctataagaaacaggctcccaccagacactgagtctgctggagccttgatcttgaatttcccaacctccagaactgtggccaccagactttctctgcttgtatcctcccaggaccacagaactcatcgcatcccaaggcagcctattccatcatggatgagctcaaagtgtttgaaagttctgctttatcaagtgagccaaacttcctccctcaggaccatccactccagggcccagttattctactggaggagtgagggtaaagccatcaccaggacaaccttggtgacaggctggactggcagccagcttttggggatgacttcagggaaccctgaatagccatgggagccaaatgtattactcctctgatgcctacaattccactataatagtctggtgggcttctgttagggaggcttatacatggtggaaagaataaaggcttggactcagcctaggttcaagtactgcatcttgacctggcctgtaggcaagtcttttcacttctctgagttttggctttctcatttgtccaataggaataacaataatgataataataatacctcccatgcaggattgctagtatgttcaatgggataatatatctaaacacctcacacaatgcctggcacatagcaggtgttcaattaggtctgtattaaaatccaggctctgtctcttattaataaaaa

SEQ ID NO: 281020 - DNA, 528 bp, Homo sapiens
gcggccgctttccgcctcggactcgagcgcgtcgaagacagcagcgcccaccagcagatgcagagaacccaaagccctgcaggatggcaaagctgcaacatggaagtcacccggatcaccacgtaaaggaaatctctccaaccaggaacaaacacctgccttgcaatattaggtccttcctagggcttggtgcatgtgcatatctccttccggaatcctggtcaatactaaggtgtctgcctcctgccccggtccacagccaggagccccggagccaacggcaagcctggaagacttacagttctccctctgagggttgctgtggctttccatgttgtggtgactaagtccctgtgtttctgtgcagtccctgcttcctgggaccagggaagaatggtcccgtacccgctattctgacctctgtggccactgattagttgttcctgaaaggaacagttttaagccacttctatctctgaggcaagaaggaagacgggagaaatgaggaggtgtgaggaagagagttgg

SEQ ID NO: 281021 - DNA, 1420 bp, Homo sapiens
gaggacacacagaagtcaccatctataagaaacaggctcccaccagacactgagtctgctggagccttgatcttgaatttcccaacctccagaactgtggccaccagactttctctgcttgtatcctcccaggaccacagaactcatcgcatcccaaggcagcctattccatcatggatgagctcaaagtgtttgaaagttctgctttatcaaaactcttgatggcctgcttcccatcctccatcctggaagactgatctgaaaccccaggaggaggtcctctgagccctgaggcagagatctctcacctggaagatgggtctaatgactgcgccccacacacaccagagaggactgcagatagtgcgggatgagaggaagatctctggccctggagacagcatcatcaagcggtagcttcatctttgggagctggggcctctgcaggagctttaccctcctctctccatgctgagcctgtctcaaccccctaacctgcaccccagtcttttggggtcacctcaaggctttggctgatgcttctttgctgacgtcaaccaagaaaacgtatgaggaagaaaatagcagatgagaagaatcaaccaaattccggaagctggaaggcagatgcaagaaggcccttgaatgatgccagcaccttgatattggactttccagcctccagaaccatgagccaatacatttctgttccataaaaattacccagttccaggtattctgctatagcagcacaaaatggactaaaacaatgttggcacaagactcagtgctgggcctggcatgcaacaggtccttggagtggcgtgctgtgtggataatgaatattggggaaggcatctctctccagcccctctcaagctttctgtagtcactggtccactctgtattgctatgaagaagctcaagaccagcctgtatcactcggggtcctggcaggaaccaggtgccacactcaaactgagtaattgaagagggtttaatatgggagttatttacataggtgtgggctggtgtagctgcccatatgccctcaaaatcacctctacatggcaatagctacttactgctaacagagtctctctctcattgctgcaaatattttctagccatgcaagaaactcagccggtcatgttgaacaaactaagagtgccaggaagttaatgtcctggaagcattgccagaggggagggggcagttagattccccagcttcctcgctcctctgctgggttaagcctgcaacatattcatcatctcccagagtgctgcccggggatagagctccaggtgctcagtgtggtgacctgctcatgtcagcttcttcccctttcctgtcttgtttcgcacccacatccttcccatgtttcctcttcccaaataaactacttgcattggaaat

SEQ ID NO: 281022 - DNA, 964 bp, Homo sapiens
gcggccgctttccgcctcggactcgagcgcgtcgaagacagcagcgcccaccagcagatgcagagaacccaaagccctgcaggatggcaaagctgcaacatggaagtcacccggatcaccacgtaaaggaaatctctccaaccaggaacaaacacctgccttgcaatattaggtgtctgcctcctgccccggtccacagccaggagccccggagccaacggcaagcctggaagacttacagttctccctctgagggttgctgtggctttccatgttgtggtgactaagtccctgtgtttctgtgcagtccctgcttcctgggaccagggaagaatggtcccgtggccaccagactttctctgcttgtatcctcccaggaccacagaactcatcgcatcccaaggcagcctattccatcatggatgagctcaaagtgtttgaaagttctgctttatcaagtgagccaaacttcctccctcaggaccatccactccagggcccagttattctactggaggagtgagggtaaagccatcaccaggacaaccttggtgacaggctggactggcagccagcttttggggatgacttcagggaaccctgaatagccatgggagccaaatgtattactcctctgatgcctacaattccactataatagtctggtgggcttctgttagggaggcttatacatggtggaaagaataaaggcttggactcagcctaggttcaagtactgcatcttgacctggcctgtaggcaagtcttttcacttctctgagttttggctttctcatttgtccaataggaataacaataatgataataataatacctcccatgcaggattgctagtatgttcaatgggataatatatctaaacacctcacacaatgcctggcacatagcaggtgttcaattaggtctgtattaaaatccaggctctgtctcttattaataaaaa

SEQ ID NO: 281023 - DNA, 1009 bp, Homo sapiens
gaggattcccccagtcaagaactgaggctggagactgctgtttaaacatggcaggttgaacacacttatttctctccattgttctctgaaattccaagaaaatgacacagggattttttttttaaatgcacatctatctactgggacaaagaaaacgtatgaggaagaaaatagcagatgagaagaatcaaccaaattccggaagctggaaggcagatgcaagaaggcccttgaatgatgccagcaccttgatattggactttccagcctccagaaccatgagccaatacatttctgttccataaaaattacccagttccaggtattctgctatagcagcacaaaatggactaaaacaatgttggcacaagactcagtgctgggcctggcatgcaacaggtccttggagtggcgtgctgtgtggataatgaatattggggaaggcatctctctccagcccctctcaagctttctgtagtcactggtccactctgtattgctatgaagaagctcaagaccagcctgtatcactcggggtcctggcaggaaccaggtgccacactcaaactgagtaattgaagagggtttaatatgggagttatttacataggtgtgggctggtgtagctgcccatatgccctcaaaatcacctctacatggcaatagctacttactgctaacagagtctctctctcattgctgcaaatattttctagccatgcaagaaactcagccggtcatgttgaacaaactaagagtgccaggaagttaatgtcctggaagcattgccagaggggagggggcagttagattccccagcttcctcgctcctctgctgggttaagcctgcaacatattcatcatctcccagagtgctgcccggggatagagctccaggtgctcagtgtggtgacctgctcatgtcagcttcttcccctttcctgtcttgtttcgcacccacatccttcccatgtttcctcttcccaaataaactacttgcattggaaat

SEQ ID NO: 281024 - DNA, 795 bp, Homo sapiens
gcggccgctttccgcctcggactcgagcgcgtcgaagacagcagcgcccaccagcagatgcagagaacccaaagccctgcaggatggcaaagctgcaacatggaagtcacccggatcaccacgtaaaggaaatctctccaaccaggaacaaacacctgccttgcaatattaggtggccaccagactttctctgcttgtatcctcccaggaccacagaactcatcgcatcccaaggcagcctattccatcatggatgagctcaaagtgtttgaaagttctgctttatcaagtgagccaaacttcctccctcaggaccatccactccagggcccagttattctactggaggagtgagggtaaagccatcaccaggacaaccttggtgacaggctggactggcagccagcttttggggatgacttcagggaaccctgaatagccatgggagccaaatgtattactcctctgatgcctacaattccactataatagtctggtgggcttctgttagggaggcttatacatggtggaaagaataaaggcttggactcagcctaggttcaagtactgcatcttgacctggcctgtaggcaagtcttttcacttctctgagttttggctttctcatttgtccaataggaataacaataatgataataataatacctcccatgcaggattgctagtatgttcaatgggataatatatctaaacacctcacacaatgcctggcacatagcaggtgttcaattaggtctgtattaaaatccaggctctgtctcttattaataaaaa

SEQ ID NO: 281025 - DNA, 1516 bp, Homo sapiens
gcggccgctttccgcctcggactcgagcgcgtcgaagacagcagcgcccaccagcagatgcagagaacccaaagccctgcaggatggcaaagctgcaacatggaagtcacccggatcaccacgtaaaggaaatctctccaaccaggaacaaacacctgccttgcaatattaggtgtctgcctcctgccccggtccacagccaggagccccggagccaacggcaagcctggaagacttacagttctccctctgagggttgctgtggctttccatgttgtggtgactaagtccctgtgtttctgtgcagtccctgcttcctgggaccagggaagaatggtcccgtggccaccagactttctctgcttgtatcctcccaggaccacagaactcatcgcatcccaaggcagcctattccatcatggatgagctcaaagtgtttgaaagttctgctttatcaaaactcttgatggcctgcttcccatcctccatcctggaagactgatctgaaaccccaggaggaggtcctctgagccctgaggcagagatctctcacctggaagatgggtctaatgactgcgccccacacacaccagagaggactgcagatagtgcgggatgagaggaagatctctggccctggagacagcatcatcaagcgaaaacgtatgaggaagaaaatagcagatgagaagaatcaaccaaattccggaagctggaaggcagatgcaagaaggcccttgaatgatgccagcaccttgatattggactttccagcctccagaaccatgagccaatacatttctgttccataaaaattacccagttccaggtattctgctatagcagcacaaaatggactaaaacaatgttggcacaagactcagtgctgggcctggcatgcaacaggtccttggagtggcgtgctgtgtggataatgaatattggggaaggcatctctctccagcccctctcaagctttctgtagtcactggtccactctgtattgctatgaagaagctcaagaccagcctgtatcactcggggtcctggcaggaaccaggtgccacactcaaactgagtaattgaagagggtttaatatgggagttatttacataggtgtgggctggtgtagctgcccatatgccctcaaaatcacctctacatggcaatagctacttactgctaacagagtctctctctcattgctgcaaatattttctagccatgcaagaaactcagccggtcatgttgaacaaactaagagtgccaggaagttaatgtcctggaagcattgccagaggggagggggcagttagattccccagcttcctcgctcctctgctgggttaagcctgcaacatattcatcatctcccagagtgctgcccggggatagagctccaggtgctcagtgtggtgacctgctcatgtcagcttcttcccctttcctgtcttgtttcgcacccacatccttcccatgtttcctcttcccaaataaactacttgcattggaaat

SEQ ID NO: 281026 - DNA, 426 bp, Homo sapiens
gctttgacccttgcagcattttgattggctccagcgtgtacggggtcgaccttggtggcgtatcagcttggtactctcattggctaacgttccagggtcgaaggacaggtaaagcgtctgctccttccgctgctgccggcagataaggatgcccgtggcagccacagcagtagcaatgatggcggcgatgatgcccccgatgatgccgcctgtggcccctgcgcctgctgtgttgggggtctctgcaaggagagggacagcgtgagggggtctccaggaggaagccacagctccttattccaagcgaccatcccaccccacatcatcgcctgcctgtctatgtcctctcccatgggcaggggacattctttcattcaactcaaactgctgagcatgaggaaggagcgaggatgtgtgccccgcatg

SEQ ID NO: 281027 - DNA, 399 bp, Homo sapiens
acagcccctgtgactgacagaaagggtgttttacttgtctattggagccattgagaggttctaaccagttgcaaggtgggtgaggaggaagcacagaagttgtgtggggtagaaaaagcctggggaaaatggtgcctttaggccacccatcacgtgcctcaagttccaaagaatgtgaacagcaggaaaagagatttgccctctccccactgtcatacatgtgacagtagaaagctgaagatttgagccagaaactggctatcaagattgattcaggttgattcccagggttctgttttatttccacccaggaaacaccagcattcttgaatcctttcagcattaggcaaaggagcagatgtgggcattctgcatctcaaggaggtctttagcaacacc

SEQ ID NO: 281028 - DNA, 445 bp, Homo sapiens
aagcttaaacaggtgggggctggggggaaatggaaggttggctctaggaccagatgcatcaggcttcagtgttgtctgtcaacattatccgtcccttttgagggtagtgtcatctgataacatttttgagtcatgggaaatttccggaaacagaacagcacacagaaaggactgacctatttctcttagagtaacatcctcgtggctcatccactgattgaagaaatatttctgttgctaggagaaaggaccttgaaaccttgaagtattctgtggtatcctgtgtgtacacagttcttcttcaaagagaacttagagacatttacttgggtgacttgacattaaagggaagagattgcctagagcagggggcagcacactgtggactgagaaccaaatcaagccaggcatctgtttttgcaaataaagttttattagaaaacag

SEQ ID NO: 281029 - DNA, 487 bp, Homo sapiens
ttctattcaacatttcctatcccatggcatggaatatattgtgagttacacatagttggcaaagacacaaattagggaaagggtcctgaaggtccagcttaccatatggtggctgagtcaggttaaggcataggaggtggtatgctttgggacagtcttttttgtcacacatgaccagctctccaccatctccacattgaaaacagtaatcttcatgcatctgctttggttctgttttgatctttcgtctcttctgttttaacttagcattttttgccttctcttcatttgttgacgcacatgccgactggcaggaaagaaaggatcatagtttcaaacatcacagacagtgcatgaagctggacacaggaaaaccctgcaaccttgcattcatttaaattcatctgttgtacaattacctaaaaacatcaggaggccttatgctgcaacaaatactataacaaaaataaagttttgttttcactga

SEQ ID NO: 281030 - DNA, 256 bp, Homo sapiens
tcggggagatggggaggaagaaggagaagtgcccaacattttttgccttctcttcatttgttgacgcacatgccgactggcaggaaagaaaggatcatagtttcaaacatcacagacagtgcatgaagctggacacaggaaaaccctgcaaccttgcattcatttaaattcatctgttgtacaattacctaaaaacatcaggaggccttatgctgcaacaaatactataacaaaaataaagttttgttttcactga

SEQ ID NO: 281031 - DNA, 888 bp, Homo sapiens
aaggctgggttgactgcgtgtttgcctttatcgtgcctatcagaacgttgacagtgcgtgtacctccctggtgatgtgcggctcacttgctctttcaggacctacctgacttggaagatgatgatgaaacaggcaaatctctggaagaccagaatatgtgctttccgaagattgaggtcatctcgagcttgagtgatgacagtgaccctgaactggactacacgtcactccctgtgctggaaaacctgcccacagacactctgtcaaatatatttgcagtctctaaagacacctcaaaggcggctcgggtgcccttcacagacatctttaaaaaagaagctaagagggacttggaaatccgaaaacaagacaccaagtccccaagacccctgatccaggagctcagcgacgaggacccctctggccagctactgatgccccccacctgccaaagagatgctgcaccactcacttccagtggagacagggacagcgacttccttgcagcctcttctccggctgccaagtgtatttagtccctgaacctggatccaaggcatctccctgtaggaaacatcagaccggggcagagattgacaaagcaacccacaacagcagctgccaacggccgctgtgcccacctcatcagcagctctgcaggggcctcactccaccctcaccaaacacgaggagccagcactcctggcccccattccactggacaggaaggcgtgagaactgagggacctgcctgaggcccccacagctgaggcgcagcggagccctgcctcccagcacagactaaaatcgcagcaacacaggcccaccggcacctccagcctgccttgcgggatgatcttcaggcgaatatacaaaatacaaaagaaa

SEQ ID NO: 281032 - DNA, 714 bp, Homo sapiens
aaggctgggttgactgcgtgtttgcctttatcgtgcctatcagaacgttgacagtgcgtgtacctccctggtgatgtgcggctcacttgctctttcaggacctacctgacttggaagatgatgatgaaacaggcaaatctctggaagaccagaatatgtgctttccgaagattgaggtcatctcgagcttgagtgatgacagtgaccctgaactggactacacgtcactccctgtgctggaaaacctgcccacagacactctgtcaaatatatttgcagtctctaaagacacctcaaaggcggctcgggtgcccttcacagacatctttaaaaaagaagctaagagggacttggaaatccgaaaacaagacaccaagtccccaagacccctgatccaggagctcagcgacgaggacccctctggccagctactgatgccccccacctgccaaagagatgctgcaccactcacttccagtggagacagggacagcgacttccttgcagcctcttctccggtgccgactgagagcgccgccacacccccagagacgtgtgtcggagttgcccagcccagccaagctctgcccacgtgggacctcactgcattcccagcaccgaaagcatcatagttttccccagttatatgtagcataaatggtttaatcataaatgtctcccttaggcatgataaacattttaacacccaaaaga

SEQ ID NO: 281033 - DNA, 807 bp, Homo sapiens
aaggctgggttgactgcgtgtttgcctttatcgtgcctatcagaacgttgacagtgcgtgtacctccctggtgatgtgcggctcacttgctctttcaggacctacctgacttggaagatgatgatgaaacaggcaaatctctggaagaccagaatatgtgctttccgaagattgaggtcatctcgagcttgagtgatgacagtgaccctgaactggactacacgtcactccctgtgctggaaaacctgcccacagacactctgtcaaatatatttgcagtctctaaagacacctcaaaggcggctcgggtgcccttcacagacatctttaaaaaagaagctaagagggacttggaaatccgaaaacaagacaccaagtccccaagacccctgatccaggagctcagcgacgaggacccctctggccagctactgatgccccccacctgccaaagagatgctgcaccactcacttccagtggagacagggacagcgacttccttgcagcctcttctccggagatggggtttcaccatgttgaccaggctggtctcgaactcctgacctcaggtgatctgtttgcctcggcctcccaaagtgctgggattacagtgccgactgagagcgccgccacacccccagagacgtgtgtcggagttgcccagcccagccaagctctgcccacgtgggacctcactgcattcccagcaccgaaagcatcatagttttccccagttatatgtagcataaatggtttaatcataaatgtctcccttaggcatgataaacattttaacacccaaaaga

SEQ ID NO: 281034 - DNA, 472 bp, Homo sapiens
aagtggtgaagaactttattttctgtagatcatcatgacatcagtttcaagacccacccaactgggagcatgtgaaattttttcttagaaggtcatccaaaatttgagatatttcacatgaagaacatgtatggaggctgacctgtatgccagttcagatccgtagagccaggtttctcttcatggattgctttgcgctcctcctcctgcaagacagtgagtctccacaggcccatgaatgtcataagtgagtgcaagcttgaagaagcacctatcctgtgctcaggacaaaatatctgtggtccagagcagagctcccaacccagctactatgaaccacgctaggccccagaaaagaaaggaaaacagaagagacattggattggatcttccagaaggtctttgttgcaatttttctccatcattgaaaaaaaattacatcatcaaataaagacaatagcagcacagctta

SEQ ID NO: 281035 - DNA, 607 bp, Homo sapiens
aagtggtgaagaactttattttctgtagatcatcatgacatcagtttcaagacccacccaactgggagcatgtgaaattttttcttagaaggtcatccaaaatttgagatatttcacatgaagaacatgtatggaggctgacctgtatgccagttcagatccgtagagccaggcaaatttggttttgaccaaaatgatacttaggagttggataagttacttacgctgccagtcttggctccaaatgacttccgcttcctgaacaaattaaatctgccttgaaggatgaaaatgtgtgattaataaggtttctcttcatggattgctttgcgctcctcctcctgcaagacagtgagtctccacaggcccatgaatgtcataagtgagtgcaagcttgaagaagcacctatcctgtgctcaggacaaaatatctgtggtccagagcagagctcccaacccagctactatgaaccacgctaggccccagaaaagaaaggaaaacagaagagacattggattggatcttccagaaggtctttgttgcaatttttctccatcattgaaaaaaaattacatcatcaaataaagacaatagcagcacagctta

SEQ ID NO: 281036 - DNA, 1835 bp, Homo sapiens
caagactgctcctctctgccgactacaacagattggagccatggctttggaacagaaccagtcaacagattattattatgaggaaaatgaaatgaatggcacttatgactacagtcaatatgaactgatctgtatcaaagaagatgtcagagaatttgcaaaagttttcctccctgtattcctcacaatagttttcgtcattggacttgcaggcaattccatggtagtggcaatttatgcctattacaagaaacagagaaccaaaacagatgtgtacatcctgaatttggctgtagcagatttactccttctattcactctgcctttttgggctgttaatgcagttcatgggtgggttttagggaaaataatgtgcaaaataacttcagccttgtacacactaaactttgtctctggaatgcagtttctggcttgtatcagcatagacagatatgtggcagtaactaaagtccccagccaatcaggagtgggaaaaccatgctggatcatctgtttctgtgtctggatggctgccatcttgctgagcataccccagctggttttttatacagtaaatgacaatgctaggtgcattcccattttcccccgctacctaggaacatcaatgaaagcattgattcaaatgctagagatctgcattggatttgtagtaccctttcttattatgggggtgtgctactttatcacagcaaggacactcatgaagatgccaaacattaaaatatctcgacccctaaaagttctgctcacagtcgttatagttttcattgtcactcaactgccttataacattgtcaagttctgccgagccatagacatcatctactccctgatcaccagctgcaacatgagcaaacgcatggacatcgccatccaagtcacagaaagcatcgcactctttcacagctgcctcaacccaatcctttatgtttttatgggagcatctttcaaaaactacgttatgaaagtggccaagaaatatgggtcctggagaagacagagacaaagtgtggaggagtttccttttgattctgagggtcctacagagccaaccagtacttttagcatttaaaggtaaaactgctctgccttttgcttggatacatatgaatgatgctttcccctcaaataaaacatctgcattattctgaaactcaaatctcagacgccgtggttgcaacttataataaagaatgggttgggggaagggggagaaataaaagccaagaagaggaaacaagataataaatgtacaaaacatgaaaattaaaatgaacaatataggaaaataattgtaacaggcataagtgaataacactctgctgtaacgaagaagagctttgtggtgataattttgtatcttggttgcagtggtgcttatacaaatctacacaagtgataaaatgacacagaactatatacacacattgtaccaatttcaatttcctggttttgacattatagtataattatgtaagatggaaccattggggaaaactgggtgaagggtacccaggaccactctgtaccatctttgtaacttcctgtgaatttataataatttcaaaataaaacaagttaaaaaaaaacccactatgctataagttaggccatctaaaacagattattaaagaggttcatgttaaaaggcatttataattatttttaattatctaagttttaatacaagaacgatttccctgcataattttagtacttgaataagtatgcagcagaactccaactatcttttttcctgttttttttaaatttgtaagtaattttataaaatccacctcctccaaaaaagcaat

SEQ ID NO: 281037 - DNA, 1459 bp, Homo sapiens
caagactgctcctctctgccgactacaacagattggagccatggctttggaacagaaccagtcaacagattattattatgaggaaaatgaaatgaatggcacttatgactacagtcaatatgaactgatctgtatcaaagaagatgtcagagaatttgcaaaagttttcctccctgtattcctcacaatagttttcgtcattggacttgcaggcaattccatggtagtggcaatttatgcctattacaagaaacagagaaccaaaacagatgtgtacatcctgaatttggctgtagcagatttactccttctattcactctgcctttttgggctgttaatgcagttcatgggtgggttttagggaaaataatgtgcaaaataacttcagccttgtacacactaaactttgtctctggaatgcagtttctggcttgtatcagcatagacagatatgtggcagtaactaaagtccccagccaatcaggagtgggaaaaccatgctggatcatctgtttctgtgtctggatggctgccatcttgctgagcataccccagctggttttttatacagtaaatgacaatgctaggtgcattcccattttcccccgctacctaggaacatcaatgaaagcattgattcaaatgctagagatctgcattggatttgtagtaccctttcttattatgggggtgtgctactttatcacagcaaggacactcatgaagatgccaaacattaaaatatctcgacccctaaaagttctgctcacagtcgttatagttttcattgtcactcaactgccttataacattgtcaagttctgccgagccatagacatcatctactccctgatcaccagctgcaacatgagcaaacgcatggacatcgccatccaagtcacagaaagcatcgcactctttcacagctgcctcaacccaatcctttatgtttttatgggagcatctttcaaaaactacgttatgaaagtggccaagaaatatgggtcctggagaagacagagacaaagtgtggaggagtttccttttgattctgagggtcctacagagccaaccagtacttttagcatttaaagctcatccataataactccgggacgactgactacacaaggagagaatggtgattggcatttacctgtcatacagaagcaagagcaatcaaggcatagtccacgtggctgagtccgctgacagctggcaaaaacaagttccagagaccctcgactttggccatttcctgtcaaggtgatgaacatgccagagtgaccataatttaccaggactcacagtagtttatttctttttttaaatattggtatttatgatctttgaaatttaaaaacacttatggagttatttattttactgtattctccagtgagcaaaaccaagttcttattaattcattataaatcaacagtttaaccattaataaca

SEQ ID NO: 281038 - DNA, 402 bp, Homo sapiens
atcttggggtcatattccaatgtggctcccattaaagcatttcaaagagtgctagattcaggctcacatatgttacagcaacaggctatactctagggaaagaacaaaacagcttgataaaaactgtttccttttaagcatatttagacaaatatctatcctgtattctctttgccatctagattggagccatggctttggaacagaaccagtcaacagattattattatgaggaaaatgaaatgaatggcacttatgactacagtcaatatgaactgatctgtatcaaagaagatgtcagagaatttgcaaaagttttcctccctgtattcctcacaatagttttcgtcattggacttgcaggcaattccatggtagtggcaatttatgcctattacaaga

SEQ ID NO: 281039 - DNA, 2184 bp, Homo sapiens
caagactgctcctctctgccgactacaacagattggagccatggctttggaacagaaccagtcaacagattattattatgaggaaaatgaaatgaatggcacttatgactacagtcaatatgaactgatctgtatcaaagaagatgtcagagaatttgcaaaagttttcctccctgtattcctcacaatagttttcgtcattggacttgcaggcaattccatggtagtggcaatttatgcctattacaagaaacagagaaccaaaacagatgtgtacatcctgaatttggctgtagcagatttactccttctattcactctgcctttttgggctgttaatgcagttcatgggtgggttttagggaaaataatgtgcaaaataacttcagccttgtacacactaaactttgtctctggaatgcagtttctggcttgtatcagcatagacagatatgtggcagtaactaaagtccccagccaatcaggagtgggaaaaccatgctggatcatctgtttctgtgtctggatggctgccatcttgctgagcataccccagctggttttttatacagtaaatgacaatgctaggtgcattcccattttcccccgctacctaggaacatcaatgaaagcattgattcaaatgctagagatctgcattggatttgtagtaccctttcttattatgggggtgtgctactttatcacagcaaggacactcatgaagatgccaaacattaaaatatctcgacccctaaaagttctgctcacagtcgttatagttttcattgtcactcaactgccttataacattgtcaagttctgccgagccatagacatcatctactccctgatcaccagctgcaacatgagcaaacgcatggacatcgccatccaagtcacagaaagcatcgcactctttcacagctgcctcaacccaatcctttatgtttttatgggagcatctttcaaaaactacgttatgaaagtggccaagaaatatgggtcctggagaagacagagacaaagtgtggaggagtttccttttgattctgagggtcctacagagccaaccagtacttttagcatttaaaggtaaaactgctctgccttttgcttggatacatatgaatgatgctttcccctcaaataaaacatctgcattattctgaaactcaaatctcagacgccgtggttgcaacttataataaagaatgggttgggggaagggggagaaataaaagccaagaagaggaaacaagataataaatgtacaaaacatgaaaattaaaatgaacaatataggaaaataattgtaacaggcataagtgaataacactctgctgtaacgaagaagagctttgtggtgataattttgtatcttggttgcagtggtgcttatacaaatctacacaagtgataaaatgacacagaactatatacacacattgtaccaatttcaatttcctggttttgacattatagtataattatgtaagatggaaccattggggaaaactgggtgaagggtacccaggaccactctgtaccatctttgtaacttcctgtgaatttataataatttcaaaataaaacaagttaaaaaaaaacccactatgctataagttaggccatctaaaacagattattaaagaggttcatgttaaaaggcatttataattatttttaattatctaagttttaatacaagaacgatttccctgcataattttagtacttgaataagtatgcagcagaactccaactatcttttttcctgttttttttaaatttgtaagtaattttataaaatccacctcctccaaaaaagcaataaaaaaaaaacaaactataataagcttttctgattcttttcaaaacattcctggtaagttcctaaagacataatttgcttctatgatgtcaactttcttactaataactggttatcatgacaaatgttaggtttatcatatatagtctaggtgtaatcctcagactatcattttcatctgggttccaatttcttaacttcctaaagaattcatctgtttatacaagtctaccactgccgattgactaaaaaatacattatcccatgcataaaatgtcctattttcatttaaacactttatttttgagtaataaaaatatgtaccacaataaattattgttaattaacat

SEQ ID NO: 281040 - DNA, 811 bp, Homo sapiens
gccgggagtggcgagcttgccgttgtgcatgagtggcgtgaggatggcctccggctttgggtctttggattgagtgtccccaaagaggccgctgagcttggtgacgctgctcatggagccccggcgcgagtgggtgagctccttctccttgcgctgcaccacagccacgtctttgcgccgatgatcacagacgcagtagacggtgatgcccgagaagacggcccccatgacgaaagccaggatgactgcaatggccaagagggtgacgggaaccagctggtcgtggcctttgagggtcctcctcccttcaattgtgacatcacagttggttgctgtggaaatgattgtcctgtgacaaaggattgtgacttaagtagaagcagcaaatatctcttaagaaataaagattctgtgatccaacaaatacccttggtaataaaaggcagtcaaggcaattcaccataaggaaagagtgtacaagacggaaaaatacaacagagaaagataacaggccgactcacgtgaatataaaacgagcgggaagggcagttggcttagaaaattcccttgccagctacttttttaagcccaaattggatcacagaactgtgatgtacaaatggtgttgtgattattggttgccatgagccaaatgaaccatgcagaatgctaattgggcaggaaaccagctttcaggtactccagattgaagacgaaacaaaggagaccaaaaggactgtctgaaaaccgtgtgaatgcattcacgctgataaattttttaaaaataataaattcttttcaattaaaaaaa

SEQ ID NO: 281041 - DNA, 1178 bp, Homo sapiens
gccgggagtggcgagcttgccgttgtgcatgagtggcgtgaggatggcctccggctttgggtctttggattgagtgtccccaaagaggccgctgagcttggtgacgctgctcatggagccccggcgcgagtgggtgagctccttctccttgcgctgcaccacagccacgtctttgcgccgatgatcacagacgcagtagacggtgatgcccgagaagacggcccccatgacgaaagccaggatgactgcaatggccaagagggtgacgggaaccagctggtcgtggcctttgagggtcctcctcccttcaattgtgacatcacagttggttgctgtggaaatgattgtcctgtgacaaaggattgtgacttaagtagaagcagcaaatatctcttaagaaataaagattctgtgatccaacaaatacccttggtaataaaaggcagtcaaggcaattcaccataaggaaagagtgtacaagacggaaaaatacaacagagaaagataacaggccgactcacgtgaatataaaacgagcgggaagggcagttggcttagaaaattcccttgccagctactgtgagtgtgcatggggggagggggtggaagggggtggaagggcgtggtaaggggtggaggagtaggggcctgttttgtaaattgctgaataggcaagtttcttcaaacttcagtaggctgccagaatcaccctgccctttaatttcaaggcagttttattgcatttgtttattacttgcttgactttattggtggtgctgtggtcagactcattattggaatggaattgcctattactttgctatcaggtttgagatgactcgaggcttttccttgcctgcctcccctcagaacttaagtttgagctgaacatatgaattgtaaatgaacaactgattaatatgcattggcagctcctcagaaagctctcagattgcccccttttggcatggcctgtttatgttaattagcagtttagagattaaaaaagaagaggaatttacaaagtggataataataaagcagaattgaaaggggttcttgccaccaaccctcactcagtcccccgggttctggatgggacttggcttgcgattgctgacagcaattgtctagaagaactgggaagccttttaaacacagaattctgtgaatgaaat

SEQ ID NO: 281042 - DNA, 1051 bp, Homo sapiens
gccgggagtggcgagcttgccgttgtgcatgagtggcgtgaggatggcctccggctttgggtctttggattgagtgtccccaaagaggccgctgagcttggtgacgctgctcatggagccccggcgcgagtgggtgagctccttctccttgcgctgcaccacagccacgtctttgcgccgatgatcacagacgcagtagacggtgatgcccgagaagacggcccccatgacgaaagccaggatgactgcaatggccaagagggtgacgggaaccagctggtcgtggcctttgagggtcctcctcccttcaattgtgacatcacagttggttgctgtggaaatgattgtcctgtgacaaaggattgtgacttaagtagaagcagcaaatatctcttaagaaataaagattctgtgatccaacaaatacccttggtaataaaaggcagtcaaggcaattcaccataaggaaagagtgtacaagacgtacagaaactgattcttcactgtatgccatggttggctgacagtaaggttaaagtggaggtggctgaggacttctcccattaaaagttcaagttcttcctgatgttaaccacaagatgatgccgacatcaacgattactctttcaacgtaaataaaaacaaagcatagaatggaagattgtgtgtttattttatgtcacaaaaggaaggcaagcctggaaatgccaacctcccatcatattaattttaatgccagatgctccagcgttccctgatgtacaaagctgctggttgaagtgtgtttttatgttgttatatgaccacaggcacaaaaccctgcatgtctgcggcagccttttatgagctcttccacagactccctgtgggccttggactgcggaggtgggcatcggcgtacactcagaagacaagactctgggcagccggctttgtgtccataatcctgtgtgcgcctaagtagttcatgatgcaggcctagcagctgttgtaatgtttcatcacattaaaagcaaactatttttgcaaattaaagccttcagtaagttga

SEQ ID NO: 281043 - DNA, 9038 bp, Homo sapiens
  misc_feature (2440)..(2440): n is a, c, g, or t
  misc_feature (7695)..(7695): n is a, c, g, or t
gcgatcggcctttttttctttctttttttttttcctcaaagctgttttctgatatatgttgggtaccatagagtgaatctcagaacaggaagcggaggcataagcagagaggattctggaaaggtctctttgttttcttatccacagagaaagaaagaaaaaaaattgtaactaatttgtaaacctctgtggtcaaaaaaaaaaaaaaaaaaaaagctgaacagctgccagaggaagacacgttataccctaaccatcttggatgctgggctttgttatgctgtaattcataaggctctgttttatcagagattatggagcaagaaaactgaagccaagccacatcaaggtttgacagggatgagatacctgtcaaggattcatagtagagtggcttactgggaaaggagcaaagaatctcttctagggatattgtaagaataaatgagataattcacagaagggacctggagcttttccggaaaaaggtgctgtgactatctaaggtaattcgtatgcaagaagctacacgtaattaaatgtgcaggatgaaaagatggcacaggcactgttggtacccccaggacctgaaagcttccgcctttttactagagaatctcttgctgctatcgaaaaacgtgctgcagaagagaaagccaagaagcccaaaaaggaacaagataatgatgatgagaacaaaccaaagccaaatagtgacttggaagctggaaagaaccttccatttatttatggagacattcctccagagatggtgtcagagcccctggaggacctggatccctactatatcaataagaaaacttttatagtaatgaataaaggaaaggcaattttccgattcagtgccacctctgccttgtatattttaactccactaaaccctgttaggaaaattgctatcaagattttggtacattctttattcagcatgcttatcatgtgcactattttgaccaactgtgtatttatgaccttgagcaaccctcctgactggacaaagaatgtagagtacacattcactggaatctatacctttgagtcacttataaaaatcttggcaagagggttttgcttagaagattttacgtttcttcgtgatccatggaactggctggatttcagtgtcattgtgatggcgtatgtaacagaatttgtaagcctaggcaatgtttcagcccttcgaactttcagagtcttgagagctctgaaaactatttctgtaattccaggtttaaagaccattgtgggggccctgatccagtcggtaaagaagctttctgatgtgatgatcctgactgtgttctgtctgagcgtgtttgctctcattgggctgcagctgttcatgggcaatctgaggaataaatgtttgcagtggcccccaagcgattctgcttttgaaaccaacaccacttcctactttaatggcacaatggattcaaatgggacatttgttaatgtaacaatgagcacatttaactggaaggattacattggagatgacagtcacttttatgttttggatgggcaaaaagaccctttactctgtggaaatggctcagatgcaggccagtgtccagaaggatacatctgtgtgaaggctggtcgaaaccccaactatggctacacaagctttgacacctttagctgggctttcctgtctctatttcgactcatgactcaagactactgggaaaatctttaccagttgacattacgtgctgctgggaaaacatacatgatattttttgtcctggtcattttcttgggctcattttatttggtgaatttgatcctggctgtggtggccatggcctatgaggagcagaatcaggccaccttggaagaagcagaacaaaaagaggccgaatttcagcagatgctcgaacagcttaaaaagcaacaggaagaagctcaggcagttgcggcagcatcagctgcttcaagagatttcagtggaataggtgggttaggagagctgttggaaagttcttcagaagcatcaaagttgagttccaaaagtgctaaagaatggaggaaccgaaggaagaaaagaagacagagagagcaccttgaaggaaacaacaaaggagagagagacagctttcccaaatccgaatctgaagacagcgtcaaaagaagcagcttccttttctccatggatggaaacagactgaccagtgacaaaaaattctgctcccctcatcagtctctcttgagtatccgtggctccctgttttccccaagacgcaatagcaaaacaagcattttcagtttcagaggtcgggcaaaggatgttggatctgaaaatgactttgctgatgatgaacacagcacatttgaagacagcgaaagcaggagagactcactgtttgtgccgcacagacatggagagcgacgcaacagtaacggcaccaccacngaaacggaagtcagaaagagaaggttaagctcttaccagatttcaatggagatgctggaggattcctctggaaggcaaagagccgtgagcatagccagcattctgaccaacacaatggaagaacttgaagaatctagacagaaatgtccgccatgctggtatagatttgccaatgtgttcttgatctgggactgctgtgatgcatggttaaaagtaaaacatcttgtgaatttaattgttatggatccatttgttgatcttgccatcactatttgcattgtcttaaataccctctttatggccatggagcactaccccatgactgagcaattcagtagtgtgttgactgtaggaaacctggtctttactgggattttcacagcagaaatggttctcaagatcattgccatggatccttattactatttccaagaaggctggaatatctttgatggaattattgtcagcctcagtttaatggagcttggtctgtcaaatgtggagggattgtctgtactgcgatcattcagactgcttagagttttcaagttggcaaaatcctggcccacactaaatatgctaattaagatcattggcaattctgtgggggctctaggaaacctcaccttggtgttggccatcatcgtcttcatttttgctgtggtcggcatgcagctctttggtaagagctacaaagaatgtgtctgcaagatcaatgatgactgtacgctcccacggtggcacatgaacgacttcttccactccttcctgattgtgttccgcgtgctgtgtggagagtggatagagaccatgtgggactgtatggaggtcgctggccaaaccatgtgccttattgttttcatgttggtcatggtcattggaaaccttgtggttctgaacctctttctggccttattgttgagttcatttagctcagacaaccttgctgctactgatgatgacaatgaaatgaataatctgcagattgcagtaggaagaatgcaaaagggaattgattatgtgaaaaataagatgcgggagtgtttccaaaaagccttttttagaaagccaaaagttatagaaatccatgaaggcaataagatagacagctgcatgtccaataatactggaattgaaataagcaaagagcttaattatcttagagatgggaatggaaccaccagtggtgtaggtactggaagcagtgttgaaaaatacgtaatcgatgaaaatgattatatgtcattcataaacaaccccagcctcaccgtcacagtgccaattgctgttggagagtctgactttgaaaacttaaatactgaagagttcagcagtgagtcagaactagaagaaagcaaagagaaattaaatgcaaccagctcatctgaaggaagcacagttgatgttgttctaccccgagaaggtgaacaagctgaaactgaacccgaagaagaccttaaaccggaagcttgttttactgaaggatgtattaaaaagtttccattctgtcaagtaagtacagaagaaggcaaagggaagatctggtggaatcttcgaaaaacctgctacagtattgttgagcacaactggtttgagactttcattgtgttcatgatccttctcagtagtggtgcattggcctttgaagatatatacattgaacagcgaaagactatcaaaaccatgctagaatatgctgacaaagtctttacctatatattcattctggaaatgcttctcaaatgggttgcttatggatttcaaacatatttcactaatgcctggtgctggctagatttcttgatcgttgatgtttctttggttagcctggtagccaatgctcttggctactcagaactcggtgccatcaaatcattacggacattaagagctttaagacctctaagagccttatcccggtttgaaggcatgagggtggttgtgaatgctcttgttggagcaattccctctatcatgaatgtgctgttggtctgtctcatcttctggttgatctttagcatcatgggtgtgaatttgtttgctggcaagttctaccactgtgttaacatgacaacgggtaacatgtttgacattagtgatgttaacaatttgagtgactgtcaggctcttggcaagcaagctcggtggaaaaacgtgaaagtaaactttgataatgttggcgctggctatcttgcactgcttcaagtggccacatttaaaggctggatggatattatgtatgcagctgttgattcacgagatgttaaacttcagcctgtatatgaagaaaatctgtacatgtatttatactttgtcatctttatcatctttgggtcattcttcactctgaatctattcattggtgtcatcatagataacttcaaccagcagaaaaagaagtttggaggtcaagacatctttatgacagaggaacagaaaaaatattacaatgcaatgaagaaacttggatccaagaaacctcagaaacccatacctcgcccagcaaacaaattccaaggaatggtctttgattttgtaaccagacaagtctttgatatcagcatcatgatcctcatctgcctcaacatggtcaccatgatggtggaaacggatgaccagggcaaatacatgaccctagttttgtcccggatcaacctagtgttcattgttctgttcactggagaatttgtgctgaagctcgtctccctcagacactactacttcactataggctggaacatctttgactttgtggtggtgattctctccattgtaggtatgtttctggctgagatgatagaaaagtattttgtgtcccctaccttgttccgagtgatccgtcttgccaggattggccgaatcctacgtctgatcaaaggagcaaaggggatccgcacgctgctctttgctttgatgatgtcccttcctgcgttgtttaacatcggcctcctgctcttcctggtcatgtttatctatgccatctttgggatgtccaactttgcctatgttaaaaaggaagctggaattgatgacatgttcaactttgagacctttggcaacagcatgatctgcttgttccaaattacaacctctgctggctgggatggattgctagcacctattcttaatagtgcaccacccgactgtgaccctgacacaattcaccctggcagctcagttaagggagactgtgggaacccatctgttgggattttcttttttgtcagttacatcatcatatccttcctggttgtggtgaacatgtacatcgcggtcatcctggagaacttcagtgttgctactgaagaaagtgcagagcccctgagtgaggatgactttgagatgttctatgaggtttgggaaaagtttgatcccgatgcgacccagtttatagagttctctaaactctctgattttgcagctgccctggatcctcctcttctcatagcaaaacccaacaaagtccagcttattgccatggatctgcccatggtcagtggtgaccggatccactgtcttgatattttatttgcctttacaaagcgtgttttgggtgagagtggagagatggatgcccttcgaatacagatggaagacaggtttatggcatcaaacccctccaaagtctcttatgagcctattacaaccactttgaaacgtaaacaagaggaggtgtctgccgctatcattcagcgtaatttcagatgttatcttttaaagcaaaggttaaaaaatatatcaagtaactataacaaagaggcaattaaagggaggattgacttacctataaaacaagacatgattattgacaaactaaatgggaactccactccagaaaaaacagatgggagttcctctaccacctctcctccttcctatgatagtgtaacaaaaccagacaaggaaaagtttgagaaagacaaaccagaaaaagaaagcaaaggaaaagaggtcagagaaaatcaaaagtaaaaagaaacaaagaattatctttgtgatcaattgtttacagcctatgaaggtaaagtatatgtgtcaactggacttcaagaggaggtccatgccaaactgactgttttaacaaatactcatagtcagtgcctatacaagacagtgaagtgacctctctgtcactgcaactctgtgaagcagggtatcaacattgacaagaggttgctgtttttattaccagctgacactgctgaggagaaacccaatggctacctagactatagggatagttgtgcaaagtgaacattgtaactacaccaaacacctttagtacagtccttgcatccattctatttttaacttccatatctgccatatttttacaaaatttgttctagtgcatttccatggtccccaattcatagtttattcataatgctatgtcactatttttgtaaatgaggtttacgttgaagaaacagtatacaagaaccctgtctctcaaatgatcagacaaaggtgttttgccagagagataaaatttttgctcaaaaccagaaaaagaattgtaatggctacagtttcagttacttccattttctagatggctttaattttgaaagtattttagtctgttatgtttgtttctatctgaacagttatgtgcctgtaaagtctcctctaatatttaaaggattatttttatgcaaagtattctgtttcagcaagtgcaaattttattctaagtttcagagctctatatttaatttaggtcaaatgctttccaaaaagtaatctaataaatccattctagaaaaatatatctaaagtattgctttagaatagttgttccactttctgctgcagtattgctttgccatcttctgctctcagcaaagctgatagtctatgtcaattaaataccctatgttatgtaaatagttattttatcctgtggtgcatgtttgggcaaatatatatatagcctgataaacaacttctattaaatcaaatatgtaccacagtgtatgtgtcttttgcaagcttccaacagggatgtatcctgtatcattcattaaacatagtttaaaggctatcactaatgcatgttaatattgcctatgctgctctattttactcaatccattcttcacaagtcttggttaaagaatgtcacatattggtgatagaatgaattcaacctgctctgtccattatgtcaagcagaataatttgaagctatttacaaacacctttacttttgcacttttaattcaacatgagtatcatatggtatctctctngatttcaaggaaacacactggatactgcctactgacaaaacctattcttcatattttgctaaaaatatgtctaaaacttgtttaaatataaataatgtaaaaatataatcaactttatttgtcagcattttgtacataagaaaattattttcaggttgatgacatcacaatttattttactttatgcttttgcttttgatttttaatcacaattccaaacttttgaatccataagatttttcaatggataatttcctaaaataaaagttagataatgggttttatggatttctttgttataatatattttctaccattccaataggagatacattggtcaaacactcaaacctagatcattttctaccaactatggttgcctcaatataaccttttattcatagatgtttttttttattcaacttttgtagtatttacgtatgcagactagtcttatttttttaattcctgctgcactaaagctattacaaatataacatggactttgttctttttagccatgaacaaagtggcaaagttgtgcaattacctaacatgatataaatttttgttttttgcacaaaccaaaagtttaatgttaattctttttacaaaactatttactgtagtgtattgaagaactgcatgcagggaattgctattgctaaaaagaatggtgagctacgtcattattgagccaaaagaataaatttcattttttattgcatttcacttattggcctctggggttttttgtttttgttttttgctgttggcagtttaaaatatatataattaataaaacctgtgcttgatctgacatttgtatacataaaagtttacatgaattttacaacaaactagtgcatgattcaccaagcagtactacagaacaaaggcaaattaaaagcagctttgtgaacttttatgtgtgcaaaggatcaagttcacatgttccaactttcaggtttgataataatagtagtaaccacctacaatagctttcaatttcaattaactcccttggctataagcatctaaactcatcttctttcaatataattgatgctatctcctaattacttggtggctaataaatgttacattctttgttacttaaatgcattatataaactcctatgtatacataaggtattaatgatatagttattgagaatttatattaacttttttttcaagaacccttggatttatgtgaggtcaaaaccaaactcttattctcagtggaaaactccagttgtaatgcatatttttaaagacaatttggatctaaatatgtatttcataattctcccataataaattatataaggtggctaaaa

SEQ ID NO: 281044 - DNA, 9325 bp, Homo sapiens
  misc_feature (2727)..(2727): n is a, c, g, or t
  misc_feature (7982)..(7982): n is a, c, g, or t
gcgatcggcctttttttctttctttttttttttcctcaaagctgttttctgatatatgttgggtaccatagagtgaatctcagaacaggaagcggaggcataagcagagaggattctggaaaggtctctttgttttcttatccacagagaaagaaagaaaaaaaattgtaactaatttgtaaacctctgtggtcaaaaaaaaaaaaaaaaaaaaagctgaacagctgccagaggaagacacgttataccctaaccatcttggatgctgggctttgttatgctgtaattcataaggctctgttttatcagagattatggagcaagaaaactgaagccaagccacatcaaggtttgacagggatgagatacctgtcaaggattcatagtagagtggcttactgggaaaggagcaaagaatctcttctagggatattgtaagaataaatgagataattcacagaagggacctggagcttttccggaaaaaggtgctgtgactatctaaggggaaaagctgagagtctggaactagcctatcttccgaggacttagagacaacagtatgggaatttcaacgagacgtttttactttcttttgaccaagattcaaattctttattccagcccttgataagtaaataagaaggtaattcgtatgcaagaagctacacgtaattaaatgtgcaggatgaaaagatggcacaggcactgttggtacccccaggacctgaaagcttccgcctttttactagagaatctcttgctgctatcgaaaaacgtgctgcagaagagaaagccaagaagcccaaaaaggaacaagataatgatgatgagaacaaaccaaagccaaatagtgacttggaagctggaaagaaccttccatttatttatggagacattcctccagagatggtgtcagagcccctggaggacctggatccctactatatcaataagaaaacttttatagtaatgaataaaggaaaggcaattttccgattcagtgccacctctgccttgtatattttaactccactaaaccctgttaggaaaattgctatcaagattttggtacattctttattcagcatgcttatcatgtgcactattttgaccaactgtgtatttatgaccttgagcaaccctcctgactggacaaagaatgtagagtacacattcactggaatctatacctttgagtcacttataaaaatcttggcaagagggttttgcttagaagattttacgtttcttcgtgatccatggaactggctggatttcagtgtcattgtgatggcgtatgtaacagaatttgtaagcctaggcaatgtttcagcccttcgaactttcagagtcttgagagctctgaaaactatttctgtaattccaggtttaaagaccattgtgggggccctgatccagtcggtaaagaagctttctgatgtgatgatcctgactgtgttctgtctgagcgtgtttgctctcattgggctgcagctgttcatgggcaatctgaggaataaatgtttgcagtggcccccaagcgattctgcttttgaaaccaacaccacttcctactttaatggcacaatggattcaaatgggacatttgttaatgtaacaatgagcacatttaactggaaggattacattggagatgacagtcacttttatgttttggatgggcaaaaagaccctttactctgtggaaatggctcagatgcaggccagtgtccagaaggatacatctgtgtgaaggctggtcgaaaccccaactatggctacacaagctttgacacctttagctgggctttcctgtctctatttcgactcatgactcaagactactgggaaaatctttaccagttgacattacgtgctgctgggaaaacatacatgatattttttgtcctggtcattttcttgggctcattttatttggtgaatttgatcctggctgtggtggccatggcctatgaggagcagaatcaggccaccttggaagaagcagaacaaaaagaggccgaatttcagcagatgctcgaacagcttaaaaagcaacaggaagaagctcaggcagttgcggcagcatcagctgcttcaagagatttcagtggaataggtgggttaggagagctgttggaaagttcttcagaagcatcaaagttgagttccaaaagtgctaaagaatggaggaaccgaaggaagaaaagaagacagagagagcaccttgaaggaaacaacaaaggagagagagacagctttcccaaatccgaatctgaagacagcgtcaaaagaagcagcttccttttctccatggatggaaacagactgaccagtgacaaaaaattctgctcccctcatcagtctctcttgagtatccgtggctccctgttttccccaagacgcaatagcaaaacaagcattttcagtttcagaggtcgggcaaaggatgttggatctgaaaatgactttgctgatgatgaacacagcacatttgaagacagcgaaagcaggagagactcactgtttgtgccgcacagacatggagagcgacgcaacagtaacgttagtcaggccagtatgtcatccaggatggtgccagggcttccagcaaatgggaagatgcacagcactgtggattgcaatggtgtggtttccttggtgggtggaccttcagctctaacgtcacctactggacaacttcccccagagggcaccaccacngaaacggaagtcagaaagagaaggttaagctcttaccagatttcaatggagatgctggaggattcctctggaaggcaaagagccgtgagcatagccagcattctgaccaacacaatggaagaacttgaagaatctagacagaaatgtccgccatgctggtatagatttgccaatgtgttcttgatctgggactgctgtgatgcatggttaaaagtaaaacatcttgtgaatttaattgttatggatccatttgttgatcttgccatcactatttgcattgtcttaaataccctctttatggccatggagcactaccccatgactgagcaattcagtagtgtgttgactgtaggaaacctggtctttactgggattttcacagcagaaatggttctcaagatcattgccatggatccttattactatttccaagaaggctggaatatctttgatggaattattgtcagcctcagtttaatggagcttggtctgtcaaatgtggagggattgtctgtactgcgatcattcagactgcttagagttttcaagttggcaaaatcctggcccacactaaatatgctaattaagatcattggcaattctgtgggggctctaggaaacctcaccttggtgttggccatcatcgtcttcatttttgctgtggtcggcatgcagctctttggtaagagctacaaagaatgtgtctgcaagatcaatgatgactgtacgctcccacggtggcacatgaacgacttcttccactccttcctgattgtgttccgcgtgctgtgtggagagtggatagagaccatgtgggactgtatggaggtcgctggccaaaccatgtgccttattgttttcatgttggtcatggtcattggaaaccttgtggttctgaacctctttctggccttattgttgagttcatttagctcagacaaccttgctgctactgatgatgacaatgaaatgaataatctgcagattgcagtaggaagaatgcaaaagggaattgattatgtgaaaaataagatgcgggagtgtttccaaaaagccttttttagaaagccaaaagttatagaaatccatgaaggcaataagatagacagctgcatgtccaataatactggaattgaaataagcaaagagcttaattatcttagagatgggaatggaaccaccagtggtgtaggtactggaagcagtgttgaaaaatacgtaatcgatgaaaatgattatatgtcattcataaacaaccccagcctcaccgtcacagtgccaattgctgttggagagtctgactttgaaaacttaaatactgaagagttcagcagtgagtcagaactagaagaaagcaaagagaaattaaatgcaaccagctcatctgaaggaagcacagttgatgttgttctaccccgagaaggtgaacaagctgaaactgaacccgaagaagaccttaaaccggaagcttgttttactgaaggatgtattaaaaagtttccattctgtcaagtaagtacagaagaaggcaaagggaagatctggtggaatcttcgaaaaacctgctacagtattgttgagcacaactggtttgagactttcattgtgttcatgatccttctcagtagtggtgcattggcctttgaagatatatacattgaacagcgaaagactatcaaaaccatgctagaatatgctgacaaagtctttacctatatattcattctggaaatgcttctcaaatgggttgcttatggatttcaaacatatttcactaatgcctggtgctggctagatttcttgatcgttgatgtttctttggttagcctggtagccaatgctcttggctactcagaactcggtgccatcaaatcattacggacattaagagctttaagacctctaagagccttatcccggtttgaaggcatgagggtggttgtgaatgctcttgttggagcaattccctctatcatgaatgtgctgttggtctgtctcatcttctggttgatctttagcatcatgggtgtgaatttgtttgctggcaagttctaccactgtgttaacatgacaacgggtaacatgtttgacattagtgatgttaacaatttgagtgactgtcaggctcttggcaagcaagctcggtggaaaaacgtgaaagtaaactttgataatgttggcgctggctatcttgcactgcttcaagtggccacatttaaaggctggatggatattatgtatgcagctgttgattcacgagatgttaaacttcagcctgtatatgaagaaaatctgtacatgtatttatactttgtcatctttatcatctttgggtcattcttcactctgaatctattcattggtgtcatcatagataacttcaaccagcagaaaaagaagtttggaggtcaagacatctttatgacagaggaacagaaaaaatattacaatgcaatgaagaaacttggatccaagaaacctcagaaacccatacctcgcccagcaaacaaattccaaggaatggtctttgattttgtaaccagacaagtctttgatatcagcatcatgatcctcatctgcctcaacatggtcaccatgatggtggaaacggatgaccagggcaaatacatgaccctagttttgtcccggatcaacctagtgttcattgttctgttcactggagaatttgtgctgaagctcgtctccctcagacactactacttcactataggctggaacatctttgactttgtggtggtgattctctccattgtaggtatgtttctggctgagatgatagaaaagtattttgtgtcccctaccttgttccgagtgatccgtcttgccaggattggccgaatcctacgtctgatcaaaggagcaaaggggatccgcacgctgctctttgctttgatgatgtcccttcctgcgttgtttaacatcggcctcctgctcttcctggtcatgtttatctatgccatctttgggatgtccaactttgcctatgttaaaaaggaagctggaattgatgacatgttcaactttgagacctttggcaacagcatgatctgcttgttccaaattacaacctctgctggctgggatggattgctagcacctattcttaatagtgcaccacccgactgtgaccctgacacaattcaccctggcagctcagttaagggagactgtgggaacccatctgttgggattttcttttttgtcagttacatcatcatatccttcctggttgtggtgaacatgtacatcgcggtcatcctggagaacttcagtgttgctactgaagaaagtgcagagcccctgagtgaggatgactttgagatgttctatgaggtttgggaaaagtttgatcccgatgcgacccagtttatagagttctctaaactctctgattttgcagctgccctggatcctcctcttctcatagcaaaacccaacaaagtccagcttattgccatggatctgcccatggtcagtggtgaccggatccactgtcttgatattttatttgcctttacaaagcgtgttttgggtgagagtggagagatggatgcccttcgaatacagatggaagacaggtttatggcatcaaacccctccaaagtctcttatgagcctattacaaccactttgaaacgtaaacaagaggaggtgtctgccgctatcattcagcgtaatttcagatgttatcttttaaagcaaaggttaaaaaatatatcaagtaactataacaaagaggcaattaaagggaggattgacttacctataaaacaagacatgattattgacaaactaaatgggaactccactccagaaaaaacagatgggagttcctctaccacctctcctccttcctatgatagtgtaacaaaaccagacaaggaaaagtttgagaaagacaaaccagaaaaagaaagcaaaggaaaagaggtcagagaaaatcaaaagtaaaaagaaacaaagaattatctttgtgatcaattgtttacagcctatgaaggtaaagtatatgtgtcaactggacttcaagaggaggtccatgccaaactgactgttttaacaaatactcatagtcagtgcctatacaagacagtgaagtgacctctctgtcactgcaactctgtgaagcagggtatcaacattgacaagaggttgctgtttttattaccagctgacactgctgaggagaaacccaatggctacctagactatagggatagttgtgcaaagtgaacattgtaactacaccaaacacctttagtacagtccttgcatccattctatttttaacttccatatctgccatatttttacaaaatttgttctagtgcatttccatggtccccaattcatagtttattcataatgctatgtcactatttttgtaaatgaggtttacgttgaagaaacagtatacaagaaccctgtctctcaaatgatcagacaaaggtgttttgccagagagataaaatttttgctcaaaaccagaaaaagaattgtaatggctacagtttcagttacttccattttctagatggctttaattttgaaagtattttagtctgttatgtttgtttctatctgaacagttatgtgcctgtaaagtctcctctaatatttaaaggattatttttatgcaaagtattctgtttcagcaagtgcaaattttattctaagtttcagagctctatatttaatttaggtcaaatgctttccaaaaagtaatctaataaatccattctagaaaaatatatctaaagtattgctttagaatagttgttccactttctgctgcagtattgctttgccatcttctgctctcagcaaagctgatagtctatgtcaattaaataccctatgttatgtaaatagttattttatcctgtggtgcatgtttgggcaaatatatatatagcctgataaacaacttctattaaatcaaatatgtaccacagtgtatgtgtcttttgcaagcttccaacagggatgtatcctgtatcattcattaaacatagtttaaaggctatcactaatgcatgttaatattgcctatgctgctctattttactcaatccattcttcacaagtcttggttaaagaatgtcacatattggtgatagaatgaattcaacctgctctgtccattatgtcaagcagaataatttgaagctatttacaaacacctttacttttgcacttttaattcaacatgagtatcatatggtatctctctngatttcaaggaaacacactggatactgcctactgacaaaacctattcttcatattttgctaaaaatatgtctaaaacttgtttaaatataaataatgtaaaaatataatcaactttatttgtcagcattttgtacataagaaaattattttcaggttgatgacatcacaatttattttactttatgcttttgcttttgatttttaatcacaattccaaacttttgaatccataagatttttcaatggataatttcctaaaataaaagttagataatgggttttatggatttctttgttataatatattttctaccattccaataggagatacattggtcaaacactcaaacctagatcattttctaccaactatggttgcctcaatataaccttttattcatagatgtttttttttattcaacttttgtagtatttacgtatgcagactagtcttatttttttaattcctgctgcactaaagctattacaaatataacatggactttgttctttttagccatgaacaaagtggcaaagttgtgcaattacctaacatgatataaatttttgttttttgcacaaaccaaaagtttaatgttaattctttttacaaaactatttactgtagtgtattgaagaactgcatgcagggaattgctattgctaaaaagaatggtgagctacgtcattattgagccaaaagaataaatttcattttttattgcatttcacttattggcctctggggttttttgtttttgttttttgctgttggcagtttaaaatatatataattaataaaacctgtgcttgatctgacatttgtatacataaaagtttacatgaattttacaacaaactagtgcatgattcaccaagcagtactacagaacaaaggcaaattaaaagcagctttgtgaacttttatgtgtgcaaaggatcaagttcacatgttccaactttcaggtttgataataatagtagtaaccacctacaatagctttcaatttcaattaactcccttggctataagcatctaaactcatcttctttcaatataattgatgctatctcctaattacttggtggctaataaatgttacattctttgttacttaaatgcattatataaactcctatgtatacataaggtattaatgatatagttattgagaatttatattaacttttttttcaagaacccttggatttatgtgaggtcaaaaccaaactcttattctcagtggaaaactccagttgtaatgcatatttttaaagacaatttggatctaaatatgtatttcataattctcccataataaattatataaggtggctaaaa

SEQ ID NO: 281045 - DNA, 9185 bp, Homo sapiens
  misc_feature (2587)..(2587): n is a, c, g, or t
  misc_feature (7842)..(7842): n is a, c, g, or t
gcgatcggcctttttttctttctttttttttttcctcaaagctgttttctgatatatgttgggtaccatagagtgaatctcagaacaggaagcggaggcataagcagagaggattctggaaaggtctctttgttttcttatccacagagaaagaaagaaaaaaaattgtaactaatttgtaaacctctgtggtcaaaaaaaaaaaaaaaaaaaaagctgaacagctgccagaggaagacacgttataccctaaccatcttggatgctgggctttgttatgctgtaattcataaggctctgttttatcagagattatggagcaagaaaactgaagccaagccacatcaaggtttgacagggatgagatacctgtcaaggattcatagtagagtggcttactgggaaaggagcaaagaatctcttctagggatattgtaagaataaatgagataattcacagaagggacctggagcttttccggaaaaaggtgctgtgactatctaaggtaattcgtatgcaagaagctacacgtaattaaatgtgcaggatgaaaagatggcacaggcactgttggtacccccaggacctgaaagcttccgcctttttactagagaatctcttgctgctatcgaaaaacgtgctgcagaagagaaagccaagaagcccaaaaaggaacaagataatgatgatgagaacaaaccaaagccaaatagtgacttggaagctggaaagaaccttccatttatttatggagacattcctccagagatggtgtcagagcccctggaggacctggatccctactatatcaataagaaaacttttatagtaatgaataaaggaaaggcaattttccgattcagtgccacctctgccttgtatattttaactccactaaaccctgttaggaaaattgctatcaagattttggtacattctttattcagcatgcttatcatgtgcactattttgaccaactgtgtatttatgaccttgagcaaccctcctgactggacaaagaatgtagagtacacattcactggaatctatacctttgagtcacttataaaaatcttggcaagagggttttgcttagaagattttacgtttcttcgtgatccatggaactggctggatttcagtgtcattgtgatggcatatgtgacagagtttgtggacctgggcaatgtctcagcgttgagaacattcagagttctccgagcactgaaaacaatttcagtcattccaggtttaaagaccattgtgggggccctgatccagtcggtaaagaagctttctgatgtgatgatcctgactgtgttctgtctgagcgtgtttgctctcattgggctgcagctgttcatgggcaatctgaggaataaatgtttgcagtggcccccaagcgattctgcttttgaaaccaacaccacttcctactttaatggcacaatggattcaaatgggacatttgttaatgtaacaatgagcacatttaactggaaggattacattggagatgacagtcacttttatgttttggatgggcaaaaagaccctttactctgtggaaatggctcagatgcaggccagtgtccagaaggatacatctgtgtgaaggctggtcgaaaccccaactatggctacacaagctttgacacctttagctgggctttcctgtctctatttcgactcatgactcaagactactgggaaaatctttaccagttgacattacgtgctgctgggaaaacatacatgatattttttgtcctggtcattttcttgggctcattttatttggtgaatttgatcctggctgtggtggccatggcctatgaggagcagaatcaggccaccttggaagaagcagaacaaaaagaggccgaatttcagcagatgctcgaacagcttaaaaagcaacaggaagaagctcaggcagttgcggcagcatcagctgcttcaagagatttcagtggaataggtgggttaggagagctgttggaaagttcttcagaagcatcaaagttgagttccaaaagtgctaaagaatggaggaaccgaaggaagaaaagaagacagagagagcaccttgaaggaaacaacaaaggagagagagacagctttcccaaatccgaatctgaagacagcgtcaaaagaagcagcttccttttctccatggatggaaacagactgaccagtgacaaaaaattctgctcccctcatcagtctctcttgagtatccgtggctccctgttttccccaagacgcaatagcaaaacaagcattttcagtttcagaggtcgggcaaaggatgttggatctgaaaatgactttgctgatgatgaacacagcacatttgaagacagcgaaagcaggagagactcactgtttgtgccgcacagacatggagagcgacgcaacagtaacgttagtcaggccagtatgtcatccaggatggtgccagggcttccagcaaatgggaagatgcacagcactgtggattgcaatggtgtggtttccttggtgggtggaccttcagctctaacgtcacctactggacaacttcccccagagggcaccaccacngaaacggaagtcagaaagagaaggttaagctcttaccagatttcaatggagatgctggaggattcctctggaaggcaaagagccgtgagcatagccagcattctgaccaacacaatggaagaacttgaagaatctagacagaaatgtccgccatgctggtatagatttgccaatgtgttcttgatctgggactgctgtgatgcatggttaaaagtaaaacatcttgtgaatttaattgttatggatccatttgttgatcttgccatcactatttgcattgtcttaaataccctctttatggccatggagcactaccccatgactgagcaattcagtagtgtgttgactgtaggaaacctggtctttactgggattttcacagcagaaatggttctcaagatcattgccatggatccttattactatttccaagaaggctggaatatctttgatggaattattgtcagcctcagtttaatggagcttggtctgtcaaatgtggagggattgtctgtactgcgatcattcagactgcttagagttttcaagttggcaaaatcctggcccacactaaatatgctaattaagatcattggcaattctgtgggggctctaggaaacctcaccttggtgttggccatcatcgtcttcatttttgctgtggtcggcatgcagctctttggtaagagctacaaagaatgtgtctgcaagatcaatgatgactgtacgctcccacggtggcacatgaacgacttcttccactccttcctgattgtgttccgcgtgctgtgtggagagtggatagagaccatgtgggactgtatggaggtcgctggccaaaccatgtgccttattgttttcatgttggtcatggtcattggaaaccttgtggttctgaacctctttctggccttattgttgagttcatttagctcagacaaccttgctgctactgatgatgacaatgaaatgaataatctgcagattgcagtaggaagaatgcaaaagggaattgattatgtgaaaaataagatgcgggagtgtttccaaaaagccttttttagaaagccaaaagttatagaaatccatgaaggcaataagatagacagctgcatgtccaataatactggaattgaaataagcaaagagcttaattatcttagagatgggaatggaaccaccagtggtgtaggtactggaagcagtgttgaaaaatacgtaatcgatgaaaatgattatatgtcattcataaacaaccccagcctcaccgtcacagtgccaattgctgttggagagtctgactttgaaaacttaaatactgaagagttcagcagtgagtcagaactagaagaaagcaaagagaaattaaatgcaaccagctcatctgaaggaagcacagttgatgttgttctaccccgagaaggtgaacaagctgaaactgaacccgaagaagaccttaaaccggaagcttgttttactgaaggatgtattaaaaagtttccattctgtcaagtaagtacagaagaaggcaaagggaagatctggtggaatcttcgaaaaacctgctacagtattgttgagcacaactggtttgagactttcattgtgttcatgatccttctcagtagtggtgcattggcctttgaagatatatacattgaacagcgaaagactatcaaaaccatgctagaatatgctgacaaagtctttacctatatattcattctggaaatgcttctcaaatgggttgcttatggatttcaaacatatttcactaatgcctggtgctggctagatttcttgatcgttgatgtttctttggttagcctggtagccaatgctcttggctactcagaactcggtgccatcaaatcattacggacattaagagctttaagacctctaagagccttatcccggtttgaaggcatgagggtggttgtgaatgctcttgttggagcaattccctctatcatgaatgtgctgttggtctgtctcatcttctggttgatctttagcatcatgggtgtgaatttgtttgctggcaagttctaccactgtgttaacatgacaacgggtaacatgtttgacattagtgatgttaacaatttgagtgactgtcaggctcttggcaagcaagctcggtggaaaaacgtgaaagtaaactttgataatgttggcgctggctatcttgcactgcttcaagtggccacatttaaaggctggatggatattatgtatgcagctgttgattcacgagatgttaaacttcagcctgtatatgaagaaaatctgtacatgtatttatactttgtcatctttatcatctttgggtcattcttcactctgaatctattcattggtgtcatcatagataacttcaaccagcagaaaaagaagtttggaggtcaagacatctttatgacagaggaacagaaaaaatattacaatgcaatgaagaaacttggatccaagaaacctcagaaacccatacctcgcccagcaaacaaattccaaggaatggtctttgattttgtaaccagacaagtctttgatatcagcatcatgatcctcatctgcctcaacatggtcaccatgatggtggaaacggatgaccagggcaaatacatgaccctagttttgtcccggatcaacctagtgttcattgttctgttcactggagaatttgtgctgaagctcgtctccctcagacactactacttcactataggctggaacatctttgactttgtggtggtgattctctccattgtaggtatgtttctggctgagatgatagaaaagtattttgtgtcccctaccttgttccgagtgatccgtcttgccaggattggccgaatcctacgtctgatcaaaggagcaaaggggatccgcacgctgctctttgctttgatgatgtcccttcctgcgttgtttaacatcggcctcctgctcttcctggtcatgtttatctatgccatctttgggatgtccaactttgcctatgttaaaaaggaagctggaattgatgacatgttcaactttgagacctttggcaacagcatgatctgcttgttccaaattacaacctctgctggctgggatggattgctagcacctattcttaatagtgcaccacccgactgtgaccctgacacaattcaccctggcagctcagttaagggagactgtgggaacccatctgttgggattttcttttttgtcagttacatcatcatatccttcctggttgtggtgaacatgtacatcgcggtcatcctggagaacttcagtgttgctactgaagaaagtgcagagcccctgagtgaggatgactttgagatgttctatgaggtttgggaaaagtttgatcccgatgcgacccagtttatagagttctctaaactctctgattttgcagctgccctggatcctcctcttctcatagcaaaacccaacaaagtccagcttattgccatggatctgcccatggtcagtggtgaccggatccactgtcttgatattttatttgcctttacaaagcgtgttttgggtgagagtggagagatggatgcccttcgaatacagatggaagacaggtttatggcatcaaacccctccaaagtctcttatgagcctattacaaccactttgaaacgtaaacaagaggaggtgtctgccgctatcattcagcgtaatttcagatgttatcttttaaagcaaaggttaaaaaatatatcaagtaactataacaaagaggcaattaaagggaggattgacttacctataaaacaagacatgattattgacaaactaaatgggaactccactccagaaaaaacagatgggagttcctctaccacctctcctccttcctatgatagtgtaacaaaaccagacaaggaaaagtttgagaaagacaaaccagaaaaagaaagcaaaggaaaagaggtcagagaaaatcaaaagtaaaaagaaacaaagaattatctttgtgatcaattgtttacagcctatgaaggtaaagtatatgtgtcaactggacttcaagaggaggtccatgccaaactgactgttttaacaaatactcatagtcagtgcctatacaagacagtgaagtgacctctctgtcactgcaactctgtgaagcagggtatcaacattgacaagaggttgctgtttttattaccagctgacactgctgaggagaaacccaatggctacctagactatagggatagttgtgcaaagtgaacattgtaactacaccaaacacctttagtacagtccttgcatccattctatttttaacttccatatctgccatatttttacaaaatttgttctagtgcatttccatggtccccaattcatagtttattcataatgctatgtcactatttttgtaaatgaggtttacgttgaagaaacagtatacaagaaccctgtctctcaaatgatcagacaaaggtgttttgccagagagataaaatttttgctcaaaaccagaaaaagaattgtaatggctacagtttcagttacttccattttctagatggctttaattttgaaagtattttagtctgttatgtttgtttctatctgaacagttatgtgcctgtaaagtctcctctaatatttaaaggattatttttatgcaaagtattctgtttcagcaagtgcaaattttattctaagtttcagagctctatatttaatttaggtcaaatgctttccaaaaagtaatctaataaatccattctagaaaaatatatctaaagtattgctttagaatagttgttccactttctgctgcagtattgctttgccatcttctgctctcagcaaagctgatagtctatgtcaattaaataccctatgttatgtaaatagttattttatcctgtggtgcatgtttgggcaaatatatatatagcctgataaacaacttctattaaatcaaatatgtaccacagtgtatgtgtcttttgcaagcttccaacagggatgtatcctgtatcattcattaaacatagtttaaaggctatcactaatgcatgttaatattgcctatgctgctctattttactcaatccattcttcacaagtcttggttaaagaatgtcacatattggtgatagaatgaattcaacctgctctgtccattatgtcaagcagaataatttgaagctatttacaaacacctttacttttgcacttttaattcaacatgagtatcatatggtatctctctngatttcaaggaaacacactggatactgcctactgacaaaacctattcttcatattttgctaaaaatatgtctaaaacttgtttaaatataaataatgtaaaaatataatcaactttatttgtcagcattttgtacataagaaaattattttcaggttgatgacatcacaatttattttactttatgcttttgcttttgatttttaatcacaattccaaacttttgaatccataagatttttcaatggataatttcctaaaataaaagttagataatgggttttatggatttctttgttataatatattttctaccattccaataggagatacattggtcaaacactcaaacctagatcattttctaccaactatggttgcctcaatataaccttttattcatagatgtttttttttattcaacttttgtagtatttacgtatgcagactagtcttatttttttaattcctgctgcactaaagctattacaaatataacatggactttgttctttttagccatgaacaaagtggcaaagttgtgcaattacctaacatgatataaatttttgttttttgcacaaaccaaaagtttaatgttaattctttttacaaaactatttactgtagtgtattgaagaactgcatgcagggaattgctattgctaaaaagaatggtgagctacgtcattattgagccaaaagaataaatttcattttttattgcatttcacttattggcctctggggttttttgtttttgttttttgctgttggcagtttaaaatatatataattaataaaacctgtgcttgatctgacatttgtatacataaaagtttacatgaattttacaacaaactagtgcatgattcaccaagcagtactacagaacaaaggcaaattaaaagcagctttgtgaacttttatgtgtgcaaaggatcaagttcacatgttccaactttcaggtttgataataatagtagtaaccacctacaatagctttcaatttcaattaactcccttggctataagcatctaaactcatcttctttcaatataattgatgctatctcctaattacttggtggctaataaatgttacattctttgttacttaaatgcattatataaactcctatgtatacataaggtattaatgatatagttattgagaatttatattaacttttttttcaagaacccttggatttatgtgaggtcaaaaccaaactcttattctcagtggaaaactccagttgtaatgcatatttttaaagacaatttggatctaaatatgtatttcataattctcccataataaattatataaggtggctaaaa

SEQ ID NO: 281046 - DNA, 3584 bp, Homo sapiens
  misc_feature (2727)..(2727): n is a, c, g, or t
gcgatcggcctttttttctttctttttttttttcctcaaagctgttttctgatatatgttgggtaccatagagtgaatctcagaacaggaagcggaggcataagcagagaggattctggaaaggtctctttgttttcttatccacagagaaagaaagaaaaaaaattgtaactaatttgtaaacctctgtggtcaaaaaaaaaaaaaaaaaaaaagctgaacagctgccagaggaagacacgttataccctaaccatcttggatgctgggctttgttatgctgtaattcataaggctctgttttatcagagattatggagcaagaaaactgaagccaagccacatcaaggtttgacagggatgagatacctgtcaaggattcatagtagagtggcttactgggaaaggagcaaagaatctcttctagggatattgtaagaataaatgagataattcacagaagggacctggagcttttccggaaaaaggtgctgtgactatctaaggggaaaagctgagagtctggaactagcctatcttccgaggacttagagacaacagtatgggaatttcaacgagacgtttttactttcttttgaccaagattcaaattctttattccagcccttgataagtaaataagaaggtaattcgtatgcaagaagctacacgtaattaaatgtgcaggatgaaaagatggcacaggcactgttggtacccccaggacctgaaagcttccgcctttttactagagaatctcttgctgctatcgaaaaacgtgctgcagaagagaaagccaagaagcccaaaaaggaacaagataatgatgatgagaacaaaccaaagccaaatagtgacttggaagctggaaagaaccttccatttatttatggagacattcctccagagatggtgtcagagcccctggaggacctggatccctactatatcaataagaaaacttttatagtaatgaataaaggaaaggcaattttccgattcagtgccacctctgccttgtatattttaactccactaaaccctgttaggaaaattgctatcaagattttggtacattctttattcagcatgcttatcatgtgcactattttgaccaactgtgtatttatgaccttgagcaaccctcctgactggacaaagaatgtagagtacacattcactggaatctatacctttgagtcacttataaaaatcttggcaagagggttttgcttagaagattttacgtttcttcgtgatccatggaactggctggatttcagtgtcattgtgatggcgtatgtaacagaatttgtaagcctaggcaatgtttcagcccttcgaactttcagagtcttgagagctctgaaaactatttctgtaattccaggtttaaagaccattgtgggggccctgatccagtcggtaaagaagctttctgatgtgatgatcctgactgtgttctgtctgagcgtgtttgctctcattgggctgcagctgttcatgggcaatctgaggaataaatgtttgcagtggcccccaagcgattctgcttttgaaaccaacaccacttcctactttaatggcacaatggattcaaatgggacatttgttaatgtaacaatgagcacatttaactggaaggattacattggagatgacagtcacttttatgttttggatgggcaaaaagaccctttactctgtggaaatggctcagatgcaggccagtgtccagaaggatacatctgtgtgaaggctggtcgaaaccccaactatggctacacaagctttgacacctttagctgggctttcctgtctctatttcgactcatgactcaagactactgggaaaatctttaccagttgacattacgtgctgctgggaaaacatacatgatattttttgtcctggtcattttcttgggctcattttatttggtgaatttgatcctggctgtggtggccatggcctatgaggagcagaatcaggccaccttggaagaagcagaacaaaaagaggccgaatttcagcagatgctcgaacagcttaaaaagcaacaggaagaagctcaggcagttgcggcagcatcagctgcttcaagagatttcagtggaataggtgggttaggagagctgttggaaagttcttcagaagcatcaaagttgagttccaaaagtgctaaagaatggaggaaccgaaggaagaaaagaagacagagagagcaccttgaaggaaacaacaaaggagagagagacagctttcccaaatccgaatctgaagacagcgtcaaaagaagcagcttccttttctccatggatggaaacagactgaccagtgacaaaaaattctgctcccctcatcagtctctcttgagtatccgtggctccctgttttccccaagacgcaatagcaaaacaagcattttcagtttcagaggtcgggcaaaggatgttggatctgaaaatgactttgctgatgatgaacacagcacatttgaagacagcgaaagcaggagagactcactgtttgtgccgcacagacatggagagcgacgcaacagtaacgttagtcaggccagtatgtcatccaggatggtgccagggcttccagcaaatgggaagatgcacagcactgtggattgcaatggtgtggtttccttggtgggtggaccttcagctctaacgtcacctactggacaacttcccccagagggcaccaccacngaaacggaagtcagaaagagaaggttaagctcttaccagatttcaatggagatgctggaggattcctctggaaggcaaagagccgtgagcatagccagcattctgaccaacacaatggaagaacttgaagaatctagacagaaatgtccgccatgctggtatagatttgccaatgtgttcttgatctgggactgctgtgatgcatggttaaaagtaaaacatcttgtgaatttaattgttatggatccatttgttgatcttgccatcactatttgcattgtcttaaataccctctttatggccatggagcactaccccatgactgagcaattcagtagtgtgttgactgtaggaaacctggtctttactgggattttcacagcagaaatggttctcaagatcattgccatggatccttattactatttccaagaaggctggaatatctttgatggaattattgtcagcctcagtttaatggagcttggtctgtcaaatgtggagggattgtctgtactgcgatcattcagactgcttagagttttcaagttggcaaaatcctggcccacactaaatatgctaattaagatcattggcaattctgtgggggctctaggaaacctcaccttggtgttggccatcatcgtcttcatttttgctgtggtcggcatgcagctctttggtaagagctacaaagaatgtgtctgcaagatcaatgatgactgtacgctcccacggtggcacatgaacgacttcttccactccttcctgattgtgttccgcgtgctgtgtggagagtggtgaattcctttctagagatataaaccggtcaagctcctcgaggagtgctagcacag

SEQ ID NO: 281047 - DNA, 537 bp, Homo sapiens
tcttttcctcaatctaaagaattaaacttagttatttatcttgtaaaactattgaaaagttagaatatcacttatttttttcctgatagtatataaactcaacacttgtaccctctttttgcatgttcctaaatttttcagtctcctgtattttcagggaggctacatgatttactgtactgttaaaagctttgagttaaattccagttccaccaaacagaccgtgtgaccttaagaaacttgcttgtcctcagttttctcttttttctggtaaacacagttattaacgcctacatctcaaaggagtgcttaaagaattaaagtgaaacaatgtaaggaacataaaagtcctcctatatagaaggttctaagcaactaattcatgattatattattctatagtgattgctgctattatgtgtcaaaattcttggaattgattattctaaaataacagtgaaattagtattttagtattcaatcattttttaatgcaagagccatttctcccaaatgccctttgttatttcctaacta

SEQ ID NO: 281048 - DNA, 495 bp, Homo sapiens
tcttttcctcaatctaaagaattaaacttagttatttatcttgtaaaactattgaaaagttagaatatcacttatttttttcctgatagtatataaactcaacacttgtaccctctttttgcatgttcctaaatttttcagtctcctgtattttcagggaggctacatgatttactgtactgttaaaagctttgagttaaattccagttccaccaaacagaccgtgtgaccttaagaaacttgcttgtcctcagttttctcttttttctggtaaacacagttattaacgcctacatctcaaaggagtgcttaaagaattaaagtgaaacaatgtaaggaacataaaagtcctcctatatagaaggttctaagcaactaattcatgattatattattctatagtgattgctgctattatgttccttacattgtttcactataattctttaagcactcctctgagtgtgggaaggaggaggaggaggtcgcgggatc

SEQ ID NO: 281049 - DNA, 843 bp, Homo sapiens
aagcagtcgtatcaacgcagagtgcccattacggccggggcataactcaatctgaaccaaggattgtagtttagttttcctccttgccttcccttctgtgtgaccgaccccttggccaaaaaaaaacaaaaagcaaaaaacaaaaacctaccctgttctggtttttttcctccctttagttccacccccaacccccattccctggtgtccttcttagagatgaagaaataataaggaaacatctttcatagccacattaaataagagaaactgatatacattatttttttctttttaaagatgacttataagaaccctgaaatttatataggtgagacaattagaaataaaaagatcttcagccaggcctttctgaaggagttattctgctaaaaatggtcttagttgtctgaaaagccagctcttgaacctcttcacaacagtatcaacactggcttctcccggttcattttatgcgtgcgagaagtcagtggtaactgctgcagggcttaatacattagtggtaactggtttaaaaaacaaagactgtaagcctgtgtgtgccactgtttgcttcaacagtatatcctactaataagcctcacctatttaatccaatgagttttaaatctaaatctcattcccttcttctttccctaccttttttttctttttttcttaaaaaaatattttgtgttattaacagaaattcatatttggtgtggcttaacggtatttcagaaggtcatcagattgtgagactgcttccttgaaacatttttgtgctattgttttaaaaaaataattaaaaaacagttggcgttaataaaaatgtcaatgtga

SEQ ID NO: 281050 - DNA, 877 bp, Homo sapiens
  misc_feature (824)..(824): n is a, c, g, or t
  misc_feature (869)..(869): n is a, c, g, or t
ctctccctccctccttgcgggccctcctccccttccctcccctccgcccccttccccgtaggcagcccgcccgccagtccgcccgcaccgcctccttcccagcccctagcgctccggctgggtctctcccccgccccccaggctcccccggtcgctctcctccggcggtcgcccgcgctcggtggatgtggctggcagctgccgccccctccctcgctcgccgcctgctcttcctcggccctccgcctcctcccctcctccttctcgtcttcagccgctcctctcgccgccgcctccacagcctgggcctcgccgcgatgccggagaagaggcccttcgagcggctgcctgccgatgtctcccccatcaactacagcctttgcctcaagcccgacttgctggacttcaccttcgagggcaagctggaggccgccgcccaggtgaggcaggcgactaatcagattgtgatgaattgtgctgatattgatattattacagcttcatatgcaccagaaggagatgaagaaatacatgctacaggatttaactatcagaatgaagatgaaaaagtcaccttgtctttccctagtactctgcaaacaggtacgggaaccttaaagatagattttgttggagagctgaatgacaaaatgaaaggtttctatagaagtaaatatactaccccttctggagaggtgcgctatgctgctgtaacacagtttgaggctactgatgcccgaagggcttttccttgctgggatgagcctgctatcaaagcaacttttgatatctcattggttgttccttaaaagaacaggaagtangcttttaattcaaaaccatgggaaatggtaaattggaacccgggnaaaaccca

SEQ ID NO: 281051 - DNA, 857 bp, Homo sapiens
  misc_feature (809)..(809): n is a, c, g, or t
  misc_feature (816)..(816): n is a, c, g, or t
  misc_feature (818)..(818): n is a, c, g, or t
agaagcgggaggagaaatcggctaggtcgaggctgggtgttaatcggccgaggcgtgttacactcctgtggcaagcagagcaaggaaaatttgcgttagaggttgctgctaaaaccttgcctttttataaggactacttcaatgttccttatcctctacctaaaattgatctcattgctattgcagactttgcagctggtgccatggagaactggggccttgttacttatagggagactgcattgcttattgatccaaaaaattcctgttcttcatcccgccagtgggttgctctggttgtgggacatgaactcgcccatcaatggtttggaaatcttgttactatggaatggtggactcatctttggttaaatgaaggttttgcatcctggattgaatatctgtgtgtagaccactgcttcccagagtatgatatttggactcagtttgtttctgctgattacacccgtgcccaggagcttgacgccttagataacagccatcctattgaagtcagtgtgggccatccatctgaggttgatgagatatttgatgctatatcatatagcaaaggtgcatctgtcatccgaatgctgcatgactacattggggataaggactttaagaaaggaatgaacatgtatttaaccaagttccaacaaaagaatgctgccacagaggatctctgggaaagtttagaaaatgctagtggtaaacctatagcagctgtgatgaatacctggaccaaacaaatgggatttcccctcatttatgtggaagctgaacaggtggactgaaggtaaatgaantttgggngncaaaatgggggggctttttggaaagtcctggggcccaaa

SEQ ID NO: 281052 - DNA, 607 bp, Homo sapiens
tggccaggtgcagtggctcacgcctgtaataccagcactttgggacgccgaggtgggcagatcacctgaggtcgggagttcgagactatcctggccaacatggtgaaatcctgtccctactaaaaatacaaaaattagctgagcgtggtggtgtgtgcctgtaatcccagctacttgggaggctgaggcaggagaatcgcttgaacctgggaggcagaggttgtggtgagccgagatgaggtcattgcactccagcctgggcaacaagtgtgaaactccgtctcaaaaaaaaaaaagtttccttaaatagttactggctttatttaaggacttctccatcgcccaacacacatcctttataacagactgaagttggcagagaacagaatgatttatttttagggtaaatggaagtttgttctcagcctcttggtttcacttactgtttaaaaccattgttttgcagctatcagttgagggatttgcagttgataaaatggctggagaggttaaggtaaggaaaatactgtttactcttcacttttcagtctagtaagtaaaaacaataacctggttgtaattatagtgttggggataacactgtagc

SEQ ID NO: 281053 - DNA, 697 bp, Homo sapiens
  misc_feature (691)..(691): n is a, c, g, or t
tggccaggtgcagtggctcacgcctgtaataccagcactttgggacgccgaggtgggcagatcacctgaggtcgggagttcgagactatcctggccaacatggtgaaatcctgtccctactaaaaatacaaaaattagctgagcgtggtggtgtgtgcctgtaatcccagctacttgggaggctgaggcaggagaatcgcttgaacctgggaggcagaggttgtggtgagccgagatgaggtcattgcactccagcctgggcaacaagtgtgaaactccgtctcaaaaaaaaaaaagtttccttaaatagttactggctttatttaaggacttctccatcgcccaacacacatcctttataacagactgaagttggcagagaacagaatgatttatttttagggtaaatggaagtttgttctcagcctcttggtttcacttactgtttaaaaccattgttttgcagctatcagttgagggatttgcagttgataaaatggctggagaggttaaggctttcttcgagagtcacccagctccttcagctgagcgtaccatccagcagtgttgtgaaaatattctgctgaatgctgcctggctaaagcgagatgctgagagcatccaccaatcccaggggtacccgagcctcgaaattccgtaaatcatggggcataagctggtttcctggggngaaaaa

SEQ ID NO: 281054 - DNA, 678 bp, Homo sapiens
taatgctacttcaacatatttaattaggctcccatataattgtaattcattacaattagtgcaagaaatctaatgttcttcacctccatatcttcctcatcactcctctgcaactaccccaaaaataaacagaaccatagtggcttctttcccagcagaacaaagccaggactggaacccaggctctaagggatgacaggaatcatgttctattcaactttattattattagttactacatttttttgaggaccatcgttatacattatgagtgagttaaaggcagaaaaatgtaagttagaagggttttcctagaaagcgttttatgtaattcagtattacaggctatctgcttcctgtcataaccctgaatcacactgtctgccaggtcagtgtgggccatccatctgaggttgatgagatatttgatgctatatcatatagcaaaggtgcatctgtcatccgaatgctgcatgactacattggggataaggactttaagaaaggaatgaacatgtatttaaccaagttccaacaaaagaatgctgccacaggtaatctttaatagcttgagatagaaatggagagaaagtattgtcactctatccaggctgggacattttatttttgttctgaatacttaactcaaggtcaggatccatgtaataaataaattag

SEQ ID NO: 281055 - DNA, 506 bp, Homo sapiens
accttggtgtttcattattttacaaaataataattaagagaatataagagtggaatttctctagggaatgggttggaaaatatgtagttatatttttcatatcaagttataaatggattaaagtttggccattgtattcaaagtttggagctaaggcagtcttcggagggtagggctcctcgggattcatttctagtaatttaagatacattggcttgcaacaggattcctttgtgggtttcaatatgaattataataacatatttattagatggttattttgtttatacttttataggttgctgctaaaaccttgcctttttataaggactacttcaatgttccttatcctctacctaaaattgatctcattgctattgcagactttgcagctggtaaagtaaatttcattttattgctgaattgtaataactttttaaaattttgtgacttttgatgcaagagtatatatatatatatatatatcaataaatgtttatatttat

SEQ ID NO: 281056 - DNA, 4385 bp, Homo sapiens
gaattccccgatgtacttctgcattaaattccttgctttcagaatcataaccagggaatcgtttggtactgtgagggatagacaagccctcatttctgtaatccctgctaagtgaggtcaaggctgacatctaagatgttctgtggcggaacctggcccccatcaggggcaacctttaatttggattctggaagactaaaactttgggtctctcccccgccccccaggctcccccggtcgctctcctccggcggtcgcccgcgctcggtggatgtggctggcagctgccgccccctccctcgctcgccgcctgctcttcctcggccctccgcctcctcccctcctccttctcgtcttcagccgctcctctcgccgccgcctccacagcctgggcctcgccgcgatgccggagaagaggcccttcgagcggctgcctgccgatgtctcccccatcaactacagcctttgcctcaagcccgacttgctggacttcaccttcgagggcaagctggaggccgccgcccaggtgaggcaggcgactaatcagattgtgatgaattgtgctgatattgatattattacagcttcatatgcaccagaaggagatgaagaaatacatgctacaggatttaactatcagaatgaagatgaaaaagtcaccttgtctttccctagtactctgcaaacaggtacgggaaccttaaagatagattttgttggagagctgaatgacaaaatgaaaggtttctatagaagtaaatatactaccccttctggagaggtgcgctatgctgctgtaacacagtttgaggctactgatgcccgaagggcttttccttgctgggatgagcctgctatcaaagcaacttttgatatctcattggttgttcctaaagacagagtagctttatcaaacatgaatgtaattgaccggaaaccataccctgatgatgaaaatttagtggaagtgaagtttgcccgcacacctgttatgtctacatatctggtggcatttgttgtgggtgaatatgactttgtagaaacaaggtcaaaagatggtgtgtgtgtccgtgtttacactcctgttggcaaagcagagcaaggaaaatttgcgttagaggttgctgctaaaaccttgcctttttataaggactacttcaatgttccttatcctctacctaaaattgatctcattgctattgcagactttgcagctggtgccatggagaactggggccttgttacttatagggagactgcattgcttattgatccaaaaaattcctgttcttcatcccgccagtgggttgctctggttgtgggacatgaactcgcccatcaatggtttggaaatcttgttactatggaatggtggactcatctttggttaaatgaaggttttgcatcctggattgaatatctgtgtgtagaccactgcttcccagagtatgatatttggactcagtttgtttctgctgattacacccgtgcccaggagcttgacgccttagataacagccatcctattgaagtcagtgtgggccatccatctgaggttgatgagatatttgatgctatatcatatagcaaaggtgcatctgtcatccgaatgctgcatgactacattggggataaggactttaagaaaggaatgaacatgtatttaaccaagttccaacaaaagaatgctgccacagaggatctctgggaaagtttagaaaatgctagtggtaaacctatagcagctgtgatgaatacctggaccaaacaaatgggatttcccctcatttatgtggaagctgaacaggtagaagatgacagattattgaggttgtcccaaaagaagttctgtgctggtgggtcatatgttggtgaagattgtccccagtggatggtccctatcacaatctctactagtgaagaccccaaccaggccaaactaaaaattctaatggacaagccagagatgaatgtggttttgaaaaatgtcaaaccagaccaatgggtgaagttaaacttaggaacagttgggttttatcggacccagtacagctctgccatgctggaaagtttattaccaggcattcgtgacctttctctgccccctgtggatcgacttggattacagaatgacctcttctccttggctcgagctggaatcattagcactgtagaggttctaaaagtcatggaggcttttgtgaatgagcccaattatactgtatggagcgacctgagctgtaacctggggattctctcaactctcttgtcccacacagacttctatgaggaaatccaggagtttgtgaaagatgtcttttcacctataggggagagactgggctgggaccccaaacctggagaaggtcatctcgatgcactcctgaggggcttggttctgggaaaactaggaaaagcaggacataaggcaacgttagaagaagcccgtcgtcggtttaaggaccacgtggaaggaaaacagattctctccgctgatctgaggagtcctgtctatctgactgttttgaagcatggtgatggcactactttagatattatgttaaaacttcataaacaagcagatatgcaagaagagaaaaaccgaatcgaaagagtccttggcgctactcttttgcctgacctgattcaaaaagtcctcacgtttgcactttcagaagaggtacgtccacaggacactgtatcggtaattggtggagtagctggaggcagcaagcatggtaggaaagctgcttggaaattcataaaggacaactgggaagaactttataaccgataccagggaggattcttaatatccagactaataaagctatcagttgagggatttgcagttgataaaatggctggagaggttaaggctttcttcgagagtcacccagctccttcagctgagcgtaccatccagcagtgttgtgaaaatattctgctgaatgctgcctggctaaagcgagatgctgagagcatccaccagtacctccttcagcggaaggcctcaccacccacagtgtgaatcctgaggtgccgccattggcggttctgctgcttcgctgcagggataaggtggagctaccgaacagctgattcatatgccaagaatttggagtcttctttcaaaccagtgggggttggacaatgaatgtagttaactggttcctgctcacactccagaattaaattctattgaaaaaggaaaatcagcaattcagcaaaaaataaataaaaaataaaaatgtaaatatgatagtaataaaatagagcataacgaaactgtgaaactttctgaagccttgtcagtggttaaaagtatttaacactctactgttaatgacagatgttctgtttttataacctaccaaaaggaaactagaggcttcttggtgaagagcatttttgtgaagtgggttctgcaaggagcctataaagccaagggtggtgtccatttctgggaatggttaaacacaaaaggctgatagctggtatcacatagttggagtcagtgcataattccaagtggctttttttttttttggcacggggactgatcaggaagatatattcctgcataactcaatctgaaccaaggattgtagtttagttttcctccttgccttcccttctgtgtgaccgaccccttggccaaaaaaaaacaaaaagcaaaaaacaaaaacctaccctgttctggtttttttcctccctttagttccacccccaacccccattccctggtgtccttcttagagatgaagaaataataaggaaacatctttcatagccacattaaataagagaaactgatatacattatttttttctttttaaagatgacttataagaaccctgaaatttatataggtgagacaattagaaataaaaagatcttcagccaggcctttctgaaggagttattctgctaaaaatggtcttagttgtctgaaaagccagctcttgaacctcttcacaacagtatcaacactggcttctcccggttcattttatgcgtgcgagaagtcagtggtaactgctgcagggcttaatacattagtggtaactggtttaaaaaacaaagactgtaagcctgtgtgtgccactgtttgcttcaacagtatatcctactaataagcctcacctatttaatccaatgagttttaaatctaaatctcattcccttcttctttccctaccttttttttctttttttcttaaaaaaatattttgtgttattaacagaaattcatatttggtgtggcttaacggtatttcagaaggtcatcagattgtgagactgcttccttgaaacatttttgtgctattgttttaaaaaaataattaaaaaacagttggcgttaataaaaatgtcaatgtga

SEQ ID NO: 281057 - DNA, 4487 bp, Homo sapiens
gaattccccgatgtacttctgcattaaattccttgctttcagaatcataaccagggaatcgtttggtactgtgagggatagacaagccctcatttctgtaatccctgctaagtgaggtcaaggctgacatctaagatgttctgtggcggaacctggcccccatcaggggcaacctttaatttggattctggaagactaaaactttgggtctctcccccgccccccaggctcccccggtcgctctcctccggcggtcgcccgcgctcggtggatgtggctggcagctgccgccccctccctcgctcgccgcctgctcttcctcggccctccgcctcctcccctcctccttctcgtcttcagccgctcctctcgccgccgcctccacagcctgggcctcgccgcgatgccggagaagaggcccttcgagcggctgcctgccgatgtctcccccatcaactacagcctttgcctcaagcccgacttgctggacttcaccttcgagggcaagctggaggccgccgcccaggtgaggcaggcgactaatcagattgtgatgaattgtgctgatattgatattattacagcttcatatgcaccagaaggagatgaagaaatacatgctacaggatttaactatcagaatgaagatgaaaaagtcaccttgtctttccctagtactctgcaaacaggtacgggaaccttaaagatagattttgttggagagctgaatgacaaaatgaaaggtttctatagaagtaaatatactaccccttctggagaggtgcgctatgctgctgtaacacagtttgaggctactgatgcccgaagggcttttccttgctgggatgagcctgctatcaaagcaacttttgatatctcattggttgttcctaaagacagagtagctttatcaaacatgaatgtaattgaccggaaaccataccctgatgatgaaaatttagtggaagtgaagtttgcccgcacacctgttatgtctacatatctggtggcatttgttgtgggtgaatatgactttgtagaaacaaggtcaaaagatggtgtgtgtgtccgtgtttacactcctgttggcaaagcagagcaaggaaaatttgcgttagaggttgctgctaaaaccttgcctttttataaggactacttcaatgttccttatcctctacctaaaattgatctcattgctattgcagactttgcagctggtgccatggagaactggggccttgttacttatagggagactgcattgcttattgatccaaaaaattcctgttcttcatcccgccagtgggttgctctggttgtgggacatgaactcgcccatcaatggtttggaaatcttgttactatggaatggtggactcatctttggttaaatgaaggttttgcatcctggattgaatatctgtgtgtagaccactgcttcccagagtatgatatttggactcagtttgtttctgctgattacacccgtgcccaggagcttgacgccttagataacagccatcctattgaagtcagtgtgggccatccatctgaggttgatgagatatttgatgctatatcatatagcaaaggtgcatctgtcatccgaatgctgcatgactacattggggataaggactttaagaaaggaatgaacatgtatttaaccaagttccaacaaaagaatgctgccacagaggatctctgggaaagtttagaaaatgctagtggtaaacctatagcagctgtgatgaatacctggaccaaacaaatgggatttcccctcatttatgtggaagctgaacaggtagaagatgacagattattgaggttgtcccaaaagaagttctgtgctggtgggtcatatgttggtgaagattgtccccagtggatggtccctatcacaatctctactagtgaagaccccaaccaggccaaactaaaaattctaatggacaagccagagatgaatgtggttttgaaaaatgtcaaaccagaccaatgggtgaagttaaacttaggaacagttgggttttatcggacccagtacagctctgccatgctggaaagtttattaccaggcattcgtgacctttctctgccccctgtggatcgacttggattacagaatgacctcttctccttggctcgagctggaatcattagcactgtagaggttctaaaagtcatggaggcttttgtgaatgagcccaattatactgtatggagcgacctgagctgtaacctggggattctctcaactctcttgtcccacacagacttctatgaggaaatccaggagtttgtgaaagatgtcttttcacctataggggagagactgggctgggaccccaaacctggagaaggtcatctcgatgcactcctgaggggcttggttctgggaaaactaggaaaagcaggacataaggcaacgttagaagaagcccgtcgtcggtttaaggaccacgtggaaggaaaacagattctctccgctgatctgaggagtcctgtctatctgactgttttgaagcatggtgatggcactactttagatattatgttaaaacttcataaacaagcagatatgcaagaagagaaaaaccgaatcgaaagagtccttggcgctactcttttgcctgacctgattcaaaaagtcctcacgtttgcactttcagaagaggtacgtccacaggacactgtatcggtaattggtggagtagctggaggcagcaagcatggtaggaaagctgcttggaaattcataaaggacaactgggaagaactttataaccgataccagggaggattcttaatatccagactaataaagctatcagttgagggatttgcagttgataaaatggctggagaggttaaggctttcttcgagagtcacccagctccttcagctgagcgtaccatccagcagtgttgtgaaaatattctgctgaatgctgcctggctaaagcgagatgctgagagcatccaccagtacctccttcagcggaaggcctcaccacccacagtgtgaatcctgaggtgccgccattggcggttctgctgcttcgctgcagggataaggtggagctaccgaacagctgattcatatgccaagaatttggagtcttctttcaaaccagtgggggttggacaatgaatgtagttaactggttcctgctcacactccagaattaaattctattgaaaaaggaaaatcagcaattcagcaaaaaataaataaaaaataaaaatgtaaatatgatagtaataaaatagagcataacgaaactgtgaaactttctgaagccttgtcagtggttaaaagtatttaacactctactgttaatgacagatgttctgtttttataacctaccaaaaggaaactagaggcttcttggtgaagagcatttttgtgaagtgggttctgcaaggagcctataaagccaagggtggtgtccatttctgggaatggttaaacacaaaaggctgatagctggtatcacatagttggagtcagtgcataattccaagtggctttttttttttttggcacggggactgatcaggaagatatattcctgcataactcaatctgaaccaaggattgtagtttagttttcctccttgccttcccttctgtgtgaccgaccccttggccaaaaaaaaacaaaaagcaaaaaacaaaaacctaccctgttctggtttttttcctccctttagttccacccccaacccccattccctggtgtccttcttagagatgaagaaataataaggaaacatctttcatagccacattaaataagagaaactgatatacattatttttttctttttaaagatgacttataagaaccctgaaatttatataggtgagacaattagaaataaaaagatcttcagccaggcctttctgaaggagttattctgctaaaaatggtcttagttgtctgaaaagccagctcttgaacctcttcacaacagtatcaacactggcttctcccggttcattttatgcgtgcgagaagtcagtggtaactgctgcagggcttaatacattagtggtaactggtttaaaaaacaaagactgtaagcctgtgtgtgccactgtttgcttcaacagtatatcctactaataagcctcacctatttaatccaatgagttttaaatctaaatctcattcccttcttctttccctaccttttttttctttttttcttaaaaaaatattttgtgttattaacagaaattcatatttggtgtggcttaacggtatttcagaaggtcatcagattgtgagactgcttccttgaaacatttttgtgctattgttttaaaaaaataattaaaaaacagttggcgttaataaaaatgtcaatgtgaaactgatgtcctgattcactttattctctttctttgataagaaactaaaaactttcctatcattcagtaggcttatgcaaagttatactatcataggatttt

SEQ ID NO: 281058 - DNA, 4185 bp, Homo sapiens
tccggcggtcgcccgcgctcggtggatgtggctggcagctgccgccccctccctcgctcgccgcctgctcttcctcggccctccgcctcctcccctcctccttctcgtcttcagccgctcctctcgccgccgcctccacagcctgggcctcgccgcgatgccggagaagaggcccttcgagcggctgcctgccgatgtctcccccatcaactgcagcctttgcctcaagcccgacttgctggacttcaccttcgagggcaagctggaggccgccgcccaggtgaggcaggcgactaatcagattgtgatgaattgtgctgatattgatattattacagcttcatatgcaccagaaggagatgaagaaatacatgctacaggatttaactatcagaatgaagatgaaaaagtcaccttgtctttccctagtactctgcaaacaggtacgggaaccttaaagatagattttgttggagagctgaatgacaaaatgaaaggtttctatagaagctactgatgcccgaagggcttttccttgctgggatgagcctgctatcaaagcaacttttgatatctcattggttgttcctaaagacagagtagctttatcaaacatgaatgtaattgaccggaaaccataccctgatgatgaaaatttagtggaagtgaagtttgcccgcacacctgttatgtctacatatctggtggcatttgttgtgggtgaatatgactttgtagaaacaaggtcaaaagatggtgtgtgtgtccgtgtttacactcctgttggcaaagcagagcaaggaaaatttgcgttagaggttgctgctaaaaccttgcctttttataaggactacttcaatgttccttatcctctacctaaaattgatctcattgctattgcagactttgcagctggtgccatggagaactggggccttgttacttatagggagactgcattgcttattgatccaaaaaattcctgttcttcatcccgccagtgggttgctctggttgtgggacatgaactcgcccatcaatggtttggaaatcttgttactatggaatggtggactcatctttggttaaatgaaggttttgcatcctggattgaatatctgtgtgtagaccactgcttcccagagtatgatatttggactcagtttgtttctgctgattacacccgtgcccaggagcttgacgccttagataacagccatcctattgaagtcagtgtgggccatccatctgaggttgatgagatatttgatgctatatcatatagcaaaggtgcatctgtcatccgaatgctgcatgactacattggggataaggactttaagaaaggaatgaacatgtatttaaccaagttccaacaaaagaatgctgccacagaggatctctgggaaagtttagaaaatgctagtggtaaacctatagcagctgtgatgaatacctggaccaaacaaatgggatttcccctcatttatgtggaagctgaacaggtagaagatgacagattattgaggttgtcccaaaagaagttctgtgctggtgggtcatatgttggtgaagattgtccccagtggatggtccctatcacaatctctactagtgaagaccccaaccaggccaaactaaaaattctaatggacaagccagagatgaatgtggttttgaaaaatgtcaaaccagaccaatgggtgaagttaaacttaggaacagttgggttttatcggacccagtacagctctgccatgctggaaagtttattaccaggcattcgtgacctttctctgccccctgtggatcgacttggattacagaatgacctcttctccttggctcgagctggaatcattagcactgtagaggttctaaaagtcatggaggcttttgtgaatgagcccaattatactgtatggagcgacctgagctgtaacctggggattctctcaactctcttgtcccacacagacttctatgaggaaatccaggagtttgtgaaagatgtcttttcacctataggggagagactgggctgggaccccaaacctggagaaggtcatctcgatgcactcctgaggggcttggttctgggaaaactaggaaaagcaggacataaggcaacgttagaagaagcccgtcgtcggtttaaggaccacgtggaaggaaaacagattctctccgctgatctgaggagtcctgtctatctgactgttttgaagcatggtgatggcactactttagatattatgttaaaacttcataaacaagcagatatgcaagaagagaaaaaccgaatcgaaagagtccttggcgctactcttttgcctgacctgattcaaaaagtcctcacgtttgcactttcagaagaggtacgtccacaggacactgtatcggtaattggtggagtagctggaggcagcaagcatggtaggaaagctgcttggaaattcataaaggacaactgggaagaactttataaccgataccagggaggattcttaatatccagactaataaagctatcagttgagggatttgcagttgataaaatggctggagaggttaaggctttcttcgagagtcacccagctccttcagctgagcgtaccatccagcagtgttgtgaaaatattctgctgaatgctgcctggctaaagcgagatgctgagagcatccaccagtacctccttcagcggaaggcctcaccacccacagtgtgaatcctgaggtgccgccattggcggttctgctgcttcgctgcagggataaggtggagctaccgaacagctgattcatatgccaagaatttggagtcttctttcaaaccagtgggggttggacaatgaatgtagttaactggttcctgctcacactccagaattaaattctattgaaaaaggaaaatcagcaattcagcaaaaaataaataaaaaataaaaatgtaaatatgatagtaataaaatagagcataacgaaactgtgaaactttctgaagccttgtcagtggttaaaagtatttaacactctactgttaatgacagatgttctgtttttataacctaccaaaaggaaactagaggcttcttggtgaagagcatttttgtgaagtgggttctgcaaggagcctataaagccaagggtggtgtccatttctgggaatggttaaacacaaaaggctgatagctggtatcacatagttggagtcagtgcataattccaagtggctttttttttttttggcacggggactgatcaggaagatatattcctgcataactcaatctgaaccaaggattgtagtttagttttcctccttgccttcccttctgtgtgaccgaccccttggccaaaaaaaaacaaaaagcaaaaaacaaaaacctaccctgttctggtttttttcctccctttagttccacccccaacccccattccctggtgtccttcttagagatgaagaaataataaggaaacatctttcatagccacattaaataagagaaactgatatacattatttttttctttttaaagatgacttataagaaccctgaaatttatataggtgagacaattagaaataaaaagatcttcagccaggcctttctgaaggagttattctgctaaaaatggtcttagttgtctgaaaagccagctcttgaacctcttcacaacagtatcaacactggcttctcccggttcattttatgcgtgcgagaagtcagtggtaactgctgcagggcttaatacattagtggtaactggtttaaaaaacaaagactgtaagcctgtgtgtgccactgtttgcttcaacagtatatcctactaataagcctcacctatttaatccaatgagttttaaatctaaatctcattcccttcttctttccctaccttttttttctttttttcttaaaaaaatattttgtgttattaacagaaattcatatttggtgtggcttaacggtatttcagaaggtcatcagattgtgagactgcttccttgaaacatttttgtgctattgttttaaaaaaataattaaaaaacagttggcgttaataaaaatgtcaatgtgaaactgatgtcctgattcactttattctctttctttgataagaaactaaaaactttcctatcattcagtaggcttatgcaaagttatactatcataggatttt

SEQ ID NO: 281059 - DNA, 4068 bp, Homo sapiens
agcggacggaagagtcaaggctgggacctcatggcatcattttccatggattgctctccaagtttttgtgttcctggcctttggaaccccttcatcatattccgcaggtgaggcaggcgactaatcagattgtgatgaattgtgctgatattgatattattacagcttcatatgcaccagaaggagatgaagaaatacatgctacaggatttaactatcagaatgaagatgaaaaagtcaccttgtctttccctagtactctgcaaacaggtacgggaaccttaaagatagattttgttggagagctgaatgacaaaatgaaaggtttctatagaagtaaatatactaccccttctggagaggtgcgctatgctgctgtaacacagtttgaggctactgatgcccgaagggcttttccttgctgggatgagcctgctatcaaagcaacttttgatatctcattggttgttcctaaagacagagtagctttatcaaacatgaatgtaattgaccggaaaccataccctgatgatgaaaatttagtggaagtgaagtttgcccgcacacctgttatgtctacatatctggtggcatttgttgtgggtgaatatgactttgtagaaacaaggtcaaaagatggtgtgtgtgtccgtgtttacactcctgttggcaaagcagagcaaggaaaatttgcgttagaggttgctgctaaaaccttgcctttttataaggactacttcaatgttccttatcctctacctaaaattgatctcattgctattgcagactttgcagctggtgccatggagaactggggccttgttacttatagggagactgcattgcttattgatccaaaaaattcctgttcttcatcccgccagtgggttgctctggttgtgggacatgaactcgcccatcaatggtttggaaatcttgttactatggaatggtggactcatctttggttaaatgaaggttttgcatcctggattgaatatctgtgtgtagaccactgcttcccagagtatgatatttggactcagtttgtttctgctgattacacccgtgcccaggagcttgacgccttagataacagccatcctattgaagtcagtgtgggccatccatctgaggttgatgagatatttgatgctatatcatatagcaaaggtgcatctgtcatccgaatgctgcatgactacattggggataaggactttaagaaaggaatgaacatgtatttaaccaagttccaacaaaagaatgctgccacagaggatctctgggaaagtttagaaaatgctagtggtaaacctatagcagctgtgatgaatacctggaccaaacaaatgggatttcccctcatttatgtggaagctgaacaggtagaagatgacagattattgaggttgtcccaaaagaagttctgtgctggtgggtcatatgttggtgaagattgtccccagtggatggtccctatcacaatctctactagtgaagaccccaaccaggccaaactaaaaattctaatggacaagccagagatgaatgtggttttgaaaaatgtcaaaccagaccaatgggtgaagttaaacttaggaacagttgggttttatcggacccagtacagctctgccatgctggaaagtttattaccaggcattcgtgacctttctctgccccctgtggatcgacttggattacagaatgacctcttctccttggctcgagctggaatcattagcactgtagaggttctaaaagtcatggaggcttttgtgaatgagcccaattatactgtatggagcgacctgagctgtaacctggggattctctcaactctcttgtcccacacagacttctatgaggaaatccaggagtttgtgaaagatgtcttttcacctataggggagagactgggctgggaccccaaacctggagaaggtcatctcgatgcactcctgaggggcttggttctgggaaaactaggaaaagcaggacataaggcaacgttagaagaagcccgtcgtcggtttaaggaccacgtggaaggaaaacagattctctccgctgatctgaggagtcctgtctatctgactgttttgaagcatggtgatggcactactttagatattatgttaaaacttcataaacaagcagatatgcaagaagagaaaaaccgaatcgaaagagtccttggcgctactcttttgcctgacctgattcaaaaagtcctcacgtttgcactttcagaagaggtacgtccacaggacactgtatcggtaattggtggagtagctggaggcagcaagcatggtaggaaagctgcttggaaattcataaaggacaactgggaagaactttataaccgataccagggaggattcttaatatccagactaataaagctatcagttgagggatttgcagttgataaaatggctggagaggttaaggctttcttcgagagtcacccagctccttcagctgagcgtaccatccagcagtgttgtgaaaatattctgctgaatgctgcctggctaaagcgagatgctgagagcatccaccagtacctccttcagcggaaggcctcaccacccacagtgtgaatcctgaggtgccgccattggcggttctgctgcttcgctgcagggataaggtggagctaccgaacagctgattcatatgccaagaatttggagtcttctttcaaaccagtgggggttggacaatgaatgtagttaactggttcctgctcacactccagaattaaattctattgaaaaaggaaaatcagcaattcagcaaaaaataaataaaaaataaaaatgtaaatatgatagtaataaaatagagcataacgaaactgtgaaactttctgaagccttgtcagtggttaaaagtatttaacactctactgttaatgacagatgttctgtttttataacctaccaaaaggaaactagaggcttcttggtgaagagcatttttgtgaagtgggttctgcaaggagcctataaagccaagggtggtgtccatttctgggaatggttaaacacaaaaggctgatagctggtatcacatagttggagtcagtgcataattccaagtggctttttttttttttggcacggggactgatcaggaagatatattcctgcataactcaatctgaaccaaggattgtagtttagttttcctccttgccttcccttctgtgtgaccgaccccttggccaaaaaaaaacaaaaagcaaaaaacaaaaacctaccctgttctggtttttttcctccctttagttccacccccaacccccattccctggtgtccttcttagagatgaagaaataataaggaaacatctttcatagccacattaaataagagaaactgatatacattatttttttctttttaaagatgacttataagaaccctgaaatttatataggtgagacaattagaaataaaaagatcttcagccaggcctttctgaaggagttattctgctaaaaatggtcttagttgtctgaaaagccagctcttgaacctcttcacaacagtatcaacactggcttctcccggttcattttatgcgtgcgagaagtcagtggtaactgctgcagggcttaatacattagtggtaactggtttaaaaaacaaagactgtaagcctgtgtgtgccactgtttgcttcaacagtatatcctactaataagcctcacctatttaatccaatgagttttaaatctaaatctcattcccttcttctttccctaccttttttttctttttttcttaaaaaaatattttgtgttattaacagaaattcatatttggtgtggcttaacggtatttcagaaggtcatcagattgtgagactgcttccttgaaacatttttgtgctattgttttaaaaaaataattaaaaaacagttggcgttaataaaaatgtcaatgtgaaactgatgtcctgattcactttattctctttctttgataagaaactaaaaactttcctatcattcagtaggcttatgcaaagttatactatcataggatttt

SEQ ID NO: 281060 - DNA, 3665 bp, Homo sapiens
accttggtgtttcattattttacaaaataataattaagagaatataagagtggaatttctctagggaatgggttggaaaatatgtagttatatttttcatatcaagttataaatggattaaagtttggccattgtattcaaagtttggagctaaggcagtcttcggagggtagggctcctcgggattcatttctagtaatttaagatacattggcttgcaacaggattcctttgtgggtttcaatatgaattataataacatatttattagatggttattttgtttatacttttataggttgctgctaaaaccttgcctttttataaggactacttcaatgttccttatcctctacctaaaattgatctcattgctattgcagactttgcagctggtgccatggagaactggggccttgttacttatagggagactgcattgcttattgatccaaaaaattcctgttcttcatcccgccagtgggttgctctggttgtgggacatgaactcgcccatcaatggtttggaaatcttgttactatggaatggtggactcatctttggttaaatgaaggttttgcatcctggattgaatatctgtgtgtagaccactgcttcccagagtatgatatttggactcagtttgtttctgctgattacacccgtgcccaggagcttgacgccttagataacagccatcctattgaagtcagtgtgggccatccatctgaggttgatgagatatttgatgctatatcatatagcaaaggtgcatctgtcatccgaatgctgcatgactacattggggataaggactttaagaaaggaatgaacatgtatttaaccaagttccaacaaaagaatgctgccacagaggatctctgggaaagtttagaaaatgctagtggtaaacctatagcagctgtgatgaatacctggaccaaacaaatgggatttcccctcatttatgtggaagctgaacaggtagaagatgacagattattgaggttgtcccaaaagaagttctgtgctggtgggtcatatgttggtgaagattgtccccagtggatggtccctatcacaatctctactagtgaagaccccaaccaggccaaactaaaaattctaatggacaagccagagatgaatgtggttttgaaaaatgtcaaaccagaccaatgggtgaagttaaacttaggaacagttgggttttatcggacccagtacagctctgccatgctggaaagtttattaccaggcattcgtgacctttctctgccccctgtggatcgacttggattacagaatgacctcttctccttggctcgagctggaatcattagcactgtagaggttctaaaagtcatggaggcttttgtgaatgagcccaattatactgtatggagcgacctgagctgtaacctggggattctctcaactctcttgtcccacacagacttctatgaggaaatccaggagtttgtgaaagatgtcttttcacctataggggagagactgggctgggaccccaaacctggagaaggtcatctcgatgcactcctgaggggcttggttctgggaaaactaggaaaagcaggacataaggcaacgttagaagaagcccgtcgtcggtttaaggaccacgtggaaggaaaacagattctctccgctgatctgaggagtcctgtctatctgactgttttgaagcatggtgatggcactactttagatattatgttaaaacttcataaacaagcagatatgcaagaagagaaaaaccgaatcgaaagagtccttggcgctactcttttgcctgacctgattcaaaaagtcctcacgtttgcactttcagaagaggtacgtccacaggacactgtatcggtaattggtggagtagctggaggcagcaagcatggtaggaaagctgcttggaaattcataaaggacaactgggaagaactttataaccgataccagggaggattcttaatatccagactaataaagctatcagttgagggatttgcagttgataaaatggctggagaggttaaggctttcttcgagagtcacccagctccttcagctgagcgtaccatccagcagtgttgtgaaaatattctgctgaatgctgcctggctaaagcgagatgctgagagcatccaccagtacctccttcagcggaaggcctcaccacccacagtgtgaatcctgaggtgccgccattggcggttctgctgcttcgctgcagggataaggtggagctaccgaacagctgattcatatgccaagaatttggagtcttctttcaaaccagtgggggttggacaatgaatgtagttaactggttcctgctcacactccagaattaaattctattgaaaaaggaaaatcagcaattcagcaaaaaataaataaaaaataaaaatgtaaatatgatagtaataaaatagagcataacgaaactgtgaaactttctgaagccttgtcagtggttaaaagtatttaacactctactgttaatgacagatgttctgtttttataacctaccaaaaggaaactagaggcttcttggtgaagagcatttttgtgaagtgggttctgcaaggagcctataaagccaagggtggtgtccatttctgggaatggttaaacacaaaaggctgatagctggtatcacatagttggagtcagtgcataattccaagtggctttttttttttttggcacggggactgatcaggaagatatattcctgcataactcaatctgaaccaaggattgtagtttagttttcctccttgccttcccttctgtgtgaccgaccccttggccaaaaaaaaacaaaaagcaaaaaacaaaaacctaccctgttctggtttttttcctccctttagttccacccccaacccccattccctggtgtccttcttagagatgaagaaataataaggaaacatctttcatagccacattaaataagagaaactgatatacattatttttttctttttaaagatgacttataagaaccctgaaatttatataggtgagacaattagaaataaaaagatcttcagccaggcctttctgaaggagttattctgctaaaaatggtcttagttgtctgaaaagccagctcttgaacctcttcacaacagtatcaacactggcttctcccggttcattttatgcgtgcgagaagtcagtggtaactgctgcagggcttaatacattagtggtaactggtttaaaaaacaaagactgtaagcctgtgtgtgccactgtttgcttcaacagtatatcctactaataagcctcacctatttaatccaatgagttttaaatctaaatctcattcccttcttctttccctaccttttttttctttttttcttaaaaaaatattttgtgttattaacagaaattcatatttggtgtggcttaacggtatttcagaaggtcatcagattgtgagactgcttccttgaaacatttttgtgctattgttttaaaaaaataattaaaaaacagttggcgttaataaaaatgtcaatgtgaaactgatgtcctgattcactttattctctttctttgataagaaactaaaaactttcctatcattcagtaggcttatgcaaagttatactatcataggatttt

SEQ ID NO: 281061 - DNA, 3061 bp, Homo sapiens
ctaagctaggtacgaggcgggtgtggaatcggccgagggtttgtttctgctgattacacccgtgcccaggagcttgacgccttagataacagccatcctattgaagtcagtgtgggccatccatctgaggttgatgagatatttgatgctatatcatatagcaaaggtgcatctgtcatccgaatgctgcatgactacattggggataaggactttaagaaaggaatgaacatgtatttaaccaagttccaacaaaagaatgctgccacagaggatctctgggaaagtttagaaaatgctagtggtaaacctatagcagctgtgatgaatacctggaccaaacaaatgggatttcccctcatttatgtggaagctgaacaggtagaagatgacagattattgaggttgtcccaaaagaagttctgtgctggtgggtcatatgttggtgaagattgtccccagtggatggtccctatcacaatctctactagtgaagaccccaaccaggccaaactaaaaattctaatggacaagccagagatgaatgtggttttgaaaaatgtcaaaccagaccaatgggtgaagttaaacttaggaacagttgggttttatcggacccagtacagctctgccatgctggaaagtttattaccaggcattcgtgacctttctctgccccctgtggatcgacttggattacagaatgacctcttctccttggctcgagctggaatcattagcactgtagaggttctaaaagtcatggaggcttttgtgaatgagcccaattatactgtatggagcgacctgagctgtaacctggggattctctcaactctcttgtcccacacagacttctatgaggaaatccaggagtttgtgaaagatgtcttttcacctataggggagagactgggctgggaccccaaacctggagaaggtcatctcgatgcactcctgaggggcttggttctgggaaaactaggaaaagcaggacataaggcaacgttagaagaagcccgtcgtcggtttaaggaccacgtggaaggaaaacagattctctccgctgatctgaggagtcctgtctatctgactgttttgaagcatggtgatggcactactttagatattatgttaaaacttcataaacaagcagatatgcaagaagagaaaaaccgaatcgaaagagtccttggcgctactcttttgcctgacctgattcaaaaagtcctcacgtttgcactttcagaagaggtacgtccacaggacactgtatcggtaattggtggagtagctggaggcagcaagcatggtaggaaagctgcttggaaattcataaaggacaactgggaagaactttataaccgataccagggaggattcttaatatccagactaataaagctatcagttgagggatttgcagttgataaaatggctggagaggttaaggctttcttcgagagtcacccagctccttcagctgagcgtaccatccagcagtgttgtgaaaatattctgctgaatgctgcctggctaaagcgagatgctgagagcatccaccagtacctccttcagcggaaggcctcaccacccacagtgtgaatcctgaggtgccgccattggcggttctgctgcttcgctgcagggataaggtggagctaccgaacagctgattcatatgccaagaatttggagtcttctttcaaaccagtgggggttggacaatgaatgtagttaactggttcctgctcacactccagaattaaattctattgaaaaaggaaaatcagcaattcagcaaaaaataaataaaaaataaaaatgtaaatatgatagtaataaaatagagcataacgaaactgtgaaactttctgaagccttgtcagtggttaaaagtatttaacactctactgttaatgacagatgttctgtttttataacctaccaaaaggaaactagaggcttcttggtgaagagcatttttgtgaagtgggttctgcaaggagcctataaagccaagggtggtgtccatttctgggaatggttaaacacaaaaggctgatagctggtatcacatagttggagtcagtgcataattccaagtggctttttttttttttggcacggggactgatcaggaagatatattcctgcataactcaatctgaaccaaggattgtagtttagttttcctccttgccttcccttctgtgtgaccgaccccttggccaaaaaaaaacaaaaagcaaaaaacaaaaacctaccctgttctggtttttttcctccctttagttccacccccaacccccattccctggtgtccttcttagagatgaagaaataataaggaaacatctttcatagccacattaaataagagaaactgatatacattatttttttctttttaaagatgacttataagaaccctgaaatttatataggtgagacaattagaaataaaaagatcttcagccaggcctttctgaaggagttattctgctaaaaatggtcttagttgtctgaaaagccagctcttgaacctcttcacaacagtatcaacactggcttctcccggttcattttatgcgtgcgagaagtcagtggtaactgctgcagggcttaatacattagtggtaactggtttaaaaaacaaagactgtaagcctgtgtgtgccactgtttgcttcaacagtatatcctactaataagcctcacctatttaatccaatgagttttaaatctaaatctcattcccttcttctttccctaccttttttttctttttttcttaaaaaaatattttgtgttattaacagaaattcatatttggtgtggcttaacggtatttcagaaggtcatcagattgtgagactgcttccttgaaacatttttgtgctattgttttaaaaaaataattaaaaaacagttggcgttaataaaaatgtcaatgtgaaactgatgtcctgattcactttattctctttctttgataagaaactaaaaactttcctatcattcagtaggcttatgcaaagttatactatcataggatttt

SEQ ID NO: 281062 - DNA, 3213 bp, Homo sapiens
agagggcgggtcccccttttccaccacactggagagccaaattggaatatacccttatggaaaaaaaaaaaaaaaaaaaaaaaaaaacactcaactgggaatcaaaagtttcaaatcccaatggcaccactggaaagaatatacccttatacaagtcactttaatcttagaagggttttcctagaaagcgttttatgtaattcagtattacaggctatctgcttcctgtcataaccctgaatcacactgtctgccaggtcagtgtgggccatccatctgaggttgatgagatatttgatgctatatcatatagcaaaggtgcatctgtcatccgaatgctgcatgactacattggggataaggactttaagaaaggaatgaacatgtatttaaccaagttccaacaaaagaatgctgccacagaggatctctgggaaagtttagaaaatgctagtggtaaacctatagcagctgtgatgaatacctggaccaaacaaatgggatttcccctcatttatgtggaagctgaacaggtagaagatgacagattattgaggttgtcccaaaagaagttctgtgctggtgggtcatatgttggtgaagattgtccccagtggatggtccctatcacaatctctactagtgaagaccccaaccaggccaaactaaaaattctaatggacaagccagagatgaatgtggttttgaaaaatgtcaaaccagaccaatgggtgaagttaaacttaggaacagttgggttttatcggacccagtacagctctgccatgctggaaagtttattaccaggcattcgtgacctttctctgccccctgtggatcgacttggattacagaatgacctcttctccttggctcgagctggaatcattagcactgtagaggttctaaaagtcatggaggcttttgtgaatgagcccaattatactgtatggagcgacctgagctgtaacctggggattctctcaactctcttgtcccacacagacttctatgaggaaatccaggagtttgtgaaagatgtcttttcacctataggggagagactgggctgggaccccaaacctggagaaggtcatctcgatgcactcctgaggggcttggttctgggaaaactaggaaaagcaggacataaggcaacgttagaagaagcccgtcgtcggtttaaggaccacgtggaaggaaaacagattctctccgctgatctgaggagtcctgtctatctgactgttttgaagcatggtgatggcactactttagatattatgttaaaacttcataaacaagcagatatgcaagaagagaaaaaccgaatcgaaagagtccttggcgctactcttttgcctgacctgattcaaaaagtcctcacgtttgcactttcagaagaggtacgtccacaggacactgtatcggtaattggtggagtagctggaggcagcaagcatggtaggaaagctgcttggaaattcataaaggacaactgggaagaactttataaccgataccagggaggattcttaatatccagactaataaagctatcagttgagggatttgcagttgataaaatggctggagaggttaaggctttcttcgagagtcacccagctccttcagctgagcgtaccatccagcagtgttgtgaaaatattctgctgaatgctgcctggctaaagcgagatgctgagagcatccaccagtacctccttcagcggaaggcctcaccacccacagtgtgaatcctgaggtgccgccattggcggttctgctgcttcgctgcagggataaggtggagctaccgaacagctgattcatatgccaagaatttggagtcttctttcaaaccagtgggggttggacaatgaatgtagttaactggttcctgctcacactccagaattaaattctattgaaaaaggaaaatcagcaattcagcaaaaaataaataaaaaataaaaatgtaaatatgatagtaataaaatagagcataacgaaactgtgaaactttctgaagccttgtcagtggttaaaagtatttaacactctactgttaatgacagatgttctgtttttataacctaccaaaaggaaactagaggcttcttggtgaagagcatttttgtgaagtgggttctgcaaggagcctataaagccaagggtggtgtccatttctgggaatggttaaacacaaaaggctgatagctggtatcacatagttggagtcagtgcataattccaagtggctttttttttttttggcacggggactgatcaggaagatatattcctgcataactcaatctgaaccaaggattgtagtttagttttcctccttgccttcccttctgtgtgaccgaccccttggccaaaaaaaaacaaaaagcaaaaaacaaaaacctaccctgttctggtttttttcctccctttagttccacccccaacccccattccctggtgtccttcttagagatgaagaaataataaggaaacatctttcatagccacattaaataagagaaactgatatacattatttttttctttttaaagatgacttataagaaccctgaaatttatataggtgagacaattagaaataaaaagatcttcagccaggcctttctgaaggagttattctgctaaaaatggtcttagttgtctgaaaagccagctcttgaacctcttcacaacagtatcaacactggcttctcccggttcattttatgcgtgcgagaagtcagtggtaactgctgcagggcttaatacattagtggtaactggtttaaaaaacaaagactgtaagcctgtgtgtgccactgtttgcttcaacagtatatcctactaataagcctcacctatttaatccaatgagttttaaatctaaatctcattcccttcttctttccctaccttttttttctttttttcttaaaaaaatattttgtgttattaacagaaattcatatttggtgtggcttaacggtatttcagaaggtcatcagattgtgagactgcttccttgaaacatttttgtgctattgttttaaaaaaataattaaaaaacagttggcgttaataaaaatgtcaatgtgaaactgatgtcctgattcactttattctctttctttgataagaaactaaaaactttcctatcattcagtaggcttatgcaaagttatactatcataggatttt

SEQ ID NO: 281063 - DNA, 4030 bp, Homo sapiens
  misc_feature (3991)..(3991): n is a, c, g, or t
  misc_feature (3996)..(3996): n is a, c, g, or t
  misc_feature (4025)..(4025): n is a, c, g, or t
gaattccccgatgtacttctgcattaaattccttgctttcagaatcataaccagggaatcgtttggtactgtgagggatagacaagccctcatttctgtaatccctgctaagtgaggtcaaggctgacatctaagatgttctgtggcggaacctggcccccatcaggggcaacctttaatttggattctggaagactaaaactttgggtctctcccccgccccccaggctcccccggtcgctctcctccggcggtcgcccgcgctcggtggatgtggctggcagctgccgccccctccctcgctcgccgcctgctcttcctcggccctccgcctcctcccctcctccttctcgtcttcagccgctcctctcgccgccgcctccacagcctgggcctcgccgcgatgccggagaagaggcccttcgagcggctgcctgccgatgtctcccccatcaactacagcctttgcctcaagcccgacttgctggacttcaccttcgagggcaagctggaggccgccgcccaggtgaggcaggcgactaatcagattgtgatgaattgtgctgatattgatattattacagcttcatatgcaccagaaggagatgaagaaatacatgctacaggatttaactatcagaatgaagatgaaaaagtcaccttgtctttccctagtactctgcaaacaggtacgggaaccttaaagatagattttgttggagagctgaatgacaaaatgaaaggtttctatagaagtaaatatactaccccttctggagaggtgcgctatgctgctgtaacacagtttgaggctactgatgcccgaagggcttttccttgctgggatgagcctgctatcaaagcaacttttgatatctcattggttgttcctaaagacagagtagctttatcaaacatgaatgtaattgaccggaaaccataccctgatgatgaaaatttagtggaagtgaagtttgcccgcacacctgttatgtctacatatctggtggcatttgttgtgggtgaatatgactttgtagaaacaaggtcaaaagatggtgtgtgtgtccgtgtttacactcctgttggcaaagcagagcaaggaaaatttgcgttagaggttgctgctaaaaccttgcctttttataaggactacttcaatgttccttatcctctacctaaaattgatctcattgctattgcagactttgcagctggtgccatggagaactggggccttgttacttatagggagactgcattgcttattgatccaaaaaattcctgttcttcatcccgccagtgggttgctctggttgtgggacatgaactcgcccatcaatggtttggaaatcttgttactatggaatggtggactcatctttggttaaatgaaggttttgcatcctggattgaatatctgtgtgtagaccactgcttcccagagtatgatatttggactcagtttgtttctgctgattacacccgtgcccaggagcttgacgccttagataacagccatcctattgaagtcagtgtgggccatccatctgaggttgatgagatatttgatgctatatcatatagcaaaggtgcatctgtcatccgaatgctgcatgactacattggggataaggactttaagaaaggaatgaacatgtatttaaccaagttccaacaaaagaatgctgccacagaggatctctgggaaagtttagaaaatgctagtggtaaacctatagcagctgtgatgaatacctggaccaaacaaatgggatttcccctcatttatgtggaagctgaacaggtagaagatgacagattattgaggttgtcccaaaagaagttctgtgctggtgggtcatatgttggtgaagattgtccccagtggatggtccctatcacaatctctactagtgaagaccccaaccaggccaaactaaaaattctaatggacaagccagagatgaatgtggttttgaaaaatgtcaaaccagaccaatgggtgaagttaaacttaggaacagttgggttttatcggacccagtacagctctgccatgctggaaagtttattaccaggcattcgtgacctttctctgccccctgtggatcgacttggattacagaatgacctcttctccttggctcgagctggaatcattagcactgtagaggttctaaaagtcatggaggcttttgtgaatgagcccaattatactgtatggagcgacctgagctgtaacctggggattctctcaactctcttgtcccacacagacttctatgaggaaatccaggagtttgtgaaagatgtcttttcacctataggggagagactgggctgggaccccaaacctggagaaggtcatctcgatgcactcctgaggggcttggttctgggaaaactaggaaaagcaggacataaggcaacgttagaagaagcccgtcgtcggtttaaggaccacgtggaaggaaaacagattctctccgctgatctgaggagtcctgtctatctgactgttttgaagcatggtgatggcactactttagatattatgttaaaacttcataaacaagcagatatgcaagaagagaaaaaccgaatcgaaagagtccttggcgctactcttttgcctgacctgattcaaaaagtcctcacgtttgcactttcagaagaggtacgtccacaggacactgtatcggtaattggtggagtagctggaggcagcaagcatggtaggaaagctgcttggaaattcataaaggacaactgggaagaactttataaccgataccagggaggattcttaatatccagactaataaagctatcagttgagggatttgcagttgataaaatggctggagaggttaaggctttcttcgagagtcacccagctccttcagctgagcgtaccatccagcagtgttgtgaaaatattctgctgaatgctgcctggctaaagcgagatgctgagagcatccaccagtacctccttcagcggaaggcctcaccacccacagtgtgaatcctgaggtgccgccattggcggttctgctgcttcgctgcagggataaggtggagctaccgaacagctgattcatatgccaagaatttggagtcttctttcaaaccagtgggggttggacaatgaatgtagttaactggttcctgctcacactccagaattaaattctattgaaaaaggaaaatcagcaattcagcaaaaaataaataaaaaataaaaatgtaaatatgatagtaataaaatagagcataacgaaactgtgaaactttctgaagccttgtcagtggttaaaagtatttaacactctactgttaatgacagatgttctgtttttataacctaccaaaaggaaactagaggcttcttggtgaagagcatttttgtgaagtgggttctgcaaggagcctataaagccaagggtggtgtccatttctgggaatggttaaacacaaaaggctgatagctggtatcacatagttggagtcagtgcataattccaagtggctttttttttttttggcacggggactgatcaggaagatatattcctgcataactcaatctgaaccaaggattgtagtttagttttcctccttgccttcccttctgtgtgaccgaccccttggccaaaaaaaaacaaaaagcaaaaaacaaaaacctaccctgttctggtttttttcctccctttagttccacccccaacccccattccctggtgtccttcttagagatgaagaaataataaggaaacatctttcatagccacattaaataagagaaactgatatacattatttttttctttttaaagatgacttataagaaccctgaaatttatataggtgagacaattagaaataaaaagatcttcagccaggcctttctgaaggacaactgggaagaactttataacccgataccagggaggattcttaatatccagactaataaagctatcanttganggattgcagttgataaaatggctggagangttaa

SEQ ID NO: 281064 - DNA, 1778 bp, Homo sapiens
gggatttgcagttgataaaatggctggagaggttaaggctgcttggaaattcataaaggacaactgggaagaactttataaccgataccagggaggattcttaatatccagactaataaagctatcagttgagggatttgcagttgataaaatggctggagaggttaaggctttcttcgagagtcacccagctccttcagctgagcgtaccatccagcagtgttgtgaaaatattctgctgaatgctgcctggctaaagcgagatgctgagagcatccaccagtacctccttcagcggaaggcctcaccacccacagtgtgaatcctgaggtgccgccattggcggttctgctgcttcgctgcagggataaggtggagctaccgaacagctgattcatatgccaagaatttggagtcttctttcaaaccagtgggggttggacaatgaatgtagttaactggttcctgctcacactccagaattaaattctattgaaaaaggaaaatcagcaattcagcaaaaaataaataaaaaataaaaatgtaaatatgatagtaataaaatagagcataacgaaactgtgaaactttctgaagccttgtcagtggttaaaagtatttaacactctactgttaatgacagatgttctgtttttataacctaccaaaaggaaactagaggcttcttggtgaagagcatttttgtgaagtgggttctgcaaggagcctataaagccaagggtggtgtccatttctgggaatggttaaacacaaaaggctgatagctggtatcacatagttggagtcagtgcataattccaagtggctttttttttttttggcacggggactgatcaggaagatatattcctgcataactcaatctgaaccaaggattgtagtttagttttcctccttgccttcccttctgtgtgaccgaccccttggccaaaaaaaaacaaaaagcaaaaaacaaaaacctaccctgttctggtttttttcctccctttagttccacccccaacccccattccctggtgtccttcttagagatgaagaaataataaggaaacatctttcatagccacattaaataagagaaactgatatacattatttttttctttttaaagatgacttataagaaccctgaaatttatataggtgagacaattagaaataaaaagatcttcagccaggcctttctgaaggagttattctgctaaaaatggtcttagttgtctgaaaagccagctcttgaacctcttcacaacagtatcaacactggcttctcccggttcattttatgcgtgcgagaagtcagtggtaactgctgcagggcttaatacattagtggtaactggtttaaaaaacaaagactgtaagcctgtgtgtgccactgtttgcttcaacagtatatcctactaataagcctcacctatttaatccaatgagttttaaatctaaatctcattcccttcttctttccctaccttttttttctttttttcttaaaaaaatattttgtgttattaacagaaattcatatttggtgtggcttaacggtatttcagaaggtcatcagattgtgagactgcttccttgaaacatttttgtgctattgttttaaaaaaataattaaaaaacagttggcgttaataaaaatgtcaatgtgaaactgatgtcctgattcactttattctctttctttgataagaaactaaaaactttcctatcattcagtaggcttatgcaaagttatactatcataggatttt

SEQ ID NO: 281065 - DNA, 2123 bp, Homo sapiens
tggccaggtgcagtggctcacgcctgtaataccagcactttgggacgccgaggtgggcagatcacctgaggtcgggagttcgagactatcctggccaacatggtgaaatcctgtccctactaaaaatacaaaaattagctgagcgtggtggtgtgtgcctgtaatcccagctacttgggaggctgaggcaggagaatcgcttgaacctgggaggcagaggttgtggtgagccgagatgaggtcattgcactccagcctgggcaacaagtgtgaaactccgtctcaaaaaaaaaaaagtttccttaaatagttactggctttatttaaggacttctccatcgcccaacacacatcctttataacagactgaagttggcagagaacagaatgatttatttttagggtaaatggaagtttgttctcagcctcttggtttcacttactgtttaaaaccattgttttgcagctatcagttgagggatttgcagttgataaaatggctggagaggttaaggctttcttcgagagtcacccagctccttcagctgagcgtaccatccagcagtgttgtgaaaatattctgctgaatgctgcctggctaaagcgagatgctgagagcatccaccagtacctccttcagcggaaggcctcaccacccacagtgtgaatcctgaggtgccgccattggcggttctgctgcttcgctgcagggataaggtggagctaccgaacagctgattcatatgccaagaatttggagtcttctttcaaaccagtgggggttggacaatgaatgtagttaactggttcctgctcacactccagaattaaattctattgaaaaaggaaaatcagcaattcagcaaaaaataaataaaaaataaaaatgtaaatatgatagtaataaaatagagcataacgaaactgtgaaactttctgaagccttgtcagtggttaaaagtatttaacactctactgttaatgacagatgttctgtttttataacctaccaaaaggaaactagaggcttcttggtgaagagcatttttgtgaagtgggttctgcaaggagcctataaagccaagggtggtgtccatttctgggaatggttaaacacaaaaggctgatagctggtatcacatagttggagtcagtgcataattccaagtggctttttttttttttggcacggggactgatcaggaagatatattcctgcataactcaatctgaaccaaggattgtagtttagttttcctccttgccttcccttctgtgtgaccgaccccttggccaaaaaaaaacaaaaagcaaaaaacaaaaacctaccctgttctggtttttttcctccctttagttccacccccaacccccattccctggtgtccttcttagagatgaagaaataataaggaaacatctttcatagccacattaaataagagaaactgatatacattatttttttctttttaaagatgacttataagaaccctgaaatttatataggtgagacaattagaaataaaaagatcttcagccaggcctttctgaaggagttattctgctaaaaatggtcttagttgtctgaaaagccagctcttgaacctcttcacaacagtatcaacactggcttctcccggttcattttatgcgtgcgagaagtcagtggtaactgctgcagggcttaatacattagtggtaactggtttaaaaaacaaagactgtaagcctgtgtgtgccactgtttgcttcaacagtatatcctactaataagcctcacctatttaatccaatgagttttaaatctaaatctcattcccttcttctttccctaccttttttttctttttttcttaaaaaaatattttgtgttattaacagaaattcatatttggtgtggcttaacggtatttcagaaggtcatcagattgtgagactgcttccttgaaacatttttgtgctattgttttaaaaaaataattaaaaaacagttggcgttaataaaaatgtcaatgtgaaactgatgtcctgattcactttattctctttctttgataagaaactaaaaactttcctatcattcagtaggcttatgcaaagttatactatcataggatttt

SEQ ID NO: 281066 - DNA, 1776 bp, Homo sapiens
  misc_feature (30)..(30): n is a, c, g, or t
tccccctactactattatattgggggcctncgacattataatgatttatttttagggtaaatggaagtttgttctcagcctcttggtttcacttactgtttaaaaccattgttttgcagctatcagttgagggatttgcagttgataaaatggctggagaggttaaggctttcttcgagagtcacccagctccttcagctgagcgtaccatccagcagtgttgtgaaaatattctgctgaatgctgcctggctaaagcgagatgctgagagcatccaccagtacctccttcagcggaaggcctcaccacccacagtgtgaatcctgaggtgccgccattggcggttctgctgcttcgctgcagggataaggtggagctaccgaacagctgattcatatgccaagaatttggagtcttctttcaaaccagtgggggttggacaatgaatgtagttaactggttcctgctcacactccagaattaaattctattgaaaaaggaaaatcagcaattcagcaaaaaataaataaaaaataaaaatgtaaatatgatagtaataaaatagagcataacgaaactgtgaaactttctgaagccttgtcagtggttaaaagtatttaacactctactgttaatgacagatgttctgtttttataacctaccaaaaggaaactagaggcttcttggtgaagagcatttttgtgaagtgggttctgcaaggagcctataaagccaagggtggtgtccatttctgggaatggttaaacacaaaaggctgatagctggtatcacatagttggagtcagtgcataattccaagtggctttttttttttttggcacggggactgatcaggaagatatattcctgcataactcaatctgaaccaaggattgtagtttagttttcctccttgccttcccttctgtgtgaccgaccccttggccaaaaaaaaacaaaaagcaaaaaacaaaaacctaccctgttctggtttttttcctccctttagttccacccccaacccccattccctggtgtccttcttagagatgaagaaataataaggaaacatctttcatagccacattaaataagagaaactgatatacattatttttttctttttaaagatgacttataagaaccctgaaatttatataggtgagacaattagaaataaaaagatcttcagccaggcctttctgaaggagttattctgctaaaaatggtcttagttgtctgaaaagccagctcttgaacctcttcacaacagtatcaacactggcttctcccggttcattttatgcgtgcgagaagtcagtggtaactgctgcagggcttaatacattagtggtaactggtttaaaaaacaaagactgtaagcctgtgtgtgccactgtttgcttcaacagtatatcctactaataagcctcacctatttaatccaatgagttttaaatctaaatctcattcccttcttctttccctaccttttttttctttttttcttaaaaaaatattttgtgttattaacagaaattcatatttggtgtggcttaacggtatttcagaaggtcatcagattgtgagactgcttccttgaaacatttttgtgctattgttttaaaaaaataattaaaaaacagttggcgttaataaaaatgtcaatgtgaaactgatgtcctgattcactttattctctttctttgataagaaactaaaaactttcctatcattcagtaggcttatgcaaagttatactatcataggatttt

SEQ ID NO: 281067 - DNA, 1857 bp, Homo sapiens
aaattttgtaggttctgtctctttattaacttttgattaggttgttaagcatataattaaggggagaattcctatatgcaggtccaaggagttgcttgttttcttttagcctgagggtggcagtggtaaattctcatgcctgaagattatgcatccttcatatagaccagtgggtattttttcataacctgtaatattaacttcttattgctagtaatgatcctgcattctgggttgttttataccaggctttcttcgagagtcacccagctccttcagctgagcgtaccatccagcagtgttgtgaaaatattctgctgaatgctgcctggctaaagcgagatgctgagagcatccaccagtacctccttcagcggaaggcctcaccacccacagtgtgaatcctgaggtgccgccattggcggttctgctgcttcgctgcagggataaggtggagctaccgaacagctgattcatatgccaagaatttggagtcttctttcaaaccagtgggggttggacaatgaatgtagttaactggttcctgctcacactccagaattaaattctattgaaaaaggaaaatcagcaattcagcaaaaaataaataaaaaataaaaatgtaaatatgatagtaataaaatagagcataacgaaactgtgaaactttctgaagccttgtcagtggttaaaagtatttaacactctactgttaatgacagatgttctgtttttataacctaccaaaaggaaactagaggcttcttggtgaagagcatttttgtgaagtgggttctgcaaggagcctataaagccaagggtggtgtccatttctgggaatggttaaacacaaaaggctgatagctggtatcacatagttggagtcagtgcataattccaagtggctttttttttttttggcacggggactgatcaggaagatatattcctgcataactcaatctgaaccaaggattgtagtttagttttcctccttgccttcccttctgtgtgaccgaccccttggccaaaaaaaaacaaaaagcaaaaaacaaaaacctaccctgttctggtttttttcctccctttagttccacccccaacccccattccctggtgtccttcttagagatgaagaaataataaggaaacatctttcatagccacattaaataagagaaactgatatacattatttttttctttttaaagatgacttataagaaccctgaaatttatataggtgagacaattagaaataaaaagatcttcagccaggcctttctgaaggagttattctgctaaaaatggtcttagttgtctgaaaagccagctcttgaacctcttcacaacagtatcaacactggcttctcccggttcattttatgcgtgcgagaagtcagtggtaactgctgcagggcttaatacattagtggtaactggtttaaaaaacaaagactgtaagcctgtgtgtgccactgtttgcttcaacagtatatcctactaataagcctcacctatttaatccaatgagttttaaatctaaatctcattcccttcttctttccctaccttttttttctttttttcttaaaaaaatattttgtgttattaacagaaattcatatttggtgtggcttaacggtatttcagaaggtcatcagattgtgagactgcttccttgaaacatttttgtgctattgttttaaaaaaataattaaaaaacagttggcgttaataaaaatgtcaatgtgaaactgatgtcctgattcactttattctctttctttgataagaaactaaaaactttcctatcattcagtaggcttatgcaaagttatactatcataggatttt

SEQ ID NO: 281068 - DNA, 1353 bp, Homo sapiens
gcacgagcaggaaccagttaactacattcattgtccaacccccactggtttgaaagaagactccaaattcttggcatatgatcagcaattcagcaaaaaataaataaaaaataaaaatgtaaatatgatagtaataaaatagagcataacgaaactgtgaaactttctgaagccttgtcagtggttaaaagtatttaacactctactgttaatgacagatgttctgtttttataacctaccaaaaggaaactagaggcttcttggtgaagagcatttttgtgaagtgggttctgcaaggagcctataaagccaagggtggtgtccatttctgggaatggttaaacacaaaaggctgatagctggtatcacatagttggagtcagtgcataattccaagtggctttttttttttttggcacggggactgatcaggaagatatattcctgcataactcaatctgaaccaaggattgtagtttagttttcctccttgccttcccttctgtgtgaccgaccccttggccaaaaaaaaacaaaaagcaaaaaacaaaaacctaccctgttctggtttttttcctccctttagttccacccccaacccccattccctggtgtccttcttagagatgaagaaataataaggaaacatctttcatagccacattaaataagagaaactgatatacattatttttttctttttaaagatgacttataagaaccctgaaatttatataggtgagacaattagaaataaaaagatcttcagccaggcctttctgaaggagttattctgctaaaaatggtcttagttgtctgaaaagccagctcttgaacctcttcacaacagtatcaacactggcttctcccggttcattttatgcgtgcgagaagtcagtggtaactgctgcagggcttaatacattagtggtaactggtttaaaaaacaaagactgtaagcctgtgtgtgccactgtttgcttcaacagtatatcctactaataagcctcacctatttaatccaatgagttttaaatctaaatctcattcccttcttctttccctaccttttttttctttttttcttaaaaaaatattttgtgttattaacagaaattcatatttggtgtggcttaacggtatttcagaaggtcatcagattgtgagactgcttccttgaaacatttttgtgctattgttttaaaaaaataattaaaaaacagttggcgttaataaaaatgtcaatgtgaaactgatgtcctgattcactttattctctttctttgataagaaactaaaaactttcctatcattcagtaggcttatgcaaagttatactatcataggatttt

SEQ ID NO: 281069 - DNA, 2229 bp, Homo sapiens
ctctccctccctccttgcgggccctcctccccttccctcccctccgcccccttccccgtaggcagcccgcccgccagtccgcccgcaccgcctccttcccagcccctagcgctccggctgggtctctcccccgccccccaggctcccccggtcgctctcctccggcggtcgcccgcgctcggtggatgtggctggcagctgccgccccctccctcgctcgccgcctgctcttcctcggccctccgcctcctcccctcctccttctcgtcttcagccgctcctctcgccgccgcctccacagcctgggcctcgccgcgatgccggagaagaggcccttcgagcggctgcctgccgatgtctcccccatcaactacagcctttgcctcaagcccgacttgctggacttcaccttcgagggcaagctggaggccgccgcccaggtgaggcaggcgactaatcagattgtgatgaattgtgctgatattgatattattacagcttcatatgcaccagaaggagatgaagaaatacatgctacaggatttaactatcagaatgaagatgaaaaagtcaccttgtctttccctagtactctgcaaacaggtacgggaaccttaaagatagattttgttggagagctgaatgacaaaatgaaaggtttctatagaagtaaatatactaccccttctggagaggtgcgctatgctgctgtaacacagtttgaggctactgatgcccgaagggcttttccttgctgggatgagcctgctatcaaagcaacttttgatatctcattggttgttcctaaagacagagtagctttatcaaacatgaatgtaattgaccggaaaccataccctgatgatgaaaatttagtggaagtgaagtttgcccgcacacctgttatgtctacatatctggtggcatttgttgtgggtgaatatgactttgtagaaacaaggtcaaaagatggtgtgtgtgtccgtgtttacactcctgttggcaaagcagagcaaggaaaatttgcgttagaggttgctgctaaaaccttgcctttttataaggactacttcaatgttccttatcctctacctaaaattgatctcattgctattgcagactttgcagctggtgccatggagaactggggccttgttacttatagggagactgcattgcttattgatccaaaaaattcctgttcttcatcccgccagtgggttgctctggttgtgggacatgaactcgcccatcaatggtttggaaatcttgttactatggaatggtggactcatctttggttaaatgaaggttttgcatcctggattgaatatctgtgtgtagaccactgcttcccagagtatgatatttggactcagtttgtttctgctgattacacccgtgcccaggagcttgacgccttagataacagccatcctattgaagtcagtgtgggccatccatctgaggttgatgagatatttgatgctatatcatatagcaaaggtgcatctgtcatccgaatgctgcatgactacattggggataaggactttaagaaaggaatgaacatgtatttaaccaagttccaacaaaagaatgctgccacagaggatctctgggaaagtttagaaaatgctagtggtaaacctatagcagctgtgatgaatacctggaccaaacaaatgggatttcccctcatttatgtggaagctgaacaggaagatgacagattatcgaggtagtcccaaacagaagtacatggtggctgggcgggggccaacaggtggggcgaacaatggccccagagccgccacgggcccacatactacaacaactctcaatacataggcagagaggaccggcaacgacaggcccacagctaaaaactcatactacgatgcgcacacccgccagaagaatgacatcgggggaaacactgcaccaaacatggtccaaacccaggaacatacacgggggacgaaacgaccaacaaacctacaagcgaaccgacgtcagggagctcagcactcccgggaaccgcaaggcaacaaggcatccatggccccatgccacgggactacacatcagaacagacgccaggcccaacacccgcaagcaccactcatccccccctggcccccccatggcgcggcatgcggacgcatggaacttcaaccaggctcatggaacataggcccctgcccacagagaactacgacgactgcg

SEQ ID NO: 281070 - DNA, 1735 bp, Homo sapiens
ctctccctccctccttgcgggccctcctccccttccctcccctccgcccccttccccgtaggcagcccgcccgccagtccgcccgcaccgcctccttcccagcccctagcgctccggctgggtctctcccccgccccccaggctcccccggtcgctctcctccggcggtcgcccgcgctcggtggatgtggctggcagctgccgccccctccctcgctcgccgcctgctcttcctcggccctccgcctcctcccctcctccttctcgtcttcagccgctcctctcgccgccgcctccacagcctgggcctcgccgcgatgccggagaagaggcccttcgagcggctgcctgccgatgtctcccccatcaactacagcctttgcctcaagcccgacttgctggacttcaccttcgagggcaagctggaggccgccgcccaggtgaggcaggcgactaatcagattgtgatgaattgtgctgatattgatattattacagcttcatatgcaccagaaggagatgaagaaatacatgctacaggatttaactatcagaatgaagatgaaaaagtcaccttgtctttccctagtactctgcaaacaggtacgggaaccttaaagatagattttgttggagagctgaatgacaaaatgaaaggtttctatagaagtaaatatactaccccttctggagaggtgcgctatgctgctgtaacacagtttgaggctactgatgcccgaagggcttttccttgctgggatgagcctgctatcaaagcaacttttgatatctcattggttgttcctaaagacagagtagctttatcaaacatgaatgtaattgaccggaaaccataccctgatgatgaaaatttagtggaagtgaagtttgcccgcacacctgttatgtctacatatctggtggcatttgttgtgggtgaatatgactttgtagaaacaaggtcaaaagatggtgtgtgtgtccgtgtttacactcctgttggcaaagcagagcaaggaaaatttgcgttagaggttgctgctaaaaccttgcctttttataaggactacttcaatgttccttatcctctacctaaaattgatctcattgctattgcagactttgcagctggtgccatggagaactggggccttgttacttatagggagactgcattgcttattgatccaaaaaattcctgttcttcatcccgccagtgggttgctctggttgtgggacatgaactcgcccatcaatggtttggaaatcttgttactatggaatggtggactcatctttggttaaatgaaggttttgcatcctggattgaatatctgtgtgtagaccactgcttcccagagtatgatatttggactcagtttgtttctgctgattacacccgtgcccaggagcttgacgccttagataacagccatcctattgaagtcagtgtgggccatccatctgaggttgatgagatatttgatgctatatcatatagcaaaggtgcatctgtcatccgaatgctgcatgactacattggggataaggactttaagaaaggaatgaacatgtatttaaccaagttccaacaaaagaatgctgccacaggtaatctttaatagcttgagatagaaatggagagaaagtattgtcactctatccaggctgggacattttatttttgttctgaatacttaactcaaggtcaggatccatgtaataaataaattag

SEQ ID NO: 281071 - DNA, 1793 bp, Homo sapiens
ctctccctccctccttgcgggccctcctccccttccctcccctccgcccccttccccgtaggcagcccgcccgccagtccgcccgcaccgcctccttcccagcccctagcgctccggctgggtctctcccccgccccccaggctcccccggtcgctctcctccggcggtcgcccgcgctcggtggatgtggctggcagctgccgccccctccctcgctcgccgcctgctcttcctcggccctccgcctcctcccctcctccttctcgtcttcagccgctcctctcgccgccgcctccacagcctgggcctcgccgcgatgccggagaagaggcccttcgagcggctgcctgccgatgtctcccccatcaactacagcctttgcctcaagcccgacttgctggacttcaccttcgagggcaagctggaggccgccgcccaggtgaggcaggcgactaatcagattgtgatgaattgtgctgatattgatattattacagcttcatatgcaccagaaggagatgaagaaatacatgctacaggatttaactatcagaatgaagatgaaaaagtcaccttgtctttccctagtactctgcaaacaggtacgggaaccttaaagatagattttgttggagagctgaatgacaaaatgaaaggtttctatagaagtaaatatactaccccttctggagaggtgcgctatgctgctgtaacacagtttgaggctactgatgcccgaagggcttttccttgctgggatgagcctgctatcaaagcaacttttgatatctcattggttgttcctaaagacagagtagctttatcaaacatgaatgtaattgaccggaaaccataccctgatgatgaaaatttagtggaagtgaagtttgcccgcacacctgttatgtctacatatctggtggcatttgttgtgggtgaatatgactttgtagaaacaaggtcaaaagatggtgtgtgtgtccgtgtttacactcctgttggcaaagcagagcaaggaaaatttgcgttagaggttgctgctaaaaccttgcctttttataaggactacttcaatgttccttatcctctacctaaaattgatctcattgctattgcagactttgcagctggtgccatggagaactggggccttgttacttataggtatgttaatgatgtgttaccctgccttatcttttcaaatcactgatttcaaaagggcttccctcctaatcacagttgagtagcttctgctttacgatatggtgtaaatttttctaccttcccccacttccgtgcacatttcaagaatgcagatggacacccctccctttggtgctactgtctgagggtgtaagattttaaagtgagcatctggcggtagtagcatttttagatatattcttggctaagtttctcattgcagtagtttcatagctatttatccagcttggagaaccttccctaatttcatatcttctagccaagtttttacatgtctgtcaccacaacataaacatgtgagttgaataacttttaaaagcagagtctgtctgtaaacaagtttttgccttctactttcaattgcctttttagatgagctaagtgttggacagccggctcagtgctgtttttgggactatggaatgcatcttcctccaccactcccctcatttaatggaaggactttcttctctctccatctagcacagtaatcgctaatcccttagacaatgttttcccaaaatttcaggcagctattctatcaacaaactgataattaaacttgtgt

SEQ ID NO: 281072 - DNA, 192 bp, Homo sapiens
ttactggggaagaagctcatataatcatatgcagaacatccaagggagagttaactattcctatctttatcttttttcctgtagcttcataaacaagcagatatgcaagaagagaaaaaccgaatcgaaagagtccttggcgctactcttttgcctgacctgattcaaaaagtcctcacgtttgcactttca

SEQ ID NO: 281073 - DNA, 711 bp, Homo sapiens
tgttgtggtgtgcacctgtagtcccagctactcaggaggctgaggagggaagatcacctgagtctgggaggtcgaggctgcagtgagctgtgattatgccactgcactctagcctgggtgatgaagtaagaccgtatctcaaaaaataccagtttttatgatagaatttacttagttgcagaagaggggtggcaaggggaatgttaatttggctcactgtttcctgaacctgaaagaaccaaagaattagcagtgtagtgtcaaaagttaaataaaatttcttttttgtttaggaaaataaaaatataaacattttagattatcattgtttatcttctagaggatctctgggaaagtttagaaaatgctagtggtaaacctatagcagctgtgatgaatacctggaccaaacaaatgggatttcccctcatttatgtggaagctgaacagcaggtaaacatataaagtctttccatttgtctgatattgtattaaatgaagttcagtacagtgtatcaagtttgcttttctgtactttaagttttctagtgacatttaaaccagccctgttactcttttatcagtaattttacagcttgcatcattaaaattatacatgcttaagagagaaaacaaaatgttacttgcttgtctagtctccagggaaaatactgtaaaatttgatataattctaaaaccaccaaatatggt

SEQ ID NO: 281074 - DNA, 490 bp, Homo sapiens
gagttcatgtaccactaagaatgaactattgacttaacagtttggcttaggctcctggttagaacaccaccactcctctctccaccttaccttctgtttgtcccagtgcaaaatttgtttgttcttctctggcttaggtgaagattgtccccagtggatggtccctatcacaatctctactagtgaagaccccaaccaggccaaactaaaaattctaatggacaagccagagatgaatgtggttttgaaaaatgtcaaaccagaccaatgggtgaaggtgagttcagaatcttacctaaacagatttctctcacttatacattttatggccggttttaaattctgcttcagtttagtagtttcaaagaaaaaaaaaaacctaaacttttctttgtgaaacttaggacgaattttcatatagtattgtccagacatttgtccttatgttagggaaggtagtggtagagaagcagatccaaaggcataggac

SEQ ID NO: 281075 - DNA, 411 bp, Homo sapiens
tttgatattctgttgtattaattctgttggggtagtctttaatcttcgtgaaactttttctttccatattaggaaatattttcctaatatctctaaagcctaacttgtccatctgacttactgtctgaatcttcccaacttatgcatgcccacttttattgtttaaatttgtttcttttttttttttttaaacacagggagactgcattgcttattgatccaaaaaattcctgttcttcatcccgccagtgggttgctctggttgtgggacatgaactcgcccatcaatggtttggaaatcttgttactatggtatttaatatttttaagtgctcaaatatatttatcttcatcctactccacattattttggctacatagtatttcaagtttggctgcaacactgtgcca

SEQ ID NO: 281076 - DNA, 517 bp, Homo sapiens
tagcacatatcaggcatttaagaataaatgtttgtttcctttcctgttcttattttcacatattggtagtttgagactaagttaataactttttaggcagtcaccctaaacatgactttcaagagttattttaggattagtctgccttttactttagtaagtactgtattctctccattgccaggaggaatatttgaaaaaggaaggaatgatttgaacattgtaaatagctaactgaatatagtgtcttgaggacatatttttggtaactgtgtttaacatctccataaaagtgttttttatttatcttcaatcacaggtacgggaaccttaaagatagattttgttggagagctgaatgacaaaatgaaaggtttctatagaagtaaatatactaccccttctggagaggtgcgctatgctgctgtaacacagtttgaggtatgggttattcttctctaaaatattattattcttaaattaggcattctgacaaagctgtgttttattatgtggg

SEQ ID NO: 281077 - DNA, 669 bp, Homo sapiens
aagatcacctgagtctgggaggtcgaggctgcagtgagctgtgattatgccactgcactctagcctgggtgatgaagtaagaccgtatctcaaaaaataccagtttttatgatagaatttacttagttgcagaagaggggtggcaaggggaatgttaatttggctcactgtttcctgaacctgaaagaaccaaagaattagcagtgtagtgtcaaaagttaaataaaatttcttttttgtttaggaaaataaaaatataaacattttagattatcattgtttatcttctagaggatctctgggaaagtttagaaaatgctagtggtaaacctatagcagctgtgatgaatacctggaccaaacaaatgggatttcccctcatttatgtggaagctgaacaggtagaagatgacagattattgaggttgtcccaaaagaagttctgtgctggtgggtcatatgttggtgaagattgtccccagtggatggtccctatcacaatctctactagtgaagaccccaaccaggccaaactaaaaattctaatggacaagccagagatgaatgtggttttgaaaaatgtcaaaccagaccaatgggtgaaggtgagttcagaatcttacctaaacagatttctctcacttatacattttatggccggttttaaat

SEQ ID NO: 281078 - DNA, 4299 bp, Homo sapiens
ctctccctccctccttgcgggccctcctccccttccctcccctccgcccccttccccgtaggcagcccgcccgccagtccgcccgcaccgcctccttcccagcccctagcgctccggctgggtctctcccccgccccccaggctcccccggtcgctctcctccggcggtcgcccgcgctcggtggatgtggctggcagctgccgccccctccctcgctcgccgcctgctcttcctcggccctccgcctcctcccctcctccttctcgtcttcagccgctcctctcgccgccgcctccacagcctgggcctcgccgcgatgccggagaagaggcccttcgagcggctgcctgccgatgtctcccccatcaactacagcctttgcctcaagcccgacttgctggacttcaccttcgagggcaagctggaggccgccgcccaggtgaggcaggcgactaatcagattgtgatgaattgtgctgatattgatattattacagcttcatatgcaccagaaggagatgaagaaatacatgctacaggatttaactatcagaatgaagatgaaaaagtcaccttgtctttccctagtactctgcaaacaggtacgggaaccttaaagatagattttgttggagagctgaatgacaaaatgaaaggtttctatagaagtaaatatactaccccttctggagaggtgcgctatgctgctgtaacacagtttgaggctactgatgcccgaagggcttttccttgctgggatgagcctgctatcaaagcaacttttgatatctcattggttgttcctaaagacagagtagctttatcaaacatgaatgtaattgaccggaaaccataccctgatgatgaaaatttagtggaagtgaagtttgcccgcacacctgttatgtctacatatctggtggcatttgttgtgggtgaatatgactttgtagaaacaaggtcaaaagatggtgtgtgtgtccgtgtttacactcctgttggcaaagcagagcaaggaaaatttgcgttagaggttgctgctaaaaccttgcctttttataaggactacttcaatgttccttatcctctacctaaaattgatctcattgctattgcagactttgcagctggtgccatggagaactggggccttgttacttatagggagactgcattgcttattgatccaaaaaattcctgttcttcatcccgccagtgggttgctctggttgtgggacatgaactcgcccatcaatggtttggaaatcttgttactatggaatggtggactcatctttggttaaatgaaggttttgcatcctggattgaatatctgtgtgtagaccactgcttcccagagtatgatatttggactcagtttgtttctgctgattacacccgtgcccaggagcttgacgccttagataacagccatcctattgaagtcagtgtgggccatccatctgaggttgatgagatatttgatgctatatcatatagcaaaggtgcatctgtcatccgaatgctgcatgactacattggggataaggactttaagaaaggaatgaacatgtatttaaccaagttccaacaaaagaatgctgccacagaggatctctgggaaagtttagaaaatgctagtggtaaacctatagcagctgtgatgaatacctggaccaaacaaatgggatttcccctcatttatgtggaagctgaacaggtagaagatgacagattattgaggttgtcccaaaagaagttctgtgctggtgggtcatatgttggtgaagattgtccccagtggatggtccctatcacaatctctactagtgaagaccccaaccaggccaaactaaaaattctaatggacaagccagagatgaatgtggttttgaaaaatgtcaaaccagaccaatgggtgaagttaaacttaggaacagttgggttttatcggacccagtacagctctgccatgctggaaagtttattaccaggcattcgtgacctttctctgccccctgtggatcgacttggattacagaatgacctcttctccttggctcgagctggaatcattagcactgtagaggttctaaaagtcatggaggcttttgtgaatgagcccaattatactgtatggagcgacctgagctgtaacctggggattctctcaactctcttgtcccacacagacttctatgaggaaatccaggagtttgtgaaagatgtcttttcacctataggggagagactgggctgggaccccaaacctggagaaggtcatctcgatgcactcctgaggggcttggttctgggaaaactaggaaaagcaggacataaggcaacgttagaagaagcccgtcgtcggtttaaggaccacgtggaaggaaaacagattctctccgctgatctgaggagtcctgtctatctgactgttttgaagcatggtgatggcactactttagatattatgttaaaacttcataaacaagcagatatgcaagaagagaaaaaccgaatcgaaagagtccttggcgctactcttttgcctgacctgattcaaaaagtcctcacgtttgcactttcagaagaggtacgtccacaggacactgtatcggtaattggtggagtagctggaggcagcaagcatggtaggaaagctgcttggaaattcataaaggacaactgggaagaactttataaccgataccagggaggattcttaatatccagactaataaagctatcagttgagggatttgcagttgataaaatggctggagaggttaaggctttcttcgagagtcacccagctccttcagctgagcgtaccatccagcagtgttgtgaaaatattctgctgaatgctgcctggctaaagcgagatgctgagagcatccaccagtacctccttcagcggaaggcctcaccacccacagtgtgaatcctgaggtgccgccattggcggttctgctgcttcgctgcagggataaggtggagctaccgaacagctgattcatatgccaagaatttggagtcttctttcaaaccagtgggggttggacaatgaatgtagttaactggttcctgctcacactccagaattaaattctattgaaaaaggaaaatcagcaattcagcaaaaaataaataaaaaataaaaatgtaaatatgatagtaataaaatagagcataacgaaactgtgaaactttctgaagccttgtcagtggttaaaagtatttaacactctactgttaatgacagatgttctgtttttataacctaccaaaaggaaactagaggcttcttggtgaagagcatttttgtgaagtgggttctgcaaggagcctataaagccaagggtggtgtccatttctgggaatggttaaacacaaaaggctgatagctggtatcacatagttggagtcagtgcataattccaagtggctttttttttttttggcacggggactgatcaggaagatatattcctgcataactcaatctgaaccaaggattgtagtttagttttcctccttgccttcccttctgtgtgaccgaccccttggccaaaaaaaaacaaaaagcaaaaaacaaaaacctaccctgttctggtttttttcctccctttagttccacccccaacccccattccctggtgtccttcttagagatgaagaaataataaggaaacatctttcatagccacattaaataagagaaactgatatacattatttttttctttttaaagatgacttataagaaccctgaaatttatataggtgagacaattagaaataaaaagatcttcagccaggcctttctgaaggagttattctgctaaaaatggtcttagttgtctgaaaagccagctcttgaacctcttcacaacagtatcaacactggcttctcccggttcattttatgcgtgcgagaagtcagtggtaactgctgcagggcttaatacattagtggtaactggtttaaaaaacaaagactgtaagcctgtgtgtgccactgtttgcttcaacagtatatcctactaataagcctcacctatttaatccaatgagttttaaatctaaatctcattcccttcttctttccctaccttttttttctttttttcttaaaaaaatattttgtgttattaacagaaattcatatttggtgtggcttaacggtatttcagaaggtcatcagattgtgagactgcttccttgaaacatttttgtgctattgttttaaaaaaataattaaaaaacagttggcgttaataaaaatgtcaatgtga

SEQ ID NO: 281079 - DNA, 4234 bp, Homo sapiens
agcggacggaagagtcaaggctgggacctcatggcatcattttccatggattgctctccaagtttttgtgttcctggcctttggaaccccttcatcatattccgcagccgctcctctcgccgccgcctccacagcctgggcctcgccgcgatgccggagaagaggcccttcgagcggctgcctgccgatgtctcccccatcaactacagcctttgcctcaagcccgacttgctggacttcaccttcgagggcaagctggaggccgccgcccaggtgaggcaggcgactaatcagattgtgatgaattgtgctgatattgatattattacagcttcatatgcaccagaaggagatgaagaaatacatgctacaggatttaactatcagaatgaagatgaaaaagtcaccttgtctttccctagtactctgcaaacaggtacgggaaccttaaagatagattttgttggagagctgaatgacaaaatgaaaggtttctatagaagtaaatatactaccccttctggagaggtgcgctatgctgctgtaacacagtttgaggctactgatgcccgaagggcttttccttgctgggatgagcctgctatcaaagcaacttttgatatctcattggttgttcctaaagacagagtagctttatcaaacatgaatgtaattgaccggaaaccataccctgatgatgaaaatttagtggaagtgaagtttgcccgcacacctgttatgtctacatatctggtggcatttgttgtgggtgaatatgactttgtagaaacaaggtcaaaagatggtgtgtgtgtccgtgtttacactcctgttggcaaagcagagcaaggaaaatttgcgttagaggttgctgctaaaaccttgcctttttataaggactacttcaatgttccttatcctctacctaaaattgatctcattgctattgcagactttgcagctggtgccatggagaactggggccttgttacttatagggagactgcattgcttattgatccaaaaaattcctgttcttcatcccgccagtgggttgctctggttgtgggacatgaactcgcccatcaatggtttggaaatcttgttactatggaatggtggactcatctttggttaaatgaaggttttgcatcctggattgaatatctgtgtgtagaccactgcttcccagagtatgatatttggactcagtttgtttctgctgattacacccgtgcccaggagcttgacgccttagataacagccatcctattgaagtcagtgtgggccatccatctgaggttgatgagatatttgatgctatatcatatagcaaaggtgcatctgtcatccgaatgctgcatgactacattggggataaggactttaagaaaggaatgaacatgtatttaaccaagttccaacaaaagaatgctgccacagaggatctctgggaaagtttagaaaatgctagtggtaaacctatagcagctgtgatgaatacctggaccaaacaaatgggatttcccctcatttatgtggaagctgaacaggtagaagatgacagattattgaggttgtcccaaaagaagttctgtgctggtgggtcatatgttggtgaagattgtccccagtggatggtccctatcacaatctctactagtgaagaccccaaccaggccaaactaaaaattctaatggacaagccagagatgaatgtggttttgaaaaatgtcaaaccagaccaatgggtgaagttaaacttaggaacagttgggttttatcggacccagtacagctctgccatgctggaaagtttattaccaggcattcgtgacctttctctgccccctgtggatcgacttggattacagaatgacctcttctccttggctcgagctggaatcattagcactgtagaggttctaaaagtcatggaggcttttgtgaatgagcccaattatactgtatggagcgacctgagctgtaacctggggattctctcaactctcttgtcccacacagacttctatgaggaaatccaggagtttgtgaaagatgtcttttcacctataggggagagactgggctgggaccccaaacctggagaaggtcatctcgatgcactcctgaggggcttggttctgggaaaactaggaaaagcaggacataaggcaacgttagaagaagcccgtcgtcggtttaaggaccacgtggaaggaaaacagattctctccgctgatctgaggagtcctgtctatctgactgttttgaagcatggtgatggcactactttagatattatgttaaaacttcataaacaagcagatatgcaagaagagaaaaaccgaatcgaaagagtccttggcgctactcttttgcctgacctgattcaaaaagtcctcacgtttgcactttcagaagaggtacgtccacaggacactgtatcggtaattggtggagtagctggaggcagcaagcatggtaggaaagctgcttggaaattcataaaggacaactgggaagaactttataaccgataccagggaggattcttaatatccagactaataaagctatcagttgagggatttgcagttgataaaatggctggagaggttaaggctttcttcgagagtcacccagctccttcagctgagcgtaccatccagcagtgttgtgaaaatattctgctgaatgctgcctggctaaagcgagatgctgagagcatccaccagtacctccttcagcggaaggcctcaccacccacagtgtgaatcctgaggtgccgccattggcggttctgctgcttcgctgcagggataaggtggagctaccgaacagctgattcatatgccaagaatttggagtcttctttcaaaccagtgggggttggacaatgaatgtagttaactggttcctgctcacactccagaattaaattctattgaaaaaggaaaatcagcaattcagcaaaaaataaataaaaaataaaaatgtaaatatgatagtaataaaatagagcataacgaaactgtgaaactttctgaagccttgtcagtggttaaaagtatttaacactctactgttaatgacagatgttctgtttttataacctaccaaaaggaaactagaggcttcttggtgaagagcatttttgtgaagtgggttctgcaaggagcctataaagccaagggtggtgtccatttctgggaatggttaaacacaaaaggctgatagctggtatcacatagttggagtcagtgcataattccaagtggctttttttttttttggcacggggactgatcaggaagatatattcctgcataactcaatctgaaccaaggattgtagtttagttttcctccttgccttcccttctgtgtgaccgaccccttggccaaaaaaaaacaaaaagcaaaaaacaaaaacctaccctgttctggtttttttcctccctttagttccacccccaacccccattccctggtgtccttcttagagatgaagaaataataaggaaacatctttcatagccacattaaataagagaaactgatatacattatttttttctttttaaagatgacttataagaaccctgaaatttatataggtgagacaattagaaataaaaagatcttcagccaggcctttctgaaggagttattctgctaaaaatggtcttagttgtctgaaaagccagctcttgaacctcttcacaacagtatcaacactggcttctcccggttcattttatgcgtgcgagaagtcagtggtaactgctgcagggcttaatacattagtggtaactggtttaaaaaacaaagactgtaagcctgtgtgtgccactgtttgcttcaacagtatatcctactaataagcctcacctatttaatccaatgagttttaaatctaaatctcattcccttcttctttccctaccttttttttctttttttcttaaaaaaatattttgtgttattaacagaaattcatatttggtgtggcttaacggtatttcagaaggtcatcagattgtgagactgcttccttgaaacatttttgtgctattgttttaaaaaaataattaaaaaacagttggcgttaataaaaatgtcaatgtgaaactgatgtcctgattcactttattctctttctttgataagaaactaaaaactttcctatcattcagtaggcttatgcaaagttatactatcataggatttt

SEQ ID NO: 281080 - DNA, 3468 bp, Homo sapiens
agaagcgggaggagaaatcggctaggtcgaggctgggtgttaatcggccgaggcgtgttacactcctgtggcaagcagagcaaggaaaatttgcgttagaggttgctgctaaaaccttgcctttttataaggactacttcaatgttccttatcctctacctaaaattgatctcattgctattgcagactttgcagctggtgccatggagaactggggccttgttacttatagggagactgcattgcttattgatccaaaaaattcctgttcttcatcccgccagtgggttgctctggttgtgggacatgaactcgcccatcaatggtttggaaatcttgttactatggaatggtggactcatctttggttaaatgaaggttttgcatcctggattgaatatctgtgtgtagaccactgcttcccagagtatgatatttggactcagtttgtttctgctgattacacccgtgcccaggagcttgacgccttagataacagccatcctattgaagtcagtgtgggccatccatctgaggttgatgagatatttgatgctatatcatatagcaaaggtgcatctgtcatccgaatgctgcatgactacattggggataaggactttaagaaaggaatgaacatgtatttaaccaagttccaacaaaagaatgctgccacagaggatctctgggaaagtttagaaaatgctagtggtaaacctatagcagctgtgatgaatacctggaccaaacaaatgggatttcccctcatttatgtggaagctgaacaggtagaagatgacagattattgaggttgtcccaaaagaagttctgtgctggtgggtcatatgttggtgaagattgtccccagtggatggtccctatcacaatctctactagtgaagaccccaaccaggccaaactaaaaattctaatggacaagccagagatgaatgtggttttgaaaaatgtcaaaccagaccaatgggtgaagttaaacttaggaacagttgggttttatcggacccagtacagctctgccatgctggaaagtttattaccaggcattcgtgacctttctctgccccctgtggatcgacttggattacagaatgacctcttctccttggctcgagctggaatcattagcactgtagaggttctaaaagtcatggaggcttttgtgaatgagcccaattatactgtatggagcgacctgagctgtaacctggggattctctcaactctcttgtcccacacagacttctatgaggaaatccaggagtttgtgaaagatgtcttttcacctataggggagagactgggctgggaccccaaacctggagaaggtcatctcgatgcactcctgaggggcttggttctgggaaaactaggaaaagcaggacataaggcaacgttagaagaagcccgtcgtcggtttaaggaccacgtggaaggaaaacagattctctccgctgatctgaggagtcctgtctatctgactgttttgaagcatggtgatggcactactttagatattatgttaaaacttcataaacaagcagatatgcaagaagagaaaaaccgaatcgaaagagtccttggcgctactcttttgcctgacctgattcaaaaagtcctcacgtttgcactttcagaagaggtacgtccacaggacactgtatcggtaattggtggagtagctggaggcagcaagcatggtaggaaagctgcttggaaattcataaaggacaactgggaagaactttataaccgataccagggaggattcttaatatccagactaataaagctatcagttgagggatttgcagttgataaaatggctggagaggttaaggctttcttcgagagtcacccagctccttcagctgagcgtaccatccagcagtgttgtgaaaatattctgctgaatgctgcctggctaaagcgagatgctgagagcatccaccagtacctccttcagcggaaggcctcaccacccacagtgtgaatcctgaggtgccgccattggcggttctgctgcttcgctgcagggataaggtggagctaccgaacagctgattcatatgccaagaatttggagtcttctttcaaaccagtgggggttggacaatgaatgtagttaactggttcctgctcacactccagaattaaattctattgaaaaaggaaaatcagcaattcagcaaaaaataaataaaaaataaaaatgtaaatatgatagtaataaaatagagcataacgaaactgtgaaactttctgaagccttgtcagtggttaaaagtatttaacactctactgttaatgacagatgttctgtttttataacctaccaaaaggaaactagaggcttcttggtgaagagcatttttgtgaagtgggttctgcaaggagcctataaagccaagggtggtgtccatttctgggaatggttaaacacaaaaggctgatagctggtatcacatagttggagtcagtgcataattccaagtggctttttttttttttggcacggggactgatcaggaagatatattcctgcataactcaatctgaaccaaggattgtagtttagttttcctccttgccttcccttctgtgtgaccgaccccttggccaaaaaaaaacaaaaagcaaaaaacaaaaacctaccctgttctggtttttttcctccctttagttccacccccaacccccattccctggtgtccttcttagagatgaagaaataataaggaaacatctttcatagccacattaaataagagaaactgatatacattatttttttctttttaaagatgacttataagaaccctgaaatttatataggtgagacaattagaaataaaaagatcttcagccaggcctttctgaaggagttattctgctaaaaatggtcttagttgtctgaaaagccagctcttgaacctcttcacaacagtatcaacactggcttctcccggttcattttatgcgtgcgagaagtcagtggtaactgctgcagggcttaatacattagtggtaactggtttaaaaaacaaagactgtaagcctgtgtgtgccactgtttgcttcaacagtatatcctactaataagcctcacctatttaatccaatgagttttaaatctaaatctcattcccttcttctttccctaccttttttttctttttttcttaaaaaaatattttgtgttattaacagaaattcatatttggtgtggcttaacggtatttcagaaggtcatcagattgtgagactgcttccttgaaacatttttgtgctattgttttaaaaaaataattaaaaaacagttggcgttaataaaaatgtcaatgtgaaactgatgtcctgattcactttattctctttctttgataagaaactaaaaactttcctatcattcagtaggcttatgcaaagttatactatcataggatttt

SEQ ID NO: 281081 - DNA, 3258 bp, Homo sapiens
  misc_feature (33)..(33): n is a, c, g, or t
cctgttcagcttccacataaatgaggggaaatnccatttgtttggtccaggtattcatcacagctgctataggtttaccactagcattttctaaactttcccagagatcctctgtggcagcattcttttgttggaacgaatggtggactcatctttggttaaatgaaggttttgcatcctggattgaatatctgtgtgtagaccactgcttcccagagtatgatatttggactcagtttgtttctgctgattacacccgtgcccaggagcttgacgccttagataacagccatcctattgaagtcagtgtgggccatccatctgaggttgatgagatatttgatgctatatcatatagcaaaggtgcatctgtcatccgaatgctgcatgactacattggggataaggactttaagaaaggaatgaacatgtatttaaccaagttccaacaaaagaatgctgccacagaggatctctgggaaagtttagaaaatgctagtggtaaacctatagcagctgtgatgaatacctggaccaaacaaatgggatttcccctcatttatgtggaagctgaacaggtagaagatgacagattattgaggttgtcccaaaagaagttctgtgctggtgggtcatatgttggtgaagattgtccccagtggatggtccctatcacaatctctactagtgaagaccccaaccaggccaaactaaaaattctaatggacaagccagagatgaatgtggttttgaaaaatgtcaaaccagaccaatgggtgaagttaaacttaggaacagttgggttttatcggacccagtacagctctgccatgctggaaagtttattaccaggcattcgtgacctttctctgccccctgtggatcgacttggattacagaatgacctcttctccttggctcgagctggaatcattagcactgtagaggttctaaaagtcatggaggcttttgtgaatgagcccaattatactgtatggagcgacctgagctgtaacctggggattctctcaactctcttgtcccacacagacttctatgaggaaatccaggagtttgtgaaagatgtcttttcacctataggggagagactgggctgggaccccaaacctggagaaggtcatctcgatgcactcctgaggggcttggttctgggaaaactaggaaaagcaggacataaggcaacgttagaagaagcccgtcgtcggtttaaggaccacgtggaaggaaaacagattctctccgctgatctgaggagtcctgtctatctgactgttttgaagcatggtgatggcactactttagatattatgttaaaacttcataaacaagcagatatgcaagaagagaaaaaccgaatcgaaagagtccttggcgctactcttttgcctgacctgattcaaaaagtcctcacgtttgcactttcagaagaggtacgtccacaggacactgtatcggtaattggtggagtagctggaggcagcaagcatggtaggaaagctgcttggaaattcataaaggacaactgggaagaactttataaccgataccagggaggattcttaatatccagactaataaagctatcagttgagggatttgcagttgataaaatggctggagaggttaaggctttcttcgagagtcacccagctccttcagctgagcgtaccatccagcagtgttgtgaaaatattctgctgaatgctgcctggctaaagcgagatgctgagagcatccaccagtacctccttcagcggaaggcctcaccacccacagtgtgaatcctgaggtgccgccattggcggttctgctgcttcgctgcagggataaggtggagctaccgaacagctgattcatatgccaagaatttggagtcttctttcaaaccagtgggggttggacaatgaatgtagttaactggttcctgctcacactccagaattaaattctattgaaaaaggaaaatcagcaattcagcaaaaaataaataaaaaataaaaatgtaaatatgatagtaataaaatagagcataacgaaactgtgaaactttctgaagccttgtcagtggttaaaagtatttaacactctactgttaatgacagatgttctgtttttataacctaccaaaaggaaactagaggcttcttggtgaagagcatttttgtgaagtgggttctgcaaggagcctataaagccaagggtggtgtccatttctgggaatggttaaacacaaaaggctgatagctggtatcacatagttggagtcagtgcataattccaagtggctttttttttttttggcacggggactgatcaggaagatatattcctgcataactcaatctgaaccaaggattgtagtttagttttcctccttgccttcccttctgtgtgaccgaccccttggccaaaaaaaaacaaaaagcaaaaaacaaaaacctaccctgttctggtttttttcctccctttagttccacccccaacccccattccctggtgtccttcttagagatgaagaaataataaggaaacatctttcatagccacattaaataagagaaactgatatacattatttttttctttttaaagatgacttataagaaccctgaaatttatataggtgagacaattagaaataaaaagatcttcagccaggcctttctgaaggagttattctgctaaaaatggtcttagttgtctgaaaagccagctcttgaacctcttcacaacagtatcaacactggcttctcccggttcattttatgcgtgcgagaagtcagtggtaactgctgcagggcttaatacattagtggtaactggtttaaaaaacaaagactgtaagcctgtgtgtgccactgtttgcttcaacagtatatcctactaataagcctcacctatttaatccaatgagttttaaatctaaatctcattcccttcttctttccctaccttttttttctttttttcttaaaaaaatattttgtgttattaacagaaattcatatttggtgtggcttaacggtatttcagaaggtcatcagattgtgagactgcttccttgaaacatttttgtgctattgttttaaaaaaataattaaaaaacagttggcgttaataaaaatgtcaatgtgaaactgatgtcctgattcactttattctctttctttgataagaaactaaaaactttcctatcattcagtaggcttatgcaaagttatactatcataggatttt

SEQ ID NO: 281082 - DNA, 3344 bp, Homo sapiens
taatgctacttcaacatatttaattaggctcccatataattgtaattcattacaattagtgcaagaaatctaatgttcttcacctccatatcttcctcatcactcctctgcaactaccccaaaaataaacagaaccatagtggcttctttcccagcagaacaaagccaggactggaacccaggctctaagggatgacaggaatcatgttctattcaactttattattattagttactacatttttttgaggaccatcgttatacattatgagtgagttaaaggcagaaaaatgtaagttagaagggttttcctagaaagcgttttatgtaattcagtattacaggctatctgcttcctgtcataaccctgaatcacactgtctgccaggtcagtgtgggccatccatctgaggttgatgagatatttgatgctatatcatatagcaaaggtgcatctgtcatccgaatgctgcatgactacattggggataaggactttaagaaaggaatgaacatgtatttaaccaagttccaacaaaagaatgctgccacagaggatctctgggaaagtttagaaaatgctagtggtaaacctatagcagctgtgatgaatacctggaccaaacaaatgggatttcccctcatttatgtggaagctgaacaggtagaagatgacagattattgaggttgtcccaaaagaagttctgtgctggtgggtcatatgttggtgaagattgtccccagtggatggtccctatcacaatctctactagtgaagaccccaaccaggccaaactaaaaattctaatggacaagccagagatgaatgtggttttgaaaaatgtcaaaccagaccaatgggtgaagttaaacttaggaacagttgggttttatcggacccagtacagctctgccatgctggaaagtttattaccaggcattcgtgacctttctctgccccctgtggatcgacttggattacagaatgacctcttctccttggctcgagctggaatcattagcactgtagaggttctaaaagtcatggaggcttttgtgaatgagcccaattatactgtatggagcgacctgagctgtaacctggggattctctcaactctcttgtcccacacagacttctatgaggaaatccaggagtttgtgaaagatgtcttttcacctataggggagagactgggctgggaccccaaacctggagaaggtcatctcgatgcactcctgaggggcttggttctgggaaaactaggaaaagcaggacataaggcaacgttagaagaagcccgtcgtcggtttaaggaccacgtggaaggaaaacagattctctccgctgatctgaggagtcctgtctatctgactgttttgaagcatggtgatggcactactttagatattatgttaaaacttcataaacaagcagatatgcaagaagagaaaaaccgaatcgaaagagtccttggcgctactcttttgcctgacctgattcaaaaagtcctcacgtttgcactttcagaagaggtacgtccacaggacactgtatcggtaattggtggagtagctggaggcagcaagcatggtaggaaagctgcttggaaattcataaaggacaactgggaagaactttataaccgataccagggaggattcttaatatccagactaataaagctatcagttgagggatttgcagttgataaaatggctggagaggttaaggctttcttcgagagtcacccagctccttcagctgagcgtaccatccagcagtgttgtgaaaatattctgctgaatgctgcctggctaaagcgagatgctgagagcatccaccagtacctccttcagcggaaggcctcaccacccacagtgtgaatcctgaggtgccgccattggcggttctgctgcttcgctgcagggataaggtggagctaccgaacagctgattcatatgccaagaatttggagtcttctttcaaaccagtgggggttggacaatgaatgtagttaactggttcctgctcacactccagaattaaattctattgaaaaaggaaaatcagcaattcagcaaaaaataaataaaaaataaaaatgtaaatatgatagtaataaaatagagcataacgaaactgtgaaactttctgaagccttgtcagtggttaaaagtatttaacactctactgttaatgacagatgttctgtttttataacctaccaaaaggaaactagaggcttcttggtgaagagcatttttgtgaagtgggttctgcaaggagcctataaagccaagggtggtgtccatttctgggaatggttaaacacaaaaggctgatagctggtatcacatagttggagtcagtgcataattccaagtggctttttttttttttggcacggggactgatcaggaagatatattcctgcataactcaatctgaaccaaggattgtagtttagttttcctccttgccttcccttctgtgtgaccgaccccttggccaaaaaaaaacaaaaagcaaaaaacaaaaacctaccctgttctggtttttttcctccctttagttccacccccaacccccattccctggtgtccttcttagagatgaagaaataataaggaaacatctttcatagccacattaaataagagaaactgatatacattatttttttctttttaaagatgacttataagaaccctgaaatttatataggtgagacaattagaaataaaaagatcttcagccaggcctttctgaaggagttattctgctaaaaatggtcttagttgtctgaaaagccagctcttgaacctcttcacaacagtatcaacactggcttctcccggttcattttatgcgtgcgagaagtcagtggtaactgctgcagggcttaatacattagtggtaactggtttaaaaaacaaagactgtaagcctgtgtgtgccactgtttgcttcaacagtatatcctactaataagcctcacctatttaatccaatgagttttaaatctaaatctcattcccttcttctttccctaccttttttttctttttttcttaaaaaaatattttgtgttattaacagaaattcatatttggtgtggcttaacggtatttcagaaggtcatcagattgtgagactgcttccttgaaacatttttgtgctattgttttaaaaaaataattaaaaaacagttggcgttaataaaaatgtcaatgtgaaactgatgtcctgattcactttattctctttctttgataagaaactaaaaactttcctatcattcagtaggcttatgcaaagttatactatcataggatttt

SEQ ID NO: 281083 - DNA, 2154 bp, Homo sapiens
gtagtcttatgtctcttttacttctcaaatcaggtcatctcgatgcactcctgaggggcttggttctgggaaaactaggaaaagcaggacataaggcaacgttagaagaagcccgtcgtcggtttaaggaccacgtggaaggaaaacagattctctccgctgatctgaggagtcctgtctatctgactgttttgaagcatggtgatggcactactttagatattatgttaaaacttcataaacaagcagatatgcaagaagagaaaaaccgaatcgaaagagtccttggcgctactcttttgcctgacctgattcaaaaagtcctcacgtttgcactttcagaagaggtacgtccacaggacactgtatcggtaattggtggagtagctggaggcagcaagcatggtaggaaagctgcttggaaattcataaaggacaactgggaagaactttataaccgataccagggaggattcttaatatccagactaataaagctatcagttgagggatttgcagttgataaaatggctggagaggttaaggctttcttcgagagtcacccagctccttcagctgagcgtaccatccagcagtgttgtgaaaatattctgctgaatgctgcctggctaaagcgagatgctgagagcatccaccagtacctccttcagcggaaggcctcaccacccacagtgtgaatcctgaggtgccgccattggcggttctgctgcttcgctgcagggataaggtggagctaccgaacagctgattcatatgccaagaatttggagtcttctttcaaaccagtgggggttggacaatgaatgtagttaactggttcctgctcacactccagaattaaattctattgaaaaaggaaaatcagcaattcagcaaaaaataaataaaaaataaaaatgtaaatatgatagtaataaaatagagcataacgaaactgtgaaactttctgaagccttgtcagtggttaaaagtatttaacactctactgttaatgacagatgttctgtttttataacctaccaaaaggaaactagaggcttcttggtgaagagcatttttgtgaagtgggttctgcaaggagcctataaagccaagggtggtgtccatttctgggaatggttaaacacaaaaggctgatagctggtatcacatagttggagtcagtgcataattccaagtggctttttttttttttggcacggggactgatcaggaagatatattcctgcataactcaatctgaaccaaggattgtagtttagttttcctccttgccttcccttctgtgtgaccgaccccttggccaaaaaaaaacaaaaagcaaaaaacaaaaacctaccctgttctggtttttttcctccctttagttccacccccaacccccattccctggtgtccttcttagagatgaagaaataataaggaaacatctttcatagccacattaaataagagaaactgatatacattatttttttctttttaaagatgacttataagaaccctgaaatttatataggtgagacaattagaaataaaaagatcttcagccaggcctttctgaaggagttattctgctaaaaatggtcttagttgtctgaaaagccagctcttgaacctcttcacaacagtatcaacactggcttctcccggttcattttatgcgtgcgagaagtcagtggtaactgctgcagggcttaatacattagtggtaactggtttaaaaaacaaagactgtaagcctgtgtgtgccactgtttgcttcaacagtatatcctactaataagcctcacctatttaatccaatgagttttaaatctaaatctcattcccttcttctttccctaccttttttttctttttttcttaaaaaaatattttgtgttattaacagaaattcatatttggtgtggcttaacggtatttcagaaggtcatcagattgtgagactgcttccttgaaacatttttgtgctattgttttaaaaaaataattaaaaaacagttggcgttaataaaaatgtcaatgtgaaactgatgtcctgattcactttattctctttctttgataagaaactaaaaactttcctatcattcagtaggcttatgcaaagttatactatcataggatttt

SEQ ID NO: 281084 - DNA, 3740 bp, Homo sapiens
ctctccctccctccttgcgggccctcctccccttccctcccctccgcccccttccccgtaggcagcccgcccgccagtccgcccgcaccgcctccttcccagcccctagcgctccggctgggtctctcccccgccccccaggctcccccggtcgctctcctccggcggtcgcccgcgctcggtggatgtggctggcagctgccgccccctccctcgctcgccgcctgctcttcctcggccctccgcctcctcccctcctccttctcgtcttcagccgctcctctcgccgccgcctccacagcctgggcctcgccgcgatgccggagaagaggcccttcgagcggctgcctgccgatgtctcccccatcaactacagcctttgcctcaagcccgacttgctggacttcaccttcgagggcaagctggaggccgccgcccaggtgaggcaggcgactaatcagattgtgatgaattgtgctgatattgatattattacagcttcatatgcaccagaaggagatgaagaaatacatgctacaggatttaactatcagaatgaagatgaaaaagtcaccttgtctttccctagtactctgcaaacaggtacgggaaccttaaagatagattttgttggagagctgaatgacaaaatgaaaggtttctatagaagtaaatatactaccccttctggagaggtgcgctatgctgctgtaacacagtttgaggctactgatgcccgaagggcttttccttgctgggatgagcctgctatcaaagcaacttttgatatctcattggttgttcctaaagacagagtagctttatcaaacatgaatgtaattgaccggaaaccataccctgatgatgaaaatttagtggaagtgaagtttgcccgcacacctgttatgtctacatatctggtggcatttgttgtgggtgaatatgactttgtagaaacaaggtcaaaagatggtgtgtgtgtccgtgtttacactcctgttggcaaagcagagcaaggaaaatttgcgttagaggttgctgctaaaaccttgcctttttataaggactacttcaatgttccttatcctctacctaaaattgatctcattgctattgcagactttgcagctggtgccatggagaactggggccttgttacttatagggagactgcattgcttattgatccaaaaaattcctgttcttcatcccgccagtgggttgctctggttgtgggacatgaactcgcccatcaatggtttggaaatcttgttactatggaatggtggactcatctttggttaaatgaaggttttgcatcctggattgaatatctgtgtgtagaccactgcttcccagagtatgatatttggactcagtttgtttctgctgattacacccgtgcccaggagcttgacgccttagataacagccatcctattgaagtcagtgtgggccatccatctgaggttgatgagatatttgatgctatatcatatagcaaaggtgcatctgtcatccgaatgctgcatgactacattggggataaggactttaagaaaggaatgaacatgtatttaaccaagttccaacaaaagaatgctgccacagaggatctctgggaaagtttagaaaatgctagtggtaaacctatagcagctgtgatgaatacctggaccaaacaaatgggatttcccctcatttatgtggaagctgaacaggtagaagatgacagattattgaggttgtcccaaaagaagttctgtgctggtgggtcatatgttggtgaagattgtccccagtggatggtccctatcacaatctctactagtgaagaccccaaccaggccaaactaaaaattctaatggacaagccagagatgaatgtggttttgaaaaatgtcaaaccagaccaatgggtgaagttaaacttaggaacagttgggttttatcggacccagtacagctctgccatgctggaaagtttattaccaggcattcgtgacctttctctgccccctgtggatcgacttggattacagaatgacctcttctccttggctcgagctggaatcattagcactgtagaggttctaaaagtcatggaggcttttgtgaatgagcccaattatactgtatggagcgacctgagctgtaacctggggattctctcaactctcttgtcccacacagacttctatgaggaaatccaggagtttgtgaaagatgtcttttcacctataggggagagactgggctgggaccccaaacctggagaaggtcatctcgatgcactcctgaggggcttggttctgggaaaactaggaaaagcaggacataaggcaacgttagaagaagcccgtcgtcggtttaaggaccacgtggaaggaaaacagattctctccgctgatctgaggagtcctgtctatctgactgttttgaagcatggtgatggcactactttagatattatgttaaaacttcataaacaagcagatatgcaagaagagaaaaaccgaatcgaaagagtccttggcgctactcttttgcctgacctgattcaaaaagtcctcacgtttgcactttcagaagaggtacgtccacaggacactgtatcggtaattggtggagtagctggaggcagcaagcatggtaggaaagctgcttggaaattcataaaggacaactgggaagaactttataaccgataccagggaggattcttaatatccagactaataaagctatcagttgagggatttgcagttgataaaatggctggagaggttaaggctttcttcgagagtcacccagctccttcagctgagcgtaccatccagcagtgttgtgaaaatattctgctgaatgctgcctggctaaagcgagatgctgagagcatccaccagtacctccttcagcggaaggcctcaccacccacagtgtgaatcctgaggtgccgccattggcggttctgctgcttcgctgcagggataaggtggagctaccgaacagctgattcatatgccaagaatttggagtcttctttcaaaccagtgggggttggacaatgaatgtagttaactggttcctgctcacactccagaattaaattctattgaaaaaggaaaatcagcaattcagcaaaaaataaataaaaaataaaaatgtaaatatgatagtaataaaatagagcataacgaaactgtgaaactttctgaagccttgtcagtggttaaaagtatttaacactctactgttaatgacagatgttctgtttttataacctaccaaaaaaaaataacaccaaaaggcaaaaaaaaaaaactatacccggtcgtgaatttttaccctccctttgaagtttccaccccaaaacccaaattcccgtggggtcctttcttagcgactgacagcacactaattacggggaacaccattgtttcattagaccacatttaaatgtacgaaaaacaaagtgaattattaactatttaaattggttgtcctttttaacaagagtggatttatataaggaaccgcgtggaaaatttaactataggcgtgtaccgaacaaatgtgggacgataaaacaggggatttttaggcagagggccttcatgaaagggaggtataatctctgctaaacaaatgtggtcgtaaggatggctgtgaaaaagcccatgttttgtgaacctctttcagaaacagtttttaaacatgggattacccgggatacagta

SEQ ID NO: 281085 - DNA, 3186 bp, Homo sapiens
ctctccctccctccttgcgggccctcctccccttccctcccctccgcccccttccccgtaggcagcccgcccgccagtccgcccgcaccgcctccttcccagcccctagcgctccggctgggtctctcccccgccccccaggctcccccggtcgctctcctccggcggtcgcccgcgctcggtggatgtggctggcagctgccgccccctccctcgctcgccgcctgctcttcctcggccctccgcctcctcccctcctccttctcgtcttcagccgctcctctcgccgccgcctccacagcctgggcctcgccgcgatgccggagaagaggcccttcgagcggctgcctgccgatgtctcccccatcaactacagcctttgcctcaagcccgacttgctggacttcaccttcgagggcaagctggaggccgccgcccaggtgaggcaggcgactaatcagattgtgatgaattgtgctgatattgatattattacagcttcatatgcaccagaaggagatgaagaaatacatgctacaggatttaactatcagaatgaagatgaaaaagtcaccttgtctttccctagtactctgcaaacaggtacgggaaccttaaagatagattttgttggagagctgaatgacaaaatgaaaggtttctatagaagtaaatatactaccccttctggagaggtgcgctatgctgctgtaacacagtttgaggctactgatgcccgaagggcttttccttgctgggatgagcctgctatcaaagcaacttttgatatctcattggttgttcctaaagacagagtagctttatcaaacatgaatgtaattgaccggaaaccataccctgatgatgaaaatttagtggaagtgaagtttgcccgcacacctgttatgtctacatatctggtggcatttgttgtgggtgaatatgactttgtagaaacaaggtcaaaagatggtgtgtgtgtccgtgtttacactcctgttggcaaagcagagcaaggaaaatttgcgttagaggttgctgctaaaaccttgcctttttataaggactacttcaatgttccttatcctctacctaaaattgatctcattgctattgcagactttgcagctggtgccatggagaactggggccttgttacttatagggagactgcattgcttattgatccaaaaaattcctgttcttcatcccgccagtgggttgctctggttgtgggacatgaactcgcccatcaatggtttggaaatcttgttactatggaatggtggactcatctttggttaaatgaaggttttgcatcctggattgaatatctgtgtgtagaccactgcttcccagagtatgatatttggactcagtttgtttctgctgattacacccgtgcccaggagcttgacgccttagataacagccatcctattgaagtcagtgtgggccatccatctgaggttgatgagatatttgatgctatatcatatagcaaaggtgcatctgtcatccgaatgctgcatgactacattggggataaggactttaagaaaggaatgaacatgtatttaaccaagttccaacaaaagaatgctgccacagaggatctctgggaaagtttagaaaatgctagtggtaaacctatagcagctgtgatgaatacctggaccaaacaaatgggatttcccctcatttatgtggaagctgaacaggtagaagatgacagattattgaggttgtcccaaaagaagttctgtgctggtgggtcatatgttggtgaagattgtccccagtggatggtccctatcacaatctctactagtgaagaccccaaccaggccaaactaaaaattctaatggacaagccagagatgaatgtggttttgaaaaatgtcaaaccagaccaatgggtgaagttaaacttaggaacagttgggttttatcggacccagtacagctctgccatgctggaaagtttattaccaggcattcgtgacctttctctgccccctgtggatcgacttggattacagaatgacctcttctccttggctcgagctggaatcattagcactgtagaggttctaaaagtcatggaggcttttgtgaatgagcccaattatactgtatggagcgacctgagctgtaacctggggattctctcaactctcttgtcccacacagacttctatgaggaaatccaggagtttgtgaaagatgtcttttcacctataggggagagactgggctgggaccccaaacctggagaaggtcatctcgatgcactcctgaggggcttggttctgggaaaactaggaaaagcaggacataaggcaacgttagaagaagcccgtcgtcggtttaaggaccacgtggaaggaaaacagattctctccgctgatctgaggagtcctgtctatctgactgttttgaagcatggtgatggcactactttagatattatgttaaaacttcataaacaagcagatatgcaagaagagaaaaaccgaatcgaaagagtccttggcgctactcttttgcctgacctgattcaaaaagtcctcacgtttgcactttcagaagaggtacgtccacaggacactgtatcggtaattggtggagtagctggaggcagcaagcatggtaggaaagctgcttggaaattcataaaggacaactgggaagaactttataaccgataccagggaggattcttaatatccagactaataaagctatcagttgagggatttgcagttgataaaatggctggagaggttaaggctttcttcgagagtcacccagctccttcagctgagcgtaccatccagcagtgttgtgaaaatattctgctgaatgctgcctggctaaagcgagatgctgagagcatccaccagtacctccttcagcggaaggcctcaccacccacagtgtgaatcctgaggtgccgccattggcggttctgctgcttcgctgcagggataaggtggagctaccgaacagctgattcatatgccaagaatttggagtcttctttcaaaccagtgggggttggacaatgaatgtagttaactggttcctgctcacactccagaattaaattctattgaaaaaggaaaaagtttccttaaatagttactggctttatttaaggacttctccatctcccatcacaca

SEQ ID NO: 281086 - DNA, 1575 bp, Homo sapiens
ctctccctccctccttgcgggccctcctccccttccctcccctccgcccccttccccgtaggcagcccgcccgccagtccgcccgcaccgcctccttcccagcccctagcgctccggctgggtctctcccccgccccccaggctcccccggtcgctctcctccggcggtcgcccgcgctcggtggatgtggctggcagctgccgccccctccctcgctcgccgcctgctcttcctcggccctccgcctcctcccctcctccttctcgtcttcagccgctcctctcgccgccgcctccacagcctgggcctcgccgcgatgccggagaagaggcccttcgagcggctgcctgccgatgtctcccccatcaactacagcctttgcctcaagcccgacttgctggacttcaccttcgagggcaagctggaggccgccgcccaggtgaggcaggcgactaatcagattgtgatgaattgtgctgatattgatattattacagcttcatatgcaccagaaggagatgaagaaatacatgctacaggatttaactatcagaatgaagatgaaaaagtcaccttgtctttccctagtactctgcaaacaggtacgggaaccttaaagatagattttgttggagagctgaatgacaaaatgaaaggtttctatagaagtaaatatactaccccttctggagaggtgcgctatgctgctgtaacacagtttgaggctactgatgcccgaagggcttttccttgctgggatgagcctgctatcaaagcaacttttgatatctcattggttgttcctaaagacagagtagctttatcaaacatgaatgtaattgaccggaaaccataccctgatgatgaaaatttagtggaagtgaagtttgcccgcacacctgttatgtctacatatctggtggcatttgttgtgggtgaatatgactttgtagaaacaaggtcaaaagatggtgtgtgtgtccgtgtttacactcctgttggcaaagcagagcaaggaaaatttgcgttagaggttgctgctaaaaccttgcctttttataaggactacttcaatgttccttatcctctacctaaaattgatctcattgctattgcagactttgcagctggtgccatggagaactggggccttgttacttatagggagactgcattgcttattgatccaaaaaattcctgttcttcatcccgccagtgggttgctctggttgtgggacatgaactcgcccatcaatggtttggaaatcttgttactatggaatggtggactcatctttggttaaatgaaggttttgcatcctggattgaatatctgtgtgtagaccactgcttcccagagtatgatatttggactcagtttgtttctgctgattacacccgtgcccaggagcttgacgccttagataacagccatcctattgaagtcagtgtgggccatcaatctgtggagactcatatgtgatggttttggtctcagtttggacaatgggacttccttggtggagatttctgtcctttgtgaggcatcagaaattgtaccatctctgttttac

SEQ ID NO: 281087 - DNA, 4859 bp, Homo sapiens
gatcttgggtgacagggcaccgagggaaggaggacgcgagggcagccaggccctagggagcagggagagtggctcgggctcagtcgcgtggccccaggaagaagaaattgtcgagacgaataacatgaggtcatatagaatcccacttttggtgatttcaagtcaagaaagtaaaagtaaaccattgctatctttcaccttaaatatcctgtgttttattgctcagaacatccagtttttctaatactcatgatgtcagaagggaaacctcctgacaaaaaaaggcctcgtagaagcttatcaatcagcaagaataagaaaaaagcatctaattctattatttcgtgttttaacaatgcaccacctgctaaacttgcctgccccgtttgcagtaaaatggtgcctagatatgacttaaaccggcaccttgatgaaatgtgtgctaacaatgacttcgttcaagtggatccagggcaggttggcttaataaattcaaatgtgtctatggtagatttaaccagtgttaccttagaagatgtaacacctaagaagtcaccaccaccaaagacaaatttaacccctggccaaagtgattcagcaaaaagggaagtaaagcagaagatcagtccctactttaaaagtaatgatgtggtgtgcaaaaatcaagatgagctgagaaatcgtagtgtgaaagtcatttgtttgggaagcctagcatctaaattgtccagaaaatacgtaaaggctaaaaaatcaatagataaggatgaagaatttgccggttctagtccacagagttccaaatccacagttgttaagagcctgattgataactcttcagaaattgaggacgaggatcaaattttggagaacagttctcaaaaagaaaacgtgtttaaatgtgattctctaaaggaagagtgcattcctgaacatatggtaagaggaagtaaaataatggaagccgaaagccaaaaggctacccgggaatgtgagaaatcagccctcacccctggattctcagataatgcgatcatgttattctcaccagatttcactcttaggaatacattaaagtctacttcagaagacagtcttgtaaagcaagagtgtatcaaagaagtggttgaaaaacgtgaggcatgtcattgtgaagaagtaaaaatgactgttgcttcagaagctaaaatacagctgtcagattcagaggcaaaatctcatagttctgcagatgatgcttctgcatggagtaacatccaagaggctcctctgcaggatgacagttgcttaaacaatgatatccctcacagcattcctttggagcaggggtcaagctgcaatggtcctggtcaaacaaccggtcatccttactaccttcggagtttccttgtggtgctgaaaaccgtacttgagaatgaagatgatatgttgctctttgatgagcaggagaagggaattgtaactaaattttatcagttatcagctactggtcagaagttatatgtaaggctctttcaacgtaaattaagctggattaagatgaccaaattagagtatgaagagattgccttagacttaacacctgtgattgaagaattgacgaatgcaggctttctacagacagaatctgagttgcaagaactctctgaagtgcttgaactcctttctgctcctgaactaaaatccctagccaagaccttccacttggtgaatcccaatggacagaaacagcagctggtggacgcctttctcaaattggccaaacagcgttcagtctgcacttggggcaagaataagcctggaattggtgcagtgattttaaaaagagccaaagccttggctggacagtcagtacgaatctgtaaaggccccagggctgtgttttcccgcatcttgctactgttttcgttgaccgactcaatggaagatgaagacgccgcttgtggaggtcagggacagctttcaacagtcctgttggtcaacctcggccgaatggagtttcctagttacaccatcaatcggaaaacccacatcttccaagacagagatgatcttatcagatatgcagcagccacgcacatgctgagtgacatttcttccgcaatggccaatgggaactgggaagaagctaaggagctcgctcagtgtgcaaaaagggattggaacagactgaaaaaccacccttctctgagatgccacgaagatttaccactcttcctgcggtgtttcactgttgggtggatttatacaaggattttgtctcggtttgtggaaatactgcagagacttcacatgtatgaggaagccgtcagagaacttgaaagccttttgtctcagagaatttattgtcctgacagcagaggccgatggtgggatcgactggcccttaatttacaccagcacttgaagcgcctggaaccgactatcaagtgcatcacagaggggctggcggatccggaagtcagaacgggacaccgcctttcactgtatcagcgagccgtgcgcctgcgagagtctccgagctgtaaaaagttcaagcacctcttccagcagctcccagaaatggctgtgcaagatgtgaaacacgtgaccatcacaggcaggctgtgcccacagcgtgggatgtgcaagtctgtgtttgtgatggaggccggggaggccgctgaccccaccacggtcctgtgctctgtggaggagctggcactggcccattacagacgcagcggttttgaccaggggattcatggcgaagggtccaccttcagcaccctgtatggcctcctcctgtgggacatcatcttcatggatgggattccggatgtcttcagaaacgcctgtcaggcattccccctggacttgtgcacagacagcttcttcacaagcagacgcccagcccttgaggccaggctgcagctgattcatgatgcccccgaggagagcctgcgggcctgggtggcagccacgtggcatgagcaggaaggcagagtggcttcccttgtcagctgggatcgcttcacgtctcttcagcaagctcaggatcttgtctcctgcctggggggccctgtgctcagtggtgtgtgcaggcacctggctgctgactttcgacactgtcgagggggcctccccgacctggtggtgtggaactcccagagccgtcactttaagctggtggaagttaaaggccccaatgatcgtctttcacataagcagatgatctggctggctgaactgcagaagctgggggctgaagtagaagtctgccatgtggttgcagttggagctaagagccaaagccttagctaaaagattccctacaggagaaaatggaaatgaggaggagagaaactccggtgtccccgaggtgtcggtgtggtgagggccgctggcgttgaagtacatcctgctctggcccagctccccatagcaggcctccagggggccactgcgctgttgccgcagcatcctgctcagtacgtcgacttcatcagccaggagggagagcttgtgaaaggctgtgatggagccacccaggctgatctgggcctcgggaacccagcggaagtagcacagtttccacagttttatgtgtgttccagagacacgtggcagaataacaccgtgcaggttggcgggtttggaaaaccattctctaaaatactgctccgtatcactgttctggctgtcggtttgctgagctggatctggctttggttttaatatcaatgaatttctccttggaagtaattcttggtcactgatgattccattctttaaggcagacggcattcctcttagtgtggagctgtagcttttctatacagaagagattttattatgttccggggattccctttttagaaagattgaaggatgcaatggcaaatataaactcaatactatgaaaaattaatggaatttcagcctcaaagaacattttcctcccttcctttgtgtccttattctaatcctcctcccctggaattacacttttttatgtgttgactctacctaggctgttactatcagcctgaatgggggcgggatgagagtacctcctatccactaatttgcttaaggataagttctaagacgggctagaaaaaacactagacctggtcgattctatcaagaacaatggcaaactgaacagaggcagtcaggaggccaaatgtctgattctttgttctgtacctttcagtagtctgcaaattttctaccaaaaaaaaatcccaagaatttatttgggaattattaaaaaggcaaacaatgaatgttattaggacaagaatatagcagtcaggaggccatgactacatcacagccaggcggcattccctgccacagtggcggcttgaatcatcaagaaatggataaatggggctttagtaaatcaggcttgcaggctcaaagctgcaatctgcccactctcaggtactgagactttgtgggcctcagacaccaggaagaaagttgggatacagtcatttgagttaaaaagggaatgacccctcagaaacccgcattagcagtgttactcttggaagtgcctttacttttaacgctctctgttctgaaaaagaggtgtttggttacgtgtgagccaacatcacgttttgttagctgtgatttacctttgtccgtttaaaagacttcacggagccattctgtatacaaggtgtgctctttccaatgtagaaggggttatggaaaagggtgcgatcctttgctgtaaactggagagaccagtcccaaacagaggggaattttaagcccttctcatcacccaattggatgtttttgcttatagcaaattcctgcaaaataaataaataaatatttgcaaaactaaaaaaaaaaaa

SEQ ID NO: 281088 - DNA, 1899 bp, Homo sapiens
  misc_feature (425)..(425): n is a, c, g, or t
  misc_feature (464)..(464): n is a, c, g, or t
  misc_feature (543)..(543): n is a, c, g, or t
atagaaagacaaccacaagataggagtttacaaagcccaggttctttctgatgagtgttgagattcatctacataatatctttattacttacagggaagggtgatgttattggggaagacgtgcaaatgccagtgaagacagagagatacagtaggcctgaaatggttagaaatagaagaatagaatgcacattcaaggccccgagagacgtggaaactggacactcgctggaggaggaagcaggctgggacgtgggagcgctgaaatgctttcagttgagccatgagcctgaaaaacacacgattcctttcccagagtagaaactatttttccctgattaaaatcgatgccgtgaaactgggctgaactctggctgccaggctttatgccacagggaattttgtgtcagagcgatctcaacctnttctgggaggtgatttctgaagtactgcaccaaaaatgntttcacttataacacaaatgcacagcatggaccacttaggagttaaggaacgaaccaggcacggtagcttacacttgtnatcccagcacttggggaggctgagacaggaggatcacttgaactctgaagacggaggtgggaggatctcttgaccccaggaggtcaaggctgcagtgagccaagattgtgccactgcactccagtctgggtgacagagtgagaccctgtctcaaaacaaaacaaacaaaggagttcagaaatgatctggcctttatattcctgcctgatcgtcagtgtattcaccaggacggaacactgactggaaatcaggtcctagctccactcctggctgggaaagagcatgaagtgttctaggaagaaaagtcctcctggaagacttggcaacagccaggagtcctgagtgaaccgctgtccttttgaatccctgagacgggctgcagggatgaggggctagaactgacaggaagacaggacagagagcagcacagcctcagaagtgcaggacagaggtgacccaggcaggcatgacgggctgtggctgcctgccctctgctctcacagcacccctgatcccactcactgtggtcccacgcagatgggttggggcctgtaaatgtcaggtgggaccagccagaggagctttgctgccagtactggcatgtcaggatgggggtctggtggtcagcacctcctctggccagtggtcttgtggggagaggcatccatgtggcctcctcctctgtcgggagggctgatgtgcagagaagtacggacttggagggcagctggatgagctggggcttgctcagggacacaggtctgtgtgttgtgccaaggctgaccccctcatcccacaccagaccctgcctctgactctgtgacctcagcacctgacttctgtctctcaggtcatctcccagtcagtaaaacatttgtgtgacgtgaggaggggcactgaagtgggtgatctttaaggccagatgtctctgtaaaagccttgactatcggaagcactgggctagggcagtgtagtacccagggggatgaggtgcatcagagcagcacctgctgaggccaagaacggaggtggctgctgccggcctccgggaggtccccttagggaagcatttcttcaggggtggcccagggacctccggcatcagggcctgcatggggattctgtgccagcccagccctgctaagtcccagccttgggaacctgaggagggtatctgcctatttttcttttaaacatgtttcttaggttattcactaaagtttgagaaccactgctttgtggctttgaaatgttcatttgaatttttctatgattactaagatttttgcccttaaggctctgtatataaacaacatactgtataaaataaactgggaatggcgtgaaaacagcatt

SEQ ID NO: 281089 - DNA, 1235 bp, Homo sapiens
  misc_feature (425)..(425): n is a, c, g, or t
  misc_feature (464)..(464): n is a, c, g, or t
  misc_feature (543)..(543): n is a, c, g, or t
atagaaagacaaccacaagataggagtttacaaagcccaggttctttctgatgagtgttgagattcatctacataatatctttattacttacagggaagggtgatgttattggggaagacgtgcaaatgccagtgaagacagagagatacagtaggcctgaaatggttagaaatagaagaatagaatgcacattcaaggccccgagagacgtggaaactggacactcgctggaggaggaagcaggctgggacgtgggagcgctgaaatgctttcagttgagccatgagcctgaaaaacacacgattcctttcccagagtagaaactatttttccctgattaaaatcgatgccgtgaaactgggctgaactctggctgccaggctttatgccacagggaattttgtgtcagagcgatctcaacctnttctgggaggtgatttctgaagtactgcaccaaaaatgntttcacttataacacaaatgcacagcatggaccacttaggagttaaggaacgaaccaggcacggtagcttacacttgtnatcccagcacttggggaggctgagacaggaggatcacttgaactctgaagacggaggtgggaggatctcttgaccccaggaggtcaaggctgcagtgagccaagattgtgccactgcactccagtctgggtgacagagtgagaccctgtctcaaaacaaaacaaacaaaggagttcagaaatgatctggcctttatattcctgcctgatcgtcagtgtattcaccaggacggaacactgactggaaatcaggtcctagctccactcctggctgggaaagagcatgaagtgttctaggaagaaaagtcctcctggaagacttggcaacagccaggagtcctgagtgaaccgctgtccttttgaatccctgagacgggctgcagggatgaggggctagaactgttctgaaaaagaggtgtttggttacgtgtgagccaacatcacgttttgttagctgtgatttacctttgtccgtttaaaagacttcacggagccattctgtatacaaggtgtgctctttccaatgtagaaggggttatggaaaagggtgcgatcctttgctgtaaactggagagaccagtcccaaacagaggggaattttaagcccttctcatcacccaattggatgtttttgcttatagcaaattcctgcaaaataaataaataaatatttgcaaaactaaaaaaaaaaaa

SEQ ID NO: 281090 - DNA, 4890 bp, Homo sapiens
gatcttgggtgacagggcaccgagggaaggaggacgcgagggcagccaggccctagggagcagggagagtggctcgggctcagtcgcgtggccccaggaagaagaaattgtcgagacgaataacatgaggtcatatagaatcccacttttggtgatttcaagtcaagaaagtaaaagtaaaccattgctatctttcaccttaaatatcctgtgttttattgctcagaacatccagtttttctaatactcatgatgtcagaagggaaacctcctgacaaaaaaaggcctcgtagaagcttatcaatcagcaagaataagaaaaaagcatctaattctattatttcgtgttttaacaatgcaccacctgctaaacttgcctgccccgtttgcagtaaaatggtgcctagatatgacttaaaccggcaccttgatgaaatgtgtgctaacaatgacttcgttcaagtggatccagggcaggttggcttaataaattcaaatgtgtctatggtagatttaaccagtgttaccttagaagatgtaacacctaagaagtcaccaccaccaaagacaaatttaacccctggccaaagtgattcagcaaaaagggaagtaaagcagaagatcagtccctactttaaaagtaatgatgtggtgtgcaaaaatcaagatgagctgagaaatcgtagtgtgaaagtcatttgtttgggaagcctagcatctaaattgtccagaaaatacgtaaaggctaaaaaatcaatagataaggatgaagaatttgccggttctagtccacagagttccaaatccacagttgttaagagcctgattgataactcttcagaaattgaggacgaggatcaaattttggagaacagttctcaaaaagaaaacgtgtttaaatgtgattctctaaaggaagagtgcattcctgaacatatggtaagaggaagtaaaataatggaagccgaaagccaaaaggctacccgggaatgtgagaaatcagccctcacccctggattctcagataatgcgatcatgttattctcaccagatttcactcttaggaatacattaaagtctacttcagaagacagtcttgtaaagcaagagtgtatcaaagaagtggttgaaaaacgtgaggcatgtcattgtgaagaagtaaaaatgactgttgcttcagaagctaaaatacagctgtcagattcagaggcaaaatctcatagttctgcagatgatgcttctgcatggagtaacatccaagaggctcctctgcaggatgacagttgcttaaacaatgatatccctcacagcattcctttggagcaggggtcaagctgcaatggtcctggtcaaacaaccggtcatccttactaccttcggagtttccttgtggtgctgaaaaccgtacttgagaatgaagatgatatgttgctctttgatgagcaggagaagggaattgtaactaaattttatcagttatcagctactggtcagaagttatatgtaaggctctttcaacgtaaattaagctggattaagatgaccaaattagagtatgaagagattgccttagacttaacacctgtgattgaagaattgacgaatgcaggctttctacagacagaatctgagttgcaagaactctctgaagtgcttgaactcctttctgctcctgaactaaaatccctagccaagaccttccacttggtgaatcccaatggacagaaacagcagctggtggacgcctttctcaaattggccaaacagcgttcagtctgcacttggggcaagaataagcctggaattggtgcagtgattttaaaaagagccaaagccttggctggacagtcagtacgaatctgtaaaggccccagggctgtgttttcccgcatcttgctactgttttcgttgaccgactcaatggaagatgaagacgccgcttgtggaggtcagggacagctttcaacagtcctgttggtcaacctcggccgaatggagtttcctagttacaccatcaatcggaaaacccacatcttccaagacagagatgatcttatcagatatgcagcagccacgcacatgctgagtgacatttcttccgcaatggccaatgggaactgggaagaagctaaggagctcgctcagtgtgcaaaaagggattggaacagactgaaaaaccacccttctctgagatgccacgaagatttaccactcttcctgcggtgtttcactgttgggtggatttatacaaggattttgtctcggtttgtggaaatactgcagagacttcacatgtatgaggaagccgtcagagaacttgaaagccttttgtctcagagaatttattgtcctgacagcagaggccgatggtgggatcgactggcccttaatttacaccagcacttgaagcgcctggaaccggagcctgatgtgtgaccatgctctctgccagactatcaagtgcatcacagaggggctggcggatccggaagtcagaacgggacaccgcctttcactgtatcagcgagccgtgcgcctgcgagagtctccgagctgtaaaaagttcaagcacctcttccagcagctcccagaaatggctgtgcaagatgtgaaacacgtgaccatcacaggcaggctgtgcccacagcgtgggatgtgcaagtctgtgtttgtgatggaggccggggaggccgctgaccccaccacggtcctgtgctctgtggaggagctggcactggcccattacagacgcagcggttttgaccaggggattcatggcgaagggtccaccttcagcaccctgtatggcctcctcctgtgggacatcatcttcatggatgggattccggatgtcttcagaaacgcctgtcaggcattccccctggacttgtgcacagacagcttcttcacaagcagacgcccagcccttgaggccaggctgcagctgattcatgatgcccccgaggagagcctgcgggcctgggtggcagccacgtggcatgagcaggaaggcagagtggcttcccttgtcagctgggatcgcttcacgtctcttcagcaagctcaggatcttgtctcctgcctggggggccctgtgctcagtggtgtgtgcaggcacctggctgctgactttcgacactgtcgagggggcctccccgacctggtggtgtggaactcccagagccgtcactttaagctggtggaagttaaaggccccaatgatcgtctttcacataagcagatgatctggctggctgaactgcagaagctgggggctgaagtagaagtctgccatgtggttgcagttggagctaagagccaaagccttagctaaaagattccctacaggagaaaatggaaatgaggaggagagaaactccggtgtccccgaggtgtcggtgtggtgagggccgctggcgttgaagtacatcctgctctggcccagctccccatagcaggcctccagggggccactgcgctgttgccgcagcatcctgctcagtacgtcgacttcatcagccaggagggagagcttgtgaaaggctgtgatggagccacccaggctgatctgggcctcgggaacccagcggaagtagcacagtttccacagttttatgtgtgttccagagacacgtggcagaataacaccgtgcaggttggcgggtttggaaaaccattctctaaaatactgctccgtatcactgttctggctgtcggtttgctgagctggatctggctttggttttaatatcaatgaatttctccttggaagtaattcttggtcactgatgattccattctttaaggcagacggcattcctcttagtgtggagctgtagcttttctatacagaagagattttattatgttccggggattccctttttagaaagattgaaggatgcaatggcaaatataaactcaatactatgaaaaattaatggaatttcagcctcaaagaacattttcctcccttcctttgtgtccttattctaatcctcctcccctggaattacacttttttatgtgttgactctacctaggctgttactatcagcctgaatgggggcgggatgagagtacctcctatccactaatttgcttaaggataagttctaagacgggctagaaaaaacactagacctggtcgattctatcaagaacaatggcaaactgaacagaggcagtcaggaggccaaatgtctgattctttgttctgtacctttcagtagtctgcaaattttctaccaaaaaaaaatcccaagaatttatttgggaattattaaaaaggcaaacaatgaatgttattaggacaagaatatagcagtcaggaggccatgactacatcacagccaggcggcattccctgccacagtggcggcttgaatcatcaagaaatggataaatggggctttagtaaatcaggcttgcaggctcaaagctgcaatctgcccactctcaggtactgagactttgtgggcctcagacaccaggaagaaagttgggatacagtcatttgagttaaaaagggaatgacccctcagaaacccgcattagcagtgttactcttggaagtgcctttacttttaacgctctctgttctgaaaaagaggtgtttggttacgtgtgagccaacatcacgttttgttagctgtgatttacctttgtccgtttaaaagacttcacggagccattctgtatacaaggtgtgctctttccaatgtagaaggggttatggaaaagggtgcgatcctttgctgtaaactggagagaccagtcccaaacagaggggaattttaagcccttctcatcacccaattggatgtttttgcttatagcaaattcctgcaaaataaataaataaatatttgcaaaactaaaaaaaaaaaa

SEQ ID NO: 281091 - DNA, 3506 bp, Homo sapiens
aggaaatggaaactttcaagctgaaattggtacattaaaaatactagtctatgcctgaagtccttggcagccaggggtggctccaagccagcagtgcagctactggtcagaagttatatgtaaggctctttcaacgtaaattaagctggattaagatgaccaaattagagtatgaagagattgccttagacttaacacctgtgattgaagaattgacgaatgcaggctttctacagacagaatctgagttgcaagaactctctgaagtgcttgaactcctttctgctcctgaactaaaatccctagccaagaccttccacttggtgaatcccaatggacagaaacagcagctggtggacgcctttctcaaattggccaaacagcgttcagtctgcacttggggcaagaataagcctggaattggtgcagtgattttaaaaagagccaaagccttggctggacagtcagtacgaatctgtaaaggccccagggctgtgttttcccgcatcttgctactgttttcgttgaccgactcaatggaagatgaagacgccgcttgtggaggtcagggacagctttcaacagtcctgttggtcaacctcggccgaatggagtttcctagttacaccatcaatcggaaaacccacatcttccaagacagagatgatcttatcagatatgcagcagccacgcacatgctgagtgacatttcttccgcaatggccaatgggaactgggaagaagctaaggagctcgctcagtgtgcaaaaagggattggaacagactgaaaaaccacccttctctgagatgccacgaagatttaccactcttcctgcggtgtttcactgttgggtggatttatacaaggattttgtctcggtttgtggaaatactgcagagacttcacatgtatgaggaagccgtcagagaacttgaaagccttttgtctcagagaatttattgtcctgacagcagaggccgatggtgggatcgactggcccttaatttacaccagcacttgaagcgcctggaaccggagcctgatgtgtgaccatgctctctgccagactatcaagtgcatcacagaggggctggcggatccggaagtcagaacgggacaccgcctttcactgtatcagcgagccgtgcgcctgcgagagtctccgagctgtaaaaagttcaagcacctcttccagcagctcccagaaatggctgtgcaagatgtgaaacacgtgaccatcacaggcaggctgtgcccacagcgtgggatgtgcaagtctgtgtttgtgatggaggccggggaggccgctgaccccaccacggtcctgtgctctgtggaggagctggcactggcccattacagacgcagcggttttgaccaggggattcatggcgaagggtccaccttcagcaccctgtatggcctcctcctgtgggacatcatcttcatggatgggattccggatgtcttcagaaacgcctgtcaggcattccccctggacttgtgcacagacagcttcttcacaagcagacgcccagcccttgaggccaggctgcagctgattcatgatgcccccgaggagagcctgcgggcctgggtggcagccacgtggcatgagcaggaaggcagagtggcttcccttgtcagctgggatcgcttcacgtctcttcagcaagctcaggatcttgtctcctgcctggggggccctgtgctcagtggtgtgtgcaggcacctggctgctgactttcgacactgtcgagggggcctccccgacctggtggtgtggaactcccagagccgtcactttaagctggtggaagttaaaggccccaatgatcgtctttcacataagcagatgatctggctggctgaactgcagaagctgggggctgaagtagaagtctgccatgtggttgcagttggagctaagagccaaagccttagctaaaagattccctacaggagaaaatggaaatgaggaggagagaaactccggtgtccccgaggtgtcggtgtggtgagggccgctggcgttgaagtacatcctgctctggcccagctccccatagcaggcctccagggggccactgcgctgttgccgcagcatcctgctcagtacgtcgacttcatcagccaggagggagagcttgtgaaaggctgtgatggagccacccaggctgatctgggcctcgggaacccagcggaagtagcacagtttccacagttttatgtgtgttccagagacacgtggcagaataacaccgtgcaggttggcgggtttggaaaaccattctctaaaatactgctccgtatcactgttctggctgtcggtttgctgagctggatctggctttggttttaatatcaatgaatttctccttggaagtaattcttggtcactgatgattccattctttaaggcagacggcattcctcttagtgtggagctgtagcttttctatacagaagagattttattatgttccggggattccctttttagaaagattgaaggatgcaatggcaaatataaactcaatactatgaaaaattaatggaatttcagcctcaaagaacattttcctcccttcctttgtgtccttattctaatcctcctcccctggaattacacttttttatgtgttgactctacctaggctgttactatcagcctgaatgggggcgggatgagagtacctcctatccactaatttgcttaaggataagttctaagacgggctagaaaaaacactagacctggtcgattctatcaagaacaatggcaaactgaacagaggcagtcaggaggccaaatgtctgattctttgttctgtacctttcagtagtctgcaaattttctaccaaaaaaaaatcccaagaatttatttgggaattattaaaaaggcaaacaatgaatgttattaggacaagaatatagcagtcaggaggccatgactacatcacagccaggcggcattccctgccacagtggcggcttgaatcatcaagaaatggataaatggggctttagtaaatcaggcttgcaggctcaaagctgcaatctgcccactctcaggtactgagactttgtgggcctcagacaccaggaagaaagttgggatacagtcatttgagttaaaaagggaatgacccctcagaaacccgcattagcagtgttactcttggaagtgcctttacttttaacgctctctgttctgaaaaagaggtgtttggttacgtgtgagccaacatcacgttttgttagctgtgatttacctttgtccgtttaaaagacttcacggagccattctgtatacaaggtgtgctctttccaatgtagaaggggttatggaaaagggtgcgatcctttgctgtaaactggagagaccagtcccaaacagaggggaattttaagcccttctcatcacccaattggatgtttttgcttatagcaaattcctgcaaaataaataaataaatatttgcaaaactaaaaaaaaaaaa

SEQ ID NO: 281092 - DNA, 2165 bp, Homo sapiens
gatcttgggtgacagggcaccgagggaaggaggacgcgagggcagccaggccctagggagcagggagagtggctcgggctcagtcgcgtggccccaggaagaagaaattgtcgagacgaataacatgaggtcatatagaatcccacttttggtgatttcaagtcaagaaagtaaaagtaaaccattgctatctttcaccttaaatatcctgtgttttattgctcagaacatccagtttttctaatactcatgatgtcagaagggaaacctcctgacaaaaaaaggcctcgtagaagcttatcaatcagcaagaataagaaaaaagcatctaattctattatttcgtgttttaacaatgcaccacctgctaaacttgcctgccccgtttgcagtaaaatggtgcctagatatgacttaaaccggcaccttgatgaaatgtgtgctaacaatgacttcgttcaagtggatccagggcaggttggcttaataaattcaaatgtgtctatggtagatttaaccagtgttaccttagaagatgtaacacctaagaagtcaccaccaccaaagacaaatttaacccctggccaaagtgattcagcaaaaagggaagtaaagcagaagatcagtccctactttaaaagtaatgatgtggtgtgcaaaaatcaagatgagctgagaaatcgtagtgtgaaagtcatttgtttgggaagcctagcatctaaattgtccagaaaatacgtaaaggctaaaaaatcaatagataaggatgaagaatttgccggttctagtccacagagttccaaatccacagttgttaagagcctgattgataactcttcagaaattgaggacgaggatcaaattttggagaacagttctcaaaaagaaaacgtgtttaaatgtgattctctaaaggaagagtgcattcctgaacatatggtaagaggaagtaaaataatggaagccgaaagccaaaaggctacccgggaatgtgagaaatcagccctcacccctggattctcagataatgcgatcatgttattctcaccagatttcactcttaggaatacattaaagtctacttcagaagacagtcttgtaaagcaagagtgtatcaaagaagtggttgaaaaacgtgaggcatgtcattgtgaagaagtaaaaatgactgttgcttcagaagctaaaatacagctgtcagattcagaggcaaaatctcatagttctgcagatgatgcttctgcatggagtaacatccaagaggctcctctgcaggatgacagttgcttaaacaatgatatccctcacagcattcctttggagcaggggtcaagctgcaatggtcctggtcaaacaaccggtcatccttactaccttcggagtttccttgtggtgctgaaaaccgtacttgagaatgaagatgatatgttgctctttgatgagcaggagaagggaattgtaactaaattttatcagttatcagctactggtcagaagttatatgtaaggctctttcaacgtaaattaagctggattaagatgaccaaattagagtatgaagagattgccttagacttaacacctgtgattgaagaattgacgaatgcaggctttctacagacagaatctgagttgcaagaactctctgaagtgcttgaactcctttctgctcctgaactaaaatccctagccaagaccttccacttggtgaatcccaatggacagaaacagcagctggtggacgcctttctcaaattggccaaacagcgttcagtctgcacttggggcaagaataagcctggaattggtgcagtgattttaaaaaggttttgttggctattgttacagtaaaaacatttaaaatgttgatagcacatattaacttacagtagattgtatacttgattgaactgtaattgtttatttcagttgtagttagattgagaaggctggaaaagccttaattgcaatagcctggattctttcttgggttattattcaaaatttttgtcgtaataccgtactaatttccaggaccaagaaaaatcggaaggcaataggcctttggtaaattgtagtattttattttccgagaaaaatacagttttaagtgattcttatgggattttaaggtaaactatttagtcaaatttttattttagttt

SEQ ID NO: 281093 - DNA, 365 bp, Homo sapiens
cagcagccacgcacatgctgagtgacatttcttccgcaatggccaatgggaactgggaagaagctaaggagctcgctcagtgtgcaaaaagggattggaacagactgaaaaaccacccttctctgaggtgagagtttttctaggtacctgccaaaatttatacattgaccaagttgttcccaacacttacagtaattttcttcatgaagaatatactcctttttctctgtggttaaaccagctgtggaattgaattttgtgcgtgctttgcctagaatggaagtgctgtgtgaaatagaaggaaatgtctgaaggtttaaagtgaatttgatataactcagatccctgggcaacacacatgccaa

SEQ ID NO: 281094 - DNA, 409 bp, Homo sapiens
ttgtaagtgaaggaccatccgtatatttgtgttacacttacaaatacagtgagagagcagaagagccatttaaatagttgtcagtgacaactacaacttacttgaatggcttttcattcagtaagatactaataacaacttttaaaaatttcttttccagctggtggaagttaaaggccccaatgatcgtctttcacataagcagatgatctggctggctgaactgcagaagctgggggctgaagtagaagtctgccatgtggttgcagttggagctaagagccaaagccttagctaaaaggtatggaattggggatatttggtcatacattaatgtaagattttcaagagtataaaacatgttttatttaattttgttatcgtgcattataaacctgatagtttgact

SEQ ID NO: 281095 - DNA, 4836 bp, Homo sapiens
ctgggaatgcctggaagcgccggcgcgcggagccaggtgggaggaagaagaaattgtcgagacgaataacatgaggtcatatagaatcccacttttggtgatttcaagtcaagaaagtaaaagtaaaccattgctatctttcaccttaaatatcctgtgttttattgctcagaacatccagtttttctaatactcatgatgtcagaagggaaacctcctgacaaaaaaaggcctcgtagaagcttatcaatcagcaagaataagaaaaaagcatctaattctattatttcgtgttttaacaatgcaccacctgctaaacttgcctgccccgtttgcagtaaaatggtgcctagatatgacttaaaccggcaccttgatgaaatgtgtgctaacaatgacttcgttcaagtggatccagggcaggttggcttaataaattcaaatgtgtctatggtagatttaaccagtgttaccttagaagatgtaacacctaagaagtcaccaccaccaaagacaaatttaacccctggccaaagtgattcagcaaaaagggaagtaaagcagaagatcagtccctactttaaaagtaatgatgtggtgtgcaaaaatcaagatgagctgagaaatcgtagtgtgaaagtcatttgtttgggaagcctagcatctaaattgtccagaaaatacgtaaaggctaaaaaatcaatagataaggatgaagaatttgccggttctagtccacagagttccaaatccacagttgttaagagcctgattgataactcttcagaaattgaggacgaggatcaaattttggagaacagttctcaaaaagaaaacgtgtttaaatgtgattctctaaaggaagagtgcattcctgaacatatggtaagaggaagtaaaataatggaagccgaaagccaaaaggctacccgggaatgtgagaaatcagccctcacccctggattctcagataatgcgatcatgttattctcaccagatttcactcttaggaatacattaaagtctacttcagaagacagtcttgtaaagcaagagtgtatcaaagaagtggttgaaaaacgtgaggcatgtcattgtgaagaagtaaaaatgactgttgcttcagaagctaaaatacagctgtcagattcagaggcaaaatctcatagttctgcagatgatgcttctgcatggagtaacatccaagaggctcctctgcaggatgacagttgcttaaacaatgatatccctcacagcattcctttggagcaggggtcaagctgcaatggtcctggtcaaacaaccggtcatccttactaccttcggagtttccttgtggtgctgaaaaccgtacttgagaatgaagatgatatgttgctctttgatgagcaggagaagggaattgtaactaaattttatcagttatcagctactggtcagaagttatatgtaaggctctttcaacgtaaattaagctggattaagatgaccaaattagagtatgaagagattgccttagacttaacacctgtgattgaagaattgacgaatgcaggctttctacagacagaatctgagttgcaagaactctctgaagtgcttgaactcctttctgctcctgaactaaaatccctagccaagaccttccacttggtgaatcccaatggacagaaacagcagctggtggacgcctttctcaaattggccaaacagcgttcagtctgcacttggggcaagaataagcctggaattggtgcagtgattttaaaaagagccaaagccttggctggacagtcagtacgaatctgtaaaggccccagggctgtgttttcccgcatcttgctactgttttcgttgaccgactcaatggaagatgaagacgccgcttgtggaggtcagggacagctttcaacagtcctgttggtcaacctcggccgaatggagtttcctagttacaccatcaatcggaaaacccacatcttccaagacagagatgatcttatcagatatgcagcagccacgcacatgctgagtgacatttcttccgcaatggccaatgggaactgggaagaagctaaggagctcgctcagtgtgcaaaaagggattggaacagactgaaaaaccacccttctctgagatgccacgaagatttaccactcttcctgcggtgtttcactgttgggtggatttatacaaggattttgtctcggtttgtggaaatactgcagagacttcacatgtatgaggaagccgtcagagaacttgaaagccttttgtctcagagaatttattgtcctgacagcagaggccgatggtgggatcgactggcccttaatttacaccagcacttgaagcgcctggaaccggagcctgatgtgtgaccatgctctctgccagactatcaagtgcatcacagaggggctggcggatccggaagtcagaacgggacaccgcctttcactgtatcagcgagccgtgcgcctgcgagagtctccgagctgtaaaaagttcaagcacctcttccagcagctcccagaaatggctgtgcaagatgtgaaacacgtgaccatcacaggcaggctgtgcccacagcgtgggatgtgcaagtctgtgtttgtgatggaggccggggaggccgctgaccccaccacggtcctgtgctctgtggaggagctggcactggcccattacagacgcagcggttttgaccaggggattcatggcgaagggtccaccttcagcaccctgtatggcctcctcctgtgggacatcatcttcatggatgggattccggatgtcttcagaaacgcctgtcaggcattccccctggacttgtgcacagacagcttcttcacaagcagacgcccagcccttgaggccaggctgcagctgattcatgatgcccccgaggagagcctgcgggcctgggtggcagccacgtggcatgagcaggaaggcagagtggcttcccttgtcagctgggatcgcttcacgtctcttcagcaagctcaggatcttgtctcctgcctggggggccctgtgctcagtggtgtgtgcaggcacctggctgctgactttcgacactgtcgagggggcctccccgacctggtggtgtggaactcccagagccgtcactttaagctggtggaagttaaaggccccaatgatcgtctttcacataagcagatgatctggctggctgaactgcagaagctgggggctgaagtagaagtctgccatgtggttgcagttggagctaagagccaaagccttagctaaaagattccctacaggagaaaatggaaatgaggaggagagaaactccggtgtccccgaggtgtcggtgtggtgagggccgctggcgttgaagtacatcctgctctggcccagctccccatagcaggcctccagggggccactgcgctgttgccgcagcatcctgctcagtacgtcgacttcatcagccaggagggagagcttgtgaaaggctgtgatggagccacccaggctgatctgggcctcgggaacccagcggaagtagcacagtttccacagttttatgtgtgttccagagacacgtggcagaataacaccgtgcaggttggcgggtttggaaaaccattctctaaaatactgctccgtatcactgttctggctgtcggtttgctgagctggatctggctttggttttaatatcaatgaatttctccttggaagtaattcttggtcactgatgattccattctttaaggcagacggcattcctcttagtgtggagctgtagcttttctatacagaagagattttattatgttccggggattccctttttagaaagattgaaggatgcaatggcaaatataaactcaatactatgaaaaattaatggaatttcagcctcaaagaacattttcctcccttcctttgtgtccttattctaatcctcctcccctggaattacacttttttatgtgttgactctacctaggctgttactatcagcctgaatgggggcgggatgagagtacctcctatccactaatttgcttaaggataagttctaagacgggctagaaaaaacactagacctggtcgattctatcaagaacaatggcaaactgaacagaggcagtcaggaggccaaatgtctgattctttgttctgtacctttcagtagtctgcaaattttctaccaaaaaaaaatcccaagaatttatttgggaattattaaaaaggcaaacaatgaatgttattaggacaagaatatagcagtcaggaggccatgactacatcacagccaggcggcattccctgccacagtggcggcttgaatcatcaagaaatggataaatggggctttagtaaatcaggcttgcaggctcaaagctgcaatctgcccactctcaggtactgagactttgtgggcctcagacaccaggaagaaagttgggatacagtcatttgagttaaaaagggaatgacccctcagaaacccgcattagcagtgttactcttggaagtgcctttacttttaacgctctctgttctgaaaaagaggtgtttggttacgtgtgagccaacatcacgttttgttagctgtgatttacctttgtccgtttaaaagacttcacggagccattctgtatacaaggtgtgctctttccaatgtagaaggggttatggaaaagggtgcgatcctttgctgtaaactggagagaccagtcccaaacagaggggaattttaagcccttctcatcacccaattggatgtttttgcttatagcaaattcctgcaaaataaataaataaatatttgcaaaactaaaaaaaaaaaa

SEQ ID NO: 281096 - DNA, 3517 bp, Homo sapiens
catacgacgaggcgcacgatggcgcgcccaggaagaagaaattgtcgagacgaataacatgaggtcatatagaatcccacttttggtgatttcaagtcaagaaagtaaaactactggtcagaagttatatgtaaggctctttcaacgtaaattaagctggattaagatgaccaaattagagtatgaagagattgccttagacttaacacctgtgattgaagaattgacgaatgcaggctttctacagacagaatctgagttgcaagaactctctgaagtgcttgaactcctttctgctcctgaactaaaatccctagccaagaccttccacttggtgaatcccaatggacagaaacagcagctggtggacgcctttctcaaattggccaaacagcgttcagtctgcacttggggcaagaataagcctggaattggtgcagtgattttaaaaagagccaaagccttggctggacagtcagtacgaatctgtaaaggccccagggctgtgttttcccgcatcttgctactgttttcgttgaccgactcaatggaagatgaagacgccgcttgtggaggtcagggacagctttcaacagtcctgttggtcaacctcggccgaatggagtttcctagttacaccatcaatcggaaaacccacatcttccaagacagagatgatcttatcagatatgcagcagccacgcacatgctgagtgacatttcttccgcaatggccaatgggaactgggaagaagctaaggagctcgctcagtgtgcaaaaagggattggaacagactgaaaaaccacccttctctgagatgccacgaagatttaccactcttcctgcggtgtttcactgttgggtggatttatacaaggattttgtctcggtttgtggaaatactgcagagacttcacatgtatgaggaagccgtcagagaacttgaaagccttttgtctcagagaatttattgtcctgacagcagaggccgatggtgggatcgactggcccttaatttacaccagcacttgaagcgcctggaaccggagcctgatgtgtgaccatgctctctgccagactatcaagtgcatcacagaggggctggcggatccggaagtcagaacgggacaccgcctttcactgtatcagcgagccgtgcgcctgcgagagtctccgagctgtaaaaagttcaagcacctcttccagcagctcccagaaatggctgtgcaagatgtgaaacacgtgaccatcacaggcaggctgtgcccacagcgtgggatgtgcaagtctgtgtttgtgatggaggccggggaggccgctgaccccaccacggtcctgtgctctgtggaggagctggcactggcccattacagacgcagcggttttgaccaggggattcatggcgaagggtccaccttcagcaccctgtatggcctcctcctgtgggacatcatcttcatggatgggattccggatgtcttcagaaacgcctgtcaggcattccccctggacttgtgcacagacagcttcttcacaagcagacgcccagcccttgaggccaggctgcagctgattcatgatgcccccgaggagagcctgcgggcctgggtggcagccacgtggcatgagcaggaaggcagagtggcttcccttgtcagctgggatcgcttcacgtctcttcagcaagctcaggatcttgtctcctgcctggggggccctgtgctcagtggtgtgtgcaggcacctggctgctgactttcgacactgtcgagggggcctccccgacctggtggtgtggaactcccagagccgtcactttaagctggtggaagttaaaggccccaatgatcgtctttcacataagcagatgatctggctggctgaactgcagaagctgggggctgaagtagaagtctgccatgtggttgcagttggagctaagagccaaagccttagctaaaagattccctacaggagaaaatggaaatgaggaggagagaaactccggtgtccccgaggtgtcggtgtggtgagggccgctggcgttgaagtacatcctgctctggcccagctccccatagcaggcctccagggggccactgcgctgttgccgcagcatcctgctcagtacgtcgacttcatcagccaggagggagagcttgtgaaaggctgtgatggagccacccaggctgatctgggcctcgggaacccagcggaagtagcacagtttccacagttttatgtgtgttccagagacacgtggcagaataacaccgtgcaggttggcgggtttggaaaaccattctctaaaatactgctccgtatcactgttctggctgtcggtttgctgagctggatctggctttggttttaatatcaatgaatttctccttggaagtaattcttggtcactgatgattccattctttaaggcagacggcattcctcttagtgtggagctgtagcttttctatacagaagagattttattatgttccggggattccctttttagaaagattgaaggatgcaatggcaaatataaactcaatactatgaaaaattaatggaatttcagcctcaaagaacattttcctcccttcctttgtgtccttattctaatcctcctcccctggaattacacttttttatgtgttgactctacctaggctgttactatcagcctgaatgggggcgggatgagagtacctcctatccactaatttgcttaaggataagttctaagacgggctagaaaaaacactagacctggtcgattctatcaagaacaatggcaaactgaacagaggcagtcaggaggccaaatgtctgattctttgttctgtacctttcagtagtctgcaaattttctaccaaaaaaaaatcccaagaatttatttgggaattattaaaaaggcaaacaatgaatgttattaggacaagaatatagcagtcaggaggccatgactacatcacagccaggcggcattccctgccacagtggcggcttgaatcatcaagaaatggataaatggggctttagtaaatcaggcttgcaggctcaaagctgcaatctgcccactctcaggtactgagactttgtgggcctcagacaccaggaagaaagttgggatacagtcatttgagttaaaaagggaatgacccctcagaaacccgcattagcagtgttactcttggaagtgcctttacttttaacgctctctgttctgaaaaagaggtgtttggttacgtgtgagccaacatcacgttttgttagctgtgatttacctttgtccgtttaaaagacttcacggagccattctgtatacaaggtgtgctctttccaatgtagaaggggttatggaaaagggtgcgatcctttgctgtaaactggagagaccagtcccaaacagaggggaattttaagcccttctcatcacccaattggatgtttttgcttatagcaaattcctgcaaaataaataaataaatatttgcaaaactaaaaaaaaaaaa

SEQ ID NO: 281097 - DNA, 3421 bp, Homo sapiens
gatcttgggtgacagggcaccgagggaaggaggacgcgagggcagccaggccctagggagcagggagagtggctcgggctcagtcgcgtggccccaggaagaagaaattgtcgagacgaataacatgaggtcatatagaatcccacttttggtgatttcaagtcaagaaagtaaaagtaaaccattgctatctttcaccttaaatatcctgtgttttattgctcagaacatccagtttttctaatactcatgatgtcagaagggaaacctcctgacaaaaaaaggcctcgtagaagcttatcaatcagcaagaataagaaaaaagcatctaattctattatttcgtgttttaacaatgcaccacctgctaaacttgcctgccccgtttgcagtaaaatggtgcctagatatgacttaaaccggcaccttgatgaaatgtgtgctaacaatgacttcgttcaagtggatccagggcaggttggcttaataaattcaaatgtgtctatggtagatttaaccagtgttaccttagaagatgtaacacctaagaagtcaccaccaccaaagacaaatttaacccctggccaaagtgattcagcaaaaagggaagtaaagcagaagatcagtccctactttaaaagtaatgatgtggtgtgcaaaaatcaagatgagctgagaaatcgtagtgtgaaagtcatttgtttgggaagcctagcatctaaattgtccagaaaatacgtaaaggctaaaaaatcaatagataaggatgaagaatttgccggttctagtccacagagttccaaatccacagttgttaagagcctgattgataactcttcagaaattgaggacgaggatcaaattttggagaacagttctcaaaaagaaaacgtgtttaaatgtgattctctaaaggaagagtgcattcctgaacatatggtaagaggaagtaaaataatggaagccgaaagccaaaaggctacccgggaatgtgagaaatcagccctcacccctggattctcagataatgcgatcatgttattctcaccagatttcactcttaggaatacattaaagtctacttcagaagacagtcttgtaaagcaagagtgtatcaaagaagtggttgaaaaacgtgaggcatgtcattgtgaagaagtaaaaatgactgttgcttcagaagctaaaatacagctgtcagattcagaggcaaaatctcatagttctgcagatgatgcttctgcatggagtaacatccaagaggctcctctgcaggatgacagttgcttaaacaatgatatccctcacagcattcctttggagcaggggtcaagctgcaatggtcctggtcaaacaaccggtcatccttactaccttcggagtttccttgtggtgctgaaaaccgtacttgagaatgaagatgatatgttgctctttgatgagcaggagaagggaattgtaactaaattttatcagttatcagctactggtcagaagttatatgtaaggctctttcaacgtaaattaagctggattaagatgaccaaattagagtatgaagagattgccttagacttaacacctgtgattgaagaattgacgaatgcaggctttctacagacagaatctgagttgcaagaactctctgaagtgcttgaactcctttctgctcctgaactaaaatccctagccaagaccttccacttggtgaatcccaatggacagaaacagcagctggtggacgcctttctcaaattggccaaacagcgttcagtctgcacttggggcaagaataagcctggaattggtgcagtgattttaaaaagagccaaagccttggctggacagtcagtacgaatctgtaaaggccccagggctgtgttttcccgcatcttgctactgttttcgttgaccgactcaatggaagatgaagacgccgcttgtggaggtcagggacagctttcaacagtcctgttggtcaacctcggccgaatggagtttcctagttacaccatcaatcggaaaacccacatcttccaagacagagatgatcttatcagatatgcagcagccacgcacatgctgagtgacatttcttccgcaatggccaatgggaactgggaagaagctaaggagctcgctcagtgtgcaaaaagggattggaacagactgaaaaaccacccttctctgagatgccacgaagatttaccactcttcctgcggtgtttcactgttgggtggatttatacaaggattttgtctcggtttgtggaaatactgcagagacttcacatgtatgaggaagccgtcagagaacttgaaagccttttgtctcagagaatttattgtcctgacagcagaggccgatggtgggatcgactggcccttaatttacaccagcacttgaagcgcctggaaccggagcctgatgtgtgaccatgctctctgccagactatcaagtgcatcacagaggggctggcggatccggaagtcagaacgggacaccgcctttcactgtatcagcgagccgtgcgcctgcgagagtctccgagctgtaaaaagttcaagcacctcttccagcagctcccagaaatggctgtgcaagatgtgaaacacgtgaccatcacaggcaggctgtgcccacagcgtgggatgtgcaagtctgtgtttgtgatggaggccggggaggccgctgaccccaccacggtcctgtgctctgtggaggagctggcactggcccattacagacgcagcggttttgaccaggggattcatggcgaagggtccaccttcagcaccctgtatggcctcctcctgtgggacatcatcttcatggatgggattccggatgtcttcagaaacgcctgtcaggcattccccctggacttgtgcacagacagcttcttcacaagcagacgcccagcccttgaggccaggctgcagctgattcatgatgcccccgaggagagcctgcgggcctgggtggcagccacgtggcatgagcaggaaggcagagtggcttcccttgtcattgggatacagtcatttgagttaaaaagggaatgacccctcagaaacccgcattagcagtgttactcttggaagtgcctttacttttaacgctctctgttctgaaaaagaggtgtttggttacgtgtgagccaacatcacgttttgttagctgtgatttacctttgtccgtttaaaagacttcacggagccattctgtatacaaggtgtgctctttccaatgtagaaggggttatggaaaagggtgcgatcctttgctgtaaactggagagaccagtcccaaacagaggggaattttaagcccttctcatcacccaattggatgtttttgcttatagcaaattcctgcaaaataaataaataaatatttgcaaaactaaaaaaaaaaaa

SEQ ID NO: 281098 - DNA, 2876 bp, Homo sapiens
agcttcgaggccagtgggaggagggaggggccaggcagctgagggccaggaaagatgtgaaaaactctagctggtgaccgagaggaggagtagagtgtgcccttagttcatatgaactagagggagttggtatttgcacagcagtcagggtcacatgagtgatcatggtacagtgagaagttctccctcccagggccaggtcacagggtttgtttctgttcaatccggattcttccagtaaaagcttcaacttcccacactgaagctgagagcctcccaaagtgctggctacctgctgagcgcccccgtaactctgacacagtagtaatttgagcctctgcaattgccgtctgcttcctgtgaaagtcctttccgtgcccactgacccttgagtgggcctttgagctgctgactttcagctggaacttgaagggaccccaaccctgagacactatggccctgacctcagacctggggaaacagataaaactgaaagaggtggaggggaccctcctgcagcctgcaactgtggacaactggagccagatccagagcttcgaggccaaaccagatgatctcctcatctgcacctaccctaaagcagggacaacgtggattcaggaaattgtggatatgattgaacagaatggggacgtggagaagtgccagcgagccatcatccaacaccgccatcctttcattgagtgggctcggccaccccaaccttctggtgtggaaaaagccaaagcaatgccctctccacggatactaaagactcacctttccactcagctgctgccaccgtctttctgggaaaacaactgcaagttcctttatgtagctcgaaatgccaaagactgtatggtttcctactaccatttccaaaggatgaaccacatgcttcctgaccctggtacctgggaagagtattttgaaaccttcatcaatggaaaagtggtttggggttcctggtttgaccacgtgaaaggatggtgggagatgaaagacagacaccagattctcttcctcttctatgaggacataaagagggacccaaagcatgaaattcggaaggtgatgcagttcatgggaaagaaggtggatgaaacagtgctagataaaattgtccaggagacgtcatttgagaaaatgaaagaaaatcccatgacaaatcgttctacagtttccaaatctatcttggaccagtcaatttcctccttcatgagaaaaggaactgtgggggattggaaaaaccacttcactgttgcccagaatgagaggtttgatgaaatctatagaagaaagatggaaggaacctccataaacttctgcatggaactctgagcaagatgtaaataaaattaaaaggtggatggcaagagtgcaaatactatcttcaatccttcagtcccagccagaagaatctctgaaagcatattgtgaatgtatacaatgtagtacaaacaatctctgtgatgattaacagtatgtcaccacttcattttttaaaaaggatcacgtctaatgcccattttcccaactattctttccaaagtaagatataaggtagcttaataaactaagtaaaacgtatgacttgagtacaataggattgttttaatccccattattctggaaagtgcatcctagtctcccagtctataacatcataataccttgaggtataagtccaaatattaggttatatctatattaaaaacaaaatttctgtcatctgtcctggccattcaggcaactccagcctgggctcaatcctggagttctgtctggtcactatcagaaggaacactttgagggaaaccctggtgcagccagccctgaggaaacatggcctgagtgcctcactggtgggtgggaataaaatggaagtgcacagaggagatgtcagaagaccaaaacttggtgaatagtcccagtgctaggtcatataggaaacagaaagcatgacagtggccttttgggaacccaagttacgtcctggtgaaagcagaaaggaggagacaggatggctgtcaacaacgtcagcatgggcatggctcccaggcatggaggtaattgggtcttggcttcaatgccacccttttgggaagccctaaaccaagtgaggtgttcttttcccttgcttcccatatttgtcccagttgcagccctgttgttatgtatttactcttcaatttcttatttatacctctcactcaattgttaattctttgggttcagtctcatgccatatttactcctagtacctaatgcagtgcctggcacacagcaagtgcccttgagaacttgtagagggagtaaaaaagtgcatggataaatgactgcagcaaatcacaaattttgaactttgacccttttcttttagtcccaaatagtggcattccatagctgagggtagtaggagcagttcaccctgggagcagacaataagaggaagaatgaagccaactaaaattctgaatgctttttgttggatttcgtagggtattttttttaaaatagggtcttgctatgttgcccaggctggtcttaactgactgctttttattattaccatgcactggcaattccaaacaatgtcagtgttaaaatgcttctccctgaaaaagagaaaaaaaaaaggaaaaaaagaaaagaaaagtgaaaagaaaaactcttattggcctaagttctaaataatagctaggttaccactgagttttaactatatgtatatgagcttcaaataagcacctttttattatgtaaataaataaaagttatctgtatccccactgcattgtaaaatttttgttgttttgtttcatgtcttattcacctttgtatggaaattaattcagaaaccccaagcatag

SEQ ID NO: 281099 - DNA, 549 bp, Homo sapiens
gcagagctgaaatgattagagatggaaatcattcaagccgaggaggccaggagaaaaataggagctattttcttgctgtgtggctcaaactcttaaacatgaagcttctgtgcatctttgggagggtgcgcgaggggtcatcagtttacgttgatactgtggaagtctcctattcaagtggcaggtcatagtttacagaaaaagattttgctcctgataccaaaggggcaatcaggcaatctaatcctcaccaatccctaattgattagctaattaaaaggactgagtttgaagtagagagcagacttggtgacaaagcagagacagaaagaagagggaggtcacaaggccaagtcgcagggccagcactgcagaactgagccagagtgcacagcaaccctcaggatggctctgcctaagggaactctgtgaaagtccactttttataccatcttttacccacctcttttcttaccccaaagttctgacaccaaagacagacagccagacaggcagctgcagaaagatgtacgttgtgtggataccacc

SEQ ID NO: 281100 - DNA, 479 bp, Homo sapiens
ggtccccatgtagtgcttgtactacgcagatgtttcctcttgagctattttaaaggtgtggaaaaagccaaagcaatgccctctccacggatactaaagactcacctttccactcagctgctgccaccgtctttctgggaaaacaactgcaaggtaagataccaacagctccctgtgacagaagggaaagtaagccaaccaaagcgagtcctgcagaccccaacgcagagcattcgtgatcacctttgcctctccactgtctctgatgcttaccagcaaagagaaaacataaagttctacattcagcaggacattcacctgaacagtttcaaataggacatgaaggcaggatccagattgaatgtttggagggaactagagacatggggaggcagtgagtgcagtaagcgtagctgtgaaatgaaggggagaagatggtggtcccaggctgcaggccatggggaggttttctaacagac

SEQ ID NO: 281101 - DNA, 2822 bp, Homo sapiens
agcttcgaggccagtgggaggagggaggggccaggcagctgagggccaggaaagatgtgaaaaactctagctggtgaccgagaggaggagtagagtgtgcccttagttcatatgaactagagggagttggtatttgcacagcagtcagggtcacatgagtgatcatggtacagtgagaagttctccctcccagggccaggtcacagggtttgtttctgttcaatccggattcttccagtaaaagcttcaacttcccacactgaagctgagagcctcccaaagtgctggctacctgctgagcgcccccgtaactctgacacagtagtaatttgagcctctgcaattgccgtctgcttcctgtgaaagtcctttccgtgcccactgacccttgagtgggcctttgagctgctgactttcagctggaacttgaagggaccccaaccctgagacactatggccctgacctcagacctggggaaacagataaaactgaaagaggtggaggggaccctcctgcagcctgcaactgtggacaactggagccagatccagagcttcgaggccaaaccagatgatctcctcatctgcacctaccctaaagcagggacaacgtggattcaggaaattgtggatatgattgaacagaatggggacgtggagaagtgccagcgagccatcatccaacaccgccatcctttcattgagtgggctcggccaccccaaccttctggtgtggaaaaagccaaagcaatgccctctccacggatactaaagactcacctttccactcagctgctgccaccgtctttctgggaaaacaactgcaagttcctttatgtagctcgaaatgccaaagactgtatggtttcctactaccatttccaaaggatgaaccacatgcttcctgaccctggtacctgggaagagtattttgaaaccttcatcaatggaaaagtggtttggggttcctggtttgaccacgtgaaaggatggtgggagatgaaagacagacaccagattctcttcctcttctatgaggacataaagagggacccaaagcatgaaattcggaaggtgatgcagttcatgggaaagaaggtggatgaaacagtgctagataaaattgtccaggagacgtcatttgagaaaatgaaagaaaatcccatgacaaatcgttctacagtttccaaatctatcttggaccagtcaatttcctccttcatgagaaaaggaactgtgggggattggaaaaaccacttcactgttgcccagaatgagaggtttgatgaaatctatagaagaaagatggaaggaacctccataaacttctgcatggaactctgagcaagatgtaaataaaattaaaaggtggatggcaagagtgcaaatactatcttcaatccttcagtcccagccagaagaatctctgaaagcatattgtgaatgtatacaatgtagtacaaacaatctctgtgatgattaacagtatgtcaccacttcattttttaaaaaggatcacgtctaatgcccattttcccaactattctttccaaagtaagatataaggtagcttaataaactaagtaaaacgtatgacttgagtacaataggattgttttaatccccattattctggaaagtgcatcctagtctcccagtctataacatcataataccttgaggtataagtccaaatattaggttatatctatattaaaaacaaaatttctgtcatctgtcctggccattcaggcaactccagcctgggctcaatcctggagttctgtctggtcactatcagaaggaacactttgagggaaaccctggtgcagccagccctgaggaaacatggcctgagtgcctcactggtgggtgggaataaaatggaagtgcacagaggagatgtcagaagaccagtggccttttgggaacccaagttacgtcctggtgaaagcagaaaggaggagacaggatggctgtcaacaacgtcagcatgggcatggctcccaggcatggaggtaattgggtcttggcttcaatgccacccttttgggaagccctaaaccaagtgaggtgttcttttcccttgcttcccatatttgtcccagttgcagccctgttgttatgtatttactcttcaatttcttatttatacctctcactcaattgttaattctttgggttcagtctcatgccatatttactcctagtacctaatgcagtgcctggcacacagcaagtgcccttgagaacttgtagagggagtaaaaaagtgcatggataaatgactgcagcaaatcacaaattttgaactttgacccttttcttttagtcccaaatagtggcattccatagctgagggtagtaggagcagttcaccctgggagcagacaataagaggaagaatgaagccaactaaaattctgaatgctttttgttggatttcgtagggtattttttttaaaatagggtcttgctatgttgcccaggctggtcttaactgactgctttttattattaccatgcactggcaattccaaacaatgtcagtgttaaaatgcttctccctgaaaaagagaaaaaaaaaaggaaaaaaagaaaagaaaagtgaaaagaaaaactcttattggcctaagttctaaataatagctaggttaccactgagttttaactatatgtatatgagcttcaaataagcacctttttattatgtaaataaataaaagttatctgtatccccactgcattgtaaaatttttgttgttttgtttcatgtcttattcacctttgtatggaaattaattcagaaaccccaagcatag

SEQ ID NO: 281102 - DNA, 1291 bp, Homo sapiens
atgtgaataattgagacaaggtaggcagtgcttgaggattggcagtttgaaccactggagcaggctttcagccccagggagcttggactagtggtctggtatctgaccctgtgggtgtcagaggcaggtgaataatgacccagtgtgtacaagcccaacagtggaaatgctggggaaacagataaaactgaaagaggtggaggggaccctcctgcagcctgcaactgtggacaactggagccagatccagagcttcgaggccaaaccagatgatctcctcatctgcacctaccctaaagcagggacaacgtggattcaggaaattgtggatatgattgaacagaatggggacgtggagaagtgccagcgagccatcatccaacaccgccatcctttcattgagtgggctcggccaccccaaccttctggtgtggaaaaagccaaagcaatgccctctccacggatactaaagactcacctttccactcagctgctgccaccgtctttctgggaaaacaactgcaagttcctttatgtagctcgaaatgccaaagactgtatggtttcctactaccatttccaaaggatgaaccacatgcttcctgaccctggtacctgggaagagtattttgaaaccttcatcaatggaaaagtggtttggggttcctggtttgaccacgtgaaaggatggtgggagatgaaagacagacaccagattctcttcctcttctatgaggacataaagagggacccaaagcatgaaattcggaaggtgatgcagttcatgggaaagaaggtggatgaaacagtgctagataaaattgtccaggagacgtcatttgagaaaatgaaagaaaatcccatgacaaatcgttctacagtttccaaatctatcttggaccagtcaatttcctccttcatgagaaaaggaactgtgggggattggaaaaaccacttcactgttgcccagaatgagaggtttgatgaaatctatagaagaaagatggaaggaacctccataaacttctgcatggaactctgagcaagatgtaaataaaattaaaaggtggatggcaagagtgcaaatactatcttcaatccttcagtcccagccagaagaatctctgaaagcatattgtgaatgtatacaatgtagtacaaacaatctctgtgatgattaacagtatgtcaccacttcattttttaaaaaggatcacgtctaatgcccattttcccaactattctttccaaagtaagatataaggtagcttaataaactaagtaaaacgta

SEQ ID NO: 281103 - DNA, 1024 bp, Homo sapiens
agcttcgaggccagtgggaggagggaggggccaggcagctgagggccaggaaagatgtgaaaaactctagctggtgaccgagaggaggagtagagtgtgcccttagttcatatgaactagagggagttggtatttgcacagcagtcagggtcacatgagtgatcatggtacagtgagaagttctccctcccagggccaggtcacagggtttgtttctgttcaatccggattcttccagtaaaagcttcaacttcccacactgaagctgagagcctcccaaagtgctggctacctgctgagcgcccccgtaactctgacacagtagtaatttgagcctctgcaattgccgtctgcttcctgtgaaagtcctttccgtgcccactgacccttgagtgggcctttgagctgctgactttcagctggaacttgaagggaccccaaccctgagacactatggccctgacctcagacctggggaaacagataaaactgaaagaggtggaggggaccctcctgcagcctgcaactgtggacaactggagccagatccagagcttcgaggccaaaccagatgatctcctcatctgcacctaccctaaagcagggacaacgtggattcaggaaattgtggatatgattgaacagaatggggacgtggagaagtgccagcgagccatcatccaacaccgccatcctttcattgagtgggctcggccaccccaaccttctgagacaggatttcaccatgttgcccaggctggtctcaaactcctgagctcaagcaatccacctgcctcaacctcccaaagtgccaagattacagacgtgagccactgcccctggtcttctttgcatattttaaacatagttatttatattctctattaggtacccaataactgaggtcactaggggtttagttcttccacctgttttttttctagctcttgttcatagggcttttccctcacttgttttgtaattttgtataaaaagctcttttctccctgtcttgatctcacac

SEQ ID NO: 281104 - DNA, 312 bp, Homo sapiens
ctgaagggggagttgggtgagtcaggtatgtggacaggccagattcagtatgggcactacaccactttactcagggacaccacatctttcaatcagagtgacactcctgtctggccttcctttttctaggaactgtgggggattggaaaaaccacttcactgttgcccagaatgagaggtttgatgaaatctatagaagaaagatggaaggaacctccataaacttctgcatggaactctgagcaagatgtaaataaaattaaaaggtggatggcaagagtgcaaatactatcttcaatccttcagtcccag

SEQ ID NO: 281105 - DNA, 1593 bp, Homo sapiens
agcttcgaggccagtgggaggagggaggggccaggcagctgagggccaggaaagatgtgaaaaactctagctggtgaccgagaggaggagtagagtgtgcccttagttcatatgaactagagggagttggtatttgcacagcagtcagggtcacatgagtgatcatggtacagtgagaagttctccctcccagggccaggtcacagggtttgtttctgttcaatccggattcttccagtaaaagcttcaacttcccacactgaagctgagagcctcccaaagtgctggctacctgctgagcgcccccgtaactctgacacagtagtaatttgagcctctgcaattgccgtctgcttcctgtgaaagtcctttccgtgcccactgacccttgagtgggcctttgagctgctgactttcagctggaacttgaagggaccccaaccctgagacactatggccctgacctcagacctggggaaacagataaaactgaaagaggtggaggggaccctcctgcagcctgcaactgtggacaactggagccagatccagagcttcgaggccaaaccagatgatctcctcatctgcacctaccctaaagcagggacaacgtggattcaggaaattgtggatatgattgaacagaatggggacgtggagaagtgccagcgagccatcatccaacaccgccatcctttcattgagtgggctcggccaccccaaccttctggtgtggaaaaagccaaagcaatgccctctccacggatactaaagactcacctttccactcagctgctgccaccgtctttctgggaaaacaactgcaagttcctttatgtagctcgaaatgccaaagactgtatggtttcctactaccatttccaaaggatgaaccacatgcttcctgaccctggtacctgggaagagtattttgaaaccttcatcaatggaaaagtggtttggggttcctggtttgaccacgtgaaaggatggtgggagatgaaagacagacaccagattctcttcctcttctatgaggacataaagagggacccaaagcatgaaattcggaaggtgatgcagttcatgggaaagaaggtggatgaaacagtgctagataaaattgtccaggagacgtcatttgagaaaatgaaagaaaatcccatgacaaatcgttctacagtttccaaatctatcttggaccagtcaatttcctccttcatgagaaaaggaactgtgggggattggaaaaaccacttcactgttgcccagaatgagaggtttgatgaaatctatagaagaaagatggaaggaacctccataaacttctgcatggaactctgagcaagatgtaaataaaattaaaaggtggatggcaagagtgcaaatactatcttcaatccttcagtcccagccagaagaatctctgaaagcatattgtgaatgtatacaatgtagtacaaacaatctctgtgatgattaacagtatgtcaccacttcattttttaaaaaggatcacgtctaatgcccattttcccaactattctttccaaagtaagatataaggtagcttaataaactaagtaaaacgta

SEQ ID NO: 281106 - DNA, 1626 bp, Homo sapiens
agcttcgaggccagtgggaggagggaggggccaggcagctgagggccaggaaagatgtgaaaaactctagctggtgaccgagaggaggagtagagtgtgcccttagttcatatgaactagagggagttggtatttgcacagcagtcagggtcacatgagtgatcatggtacagtgagaagttctccctcccagggccaggtcacagggtttgtttctgttcaatccggattcttccagtaaaagcttcaacttcccacactgaagctgagagcctcccaaagtgctggctacctgctgagcgcccccgtaactctgacacagtagtaatttgagcctctgcaattgccgtctgcttcctgtgaaagtcctttccgtgcccactgacccttgagtgggcctttgagctgctgactttcagctggaacttgaagggaccccaaccctgagacactatggccctgacctcagacctggggaaacagataaaactgaaagaggtggaggggaccctcctgcagcctgcaactgtggacaactggagccagatccagagcttcgaggccaaaccagatgatctcctcatctgcacctaccctaaagcagggacaacgtggattcaggaaattgtggatatgattgaacagaatggggacgtggagaagtgccagcgagccatcatccaacaccgccatcctttcattgagtgggctcggccaccccaaccttctgagacaggatttcaccatgttgcccaggctggtctcaaactcctgagctcaagcaatccacctgcctcaacctcccaaagtgccaagattacagacctgctgccaccgtctttctgggaaaacaactgcaagttcctttatgtagctcgaaatgccaaagactgtatggtttcctactaccatttccaaaggatgaaccacatgcttcctgaccctggtacctgggaagagtattttgaaaccttcatcaatggaaaagtggtttggggttcctggtttgaccacgtgaaaggatggtgggagatgaaagacagacaccagattctcttcctcttctatgaggacataaagagggacccaaagcatgaaattcggaaggtgatgcagttcatgggaaagaaggtggatgaaacagtgctagataaaattgtccaggagacgtcatttgagaaaatgaaagaaaatcccatgacaaatcgttctacagtttccaaatctatcttggaccagtcaatttcctccttcatgagaaaaggaactgtgggggattggaaaaaccacttcactgttgcccagaatgagaggtttgatgaaatctatagaagaaagatggaaggaacctccataaacttctgcatggaactctgagcaagatgtaaataaaattaaaaggtggatggcaagagtgcaaatactatcttcaatccttcagtcccagccagaagaatctctgaaagcatattgtgaatgtatacaatgtagtacaaacaatctctgtgatgattaacagtatgtcaccacttcattttttaaaaaggatcacgtctaatgcccattttcccaactattctttccaaagtaagatataaggtagcttaataaactaagtaaaacgta

SEQ ID NO: 281107 - DNA, 2480 bp, Homo sapiens
agcttcgaggccagtgggaggagggaggggccaggcagctgagggccaggaaagatgtgaaaaactctagctggtgaccgagaggaggagtagagtgtgcccttagttcatatgaactagagggagttggtatttgcacagcagtcagggtcacatgagtgatcatggtacagtgagaagttctccctcccagggccaggtcacagggtttgtttctgttcaatccggattcttccagtaaaagcttcaacttcccacactgaagctgagagcctcccaaagtgctggctacctgctgagcgcccccgtaactctgacacagtagtaatttgagcctctgcaattgccgtctgcttcctgtgaaagtcctttccgtgcccactgacccttgagtgggcctttgagctgctgactttcagctggaacttgaagggaccccaaccctgagacactatggccctgacctcagacctggggaaacagataaaactgaaagaggtggaggggaccctcctgcagcctgcaactgtggacaactggagccagatccagagcttcgaggccaaaccagatgatctcctcatctgcacctaccctaaagcagggacaacgtggattcaggaaattgtggatatgattgaacagaatggggacgtggagaagtgccagcgagccatcatccaacaccgccatcctttcattgagtgggctcggccaccccaaccttctggtgtggaaaaagccaaagcaatgccctctccacggatactaaagactcacctttccactcagctgctgccaccgtctttctgggaaaacaactgcaagttcctttatgtagctcgaaatgccaaagactgtatggtttcctactaccatttccaaaggatgaaccacatgcttcctgaccctggtacctgggaagagtattttgaaaccttcatcaatggaaaagtggtttggggttcctggtttgaccacgtgaaaggatggtgggagatgaaagacagacaccagattctcttcctcttctatgaggacataaagagggacccaaagcatgaaattcggaaggtgatgcagttcatgggaaagaaggtggatgaaacagtgctagataaaattgtccaggagacgtcatttgagaaaatgaaagaaaatcccatgacaaatcgttctacagtttccaaatctatcttggaccagtcaatttcctccttcatgagaaaaggaactgtgggggattggaaaaaccacttcactgttgcccagaatgagaggtttgatgaaatctatagaagaaagatggaaggaacctccataaacttctgcatggaactctgagcaagatgtaaataaaattaaaaggtggatggcaagagtgcaaatactatcttcaatccttcagtcccagccagaagaatctctgaaagcatattgtgaatgtatacaatgtagtacaaacaatctctgtgatgattaacagtatgtcaccacttcattttttaaaaaggatcacgtctaatgcccattttcccaactattctttccaaagtaagatataaggtagcttaataaactaagtaaaacgtatgacttgagtacaataggattgttttaatccccattattctggaaagtgcatcctagtctcccagtctataacatcataataccttgaggtataagtccaaatattaggttatatctatattaaaaacaaaatttctgtcatctgtcctggccattcaggcaactccagcctgggctcaatcctggagttctgtctggtcactatcagaaggaacactttgagggaaaccctggtgcagccagccctgaggaaacatggcctgagtgcctcactggtgggtgggaataaaatggaagtgcacagaggagatgtcagaagaccaaaacttggtgaatagtcccagtgctaggtcatataggaaacagaaagcatgacagtggccttttgggaacccaagttacgtcctggtgaaagcagaaaggaggagacaggatggctgtcaacaacgtcagcatgggcatggctcccaggcatggaggtaattgggtcttggcttcaatgccacccttttgggaagccctaaaccaagtgaggtgttcttttcccttgcttcccatatttgtcccagttgcagccctgttgttatgtatttactcttcaatttcttatttatacctctcactcaattgttaattctttgggttcagtctcatgccatatttactcctagtacctaatgcagtgcctggcacacagcaagtgcccttgagaacttgtagagggagtaaaaaagtgcatggataaatgactgcagcaaatcacaaattttgaactttgacccttttcttttagtcccaaatagtggcattccatagctgagggtagtaggagcagttcaccctgggagctcttaagcgagctgggatactctagaatcaccggggca

SEQ ID NO: 281108 - DNA, 1247 bp, Homo sapiens
gcagagctgaaatgattagagatggaaatcattcaagccgaggaggccaggagaaaaataggagctattttcttgctgtgtggctcaaactcttaaacatgaagcttctgtgcatctttgggagggtgcgcgaggggtcatcagtttacgttgatactgtggaagtctcctattcaagtggcaggtcatagtttacagaaaaagattttgctcctgataccaaaggggcaatcaggcaatctaatcctcaccaatccctaattgattagctaattaaaaggactgagtttgaagtagagagcagacttggtgacaaagcagagacagaaagaagagggaggtcacaaggccaagtcgcagggccagcactgcagaactgagccagagtgcacagcaaccctcaggatggctctgcctaagggaactctgtgaaagtccactttttataccatcttttacccacctcttttcttaccccaaagttcctttatgtagctcgaaatgccaaagactgtatggtttcctactaccatttccaaaggatgaaccacatgcttcctgaccctggtacctgggaagagtattttgaaaccttcatcaatggaaaagtggtttggggttcctggtttgaccacgtgaaaggatggtgggagatgaaagacagacaccagattctcttcctcttctatgaggacataaagagggacccaaagcatgaaattcggaaggtgatgcagttcatgggaaagaaggtggatgaaacagtgctagataaaattgtccaggagacgtcatttgagaaaatgaaagaaaatcccatgacaaatcgttctacagtttccaaatctatcttggaccagtcaatttcctccttcatgagaaaaggaactgtgggggattggaaaaaccacttcactgttgcccagaatgagaggtttgatgaaatctatagaagaaagatggaaggaacctccataaacttctgcatggaactctgagcaagatgtaaataaaattaaaaggtggatggcaagagtgcaaatactatcttcaatccttcagtcccagccagaagaatctctgaaagcatattgtgaatgtatacaatgtagtacaaacaatctctgtgatgattaacagtatgtcaccacttcattttttaaaaaggatcacgtctaatgcccattttcccaactattctttccaaagtaagatataaggtagcttaataaactaagtaaaacgta

SEQ ID NO: 281109 - DNA, 3370 bp, Homo sapiens
aggtgggaaggcagttatgacagttgagaagtagtagaagacacggaaggcacagaaggcagacttcgctcagcacaaagaagaattttctgataaccatactggcaaaatgaactgggctgccttcggagggtctgaattcttcatcccagaaggcattcagatagattcgagatgcccactaagcagaaatatcacggaatggtaccattactatggcattgcagtgaaagaaagctcccaatattatgatgtgatgtattccaagaaaggagctgcctgggtgagtgagacgggcaagaaagaagtgagcaaacagacagtggcatattcaccccggtccaaactcggaacactgctgccagaatttcccaatgtcaaagatctaaatctgccagccagcctgcctgaggagaaggtttctacctttattatgatgtacagaacacactgtcagagaatactggacactgtaataagagccaactttgatgaggttcaaagtttccttctgcacttttggcaaggaatgccgccccacatgctgcctgtgctgggctcctccacggtggtgaacattgtcggcgtgtgtgactccatcctctacaaagctatctccggggtgctgatgcccactgtgctgcaggcattacctgacagcttaactcaggtgattcgaaagtttgccaagcaactggatgagtggctaaaagtggctctccacgacctcccagaaaacttgcgaaacatcaagttcgaattgtcgagaaggttctcccaaattctgagacggcaaacatcactaaatcatctctgccaggcatctcgaacagtgatccacagtgcagacatcacgttccaaatgctggaagactggaggaacgtggacctgaacagcatcaccaagcaaaccctttacaccatggaagactctcgcgatgagcaccggaaactcatcacccaattatatcaggagtttgaccatctcttggaggagcagtctcccatcgagtcctacattgagtggctggataccatggttgaccgctgtgttgtgaaggtggctgccaagagacaagggtccttgaagaaagtggcccagcagttcctcttgatgtggtcctgtttcggcacaagggtgatccgggacatgaccttgcacagcgcccccagcttcgggtcttttcacctaattcacttaatgtttgatgactacgtgctctacctgttagaatctctgcactgtcaggagcgggccaatgagctcatgcgagccatgaagggagaaggaagcactgcagaagtccgagaagagatcatcttgacagaggctgccgcaccaaccccttcaccagtgccatcgttttctccagcaaaatctgccacatctgtggaagtgccacctccctcttcccctgttagcaatccttcccctgagtacactggcctcagcactacaggagcaatgcaggcttacacgtggtctctaacatacacagtgacgacggctgctgggtccccagctgagaactcccaacagctgccctgtatgaggaacactcacgtgccttcttcctccgtcacacacaggataccagtttatccccacagagaggaacatggatacacgggaagctataactatgggagctatggcaaccagcatcctcaccccatgcagagccagtatccggccctccctcatgacacagctatctctgggccactccactatgccccttaccacaggagctctgcacagtacccttttaatagccccacttcccggatggaaccttgtttgatgagcagtactcccagactgcatcctaccccagtcactccccgctggccagaggtgccctcagccaacacgtgctacacaagcccgtctgtgcattctgcgaggtacggaaactctagtgacatgtatacacctctgacaacgcgcaggaattctgaatatgagcacatgcaacactttcctggctttgcttacatcaacggagaggcctctacaggatgggctaaatgactgctatcataggcatccatatttaatattaataataataattaataataataataaacccaacacccatcccccagaagactttatctctatacattgttaactcatggggctattcctaagtgcccattttcctaatgaacatgaggatgggatcaatgtgggatgaataaactttagttcagaaacaggacttactaaaagtcagtgggactgggtttctgtagccaagccagacttgactgtttctgtagagcactatctcgggcaggccattctgtgccttttccctctgttccatgactttgctttgtgttggcaaccacttctagtaagctactgattttcctgttgacaaaatctctttagtcttgaaggatggatactggagacagaatctggtttgtgttcttggatgggcacataatttaccaagagcattcaccttgccatctgtcttgtcattgtactgtacaaggaacagccctcagacgtgttctgcacatcccttcttcctggtggtaccatccctatttcctggagcaccagggctaaatggggagctatctggaaactctagattttctgtcatacccacatctgtcacagtacctgcattgtcttggaatgtaagcactgtcttgagggaaggaagaggtctgttctgtattgccttaagttgattgaggtttgtaggagactggttcttctacatacaaggatttgtcttaagtttgcacaatggctagtgtcagcaaaaggcaggagagggtttctgtttttttttaagttctatgagaatgtggatttatggcattgagtatcacactcagctctgctgtgttaactttgtgaaactggatggaacaaactttaacttaccaagcaccaagtgtgaaagtgactttcacggttccttcataaaactataataatatccgacactttgatagaaaaaaattcaaagctgtgcctttgagcctatactatactgtgtatgtgtggaaataaaaatgtattgtacttttggagaattttttgtaggcatttttctgtcagatttgtagtaatttgtgaggtttgttagagattaatataggttttctttctgtattataaaatgcaccaagcaattatggtggacctattaccctatgggtaagaaataaatggaaatatgacatcggatgtttcagcaactgttctgtaaataaaatctttgatcacaccactcagtgtgataattgtgtctacagctaaaatggaaatagttttatctgtacagttgtgcaagatatgaatggtttcacactcaaataaaaaatattgaaacga

SEQ ID NO: 281110 - DNA, 2618 bp, Homo sapiens
  misc_feature (1782)..(1782): n is a, c, g, or t
  misc_feature (1788)..(1788): n is a, c, g, or t
  misc_feature (1833)..(1833): n is a, c, g, or t
  misc_feature (2546)..(2546): n is a, c, g, or t
  misc_feature (2606)..(2606): n is a, c, g, or t
gcacttgctcccgtcgggtcgcccggcttcaccggacccgcaggctcccggggcagggccggggccagagctcgcgtgtcggcgggacatgcgctgcgtcgcctctaacctcgggctgtgctctttttccaggtggcccgccggtttctgagccttctgccctgcggggacacggtctgcaccctgcccgcggccacggaccatgaccatgaccctccacaccaaagcatccgggatggccctactgcatcagatccaagggaacgagctggagcccctgaaccgtccgcagctcaagatccccctggagcggcccctgggcgaggtgtacctggacagcagcaagcccgccgtgtacaactaccccgagggcgccgcctacgagttcaacgccgcggccgccgccaacgcgcaggtctacggtcagaccggcctcccctacggccccgggtctgaggctgcggcgttcggctccaacggcctggggggtttccccccactcaacagcgtgtctccgagcccgctgatgctactgcacccgccgccgcagctgtcgcctttcctgcagccccacggccagcaggtgccctactacctggagaacgagcccagcggctacacggtgcgcgaggccggcccgccggcattctacaggccaaattcagataatcgacgccagggtggcagagaaagattggccagtaccaatgacaagggaagtatggctatggaatctgccaaggagactcgctactgtgcagtgtgcaatgactatgcttcaggctaccattatggagtctggtcctgtgagggctgcaaggccttcttcaagagaagtattcaaggacataacgactatatgtgtccagccaccaaccagtgcaccattgataaaaacaggaggaagagctgccaggcctgccggctccgcaaatgctacgaagtgggaatgatgaaaggtgatgaggaaaaagaaaataatagagcatccaagccccactccactcctgctactctgcaatggctggaggagaactatgagattgcagagggggtctgcatccctcgcagtgccctctatatgcattacctggatttctgcgagaagaatgatacccaacctgtcaatgctgccagctttggaaagatcataaggcagcagtttcctcagttaaccaccagaagactcgggacccgaggacagtcaaagtaagcaccggacggccattccacctgcagagcgcacatctatgggcctcgagacaggccacacccttggctctttatcctgagctctgtctgcaggcctggcagaagtctgtgcctagagggaatatggaagagctttatgacggccagggcccctctctcaggactcctgaaagagaggttgtccaaaagcccaagacgagttggctctgctgctttaaggaatctgattttgtaccaccctgcttttaggcatattttgtaaaatagtcttgggcatcattgaaaggattgccttgtggcctcttggaggatcaccaggttatctggactgttttgctgagcaaactctgctctgatagtatgcagtagaccagagaagcaaaactgtactattccctgcatgggagatggggcagaaaggtccagctgcaccatggtccatgagggttcacggcttcccattcatcagtttcatcaagcaaccaaccaactcatgctttatactttctgtgtgtcacatatgtggtgctaggtactgggaacacaggagcaaatcagttgctgccctcntggagnatagattccggtgggaaacagacaaaacagagaatcagattgtgncaaagttgtagcagagagcaacaaaagaggaatggccagggaaggtctttcagaggaggttacatttaagtaaagactaggggagtgcagaaggctgtgcagacacttgtctgctaggtgtgagtcagtgggaagggaatctcttcctgtactgctcgaccttcattaaaatctgcatttataggacttgcctctaaggatgtttcaaaaattgttggacgataataggtgttccatgaagaagagcagcaggccctataagtttggttaacactaagtttaaacagtttcctttactgcaagacttctcagaacccttattatgctaatgtacaaggtgactccactagagggtgccttattatgcagcatttctaagcattttgaccacgttgagcaggtcagcacatagtgacctataaaacactgtaactttttagaaaggcaaccatataggacttttaagacttgtcttgaaggatgtgtcaaaagcatgtccagtgctctcaccctgggccaaacccctgtccctcaccagctcctctcatccctgggcagcacattcccatcctccaagggtgggtttgattttggagccaaggtagggaaagaaaatggatgatcgaactgggaaaaacccttttttggtattctgaaaatgagactaatttttttggtgtagctcagaagcttttgaaccagtctctaaaggnatttccagaagactgttgaacaaaggacctcttggaataaattcctaataattttccaanatgactattctg

SEQ ID NO: 281111 - DNA, 2004 bp, Homo sapiens
aggtgggaaggcagttatgacagttgagaagtagtagaagacacggaaggcacagaaggcagacttcgctcagcacaaagaagaattttctgataaccatactggcaaaatgaactgggctgccttcggagggtctgaattcttcatcccagaaggcattcagatagattcgagatgcccactaagcagaaatatcacggaatggtaccattactatggcattgcagtgaaagaaagctcccaatattatgatgtgatgtattccaagaaaggagctgcctgggtgagtgagacgggcaagaaagaagtgagcaaacagacagtggcatattcaccccggtccaaactcggaacactgctgccagaatttcccaatgtcaaagatctaaatctgccagccagcctgcctgaggagaaggtttctacctttattatgatgtacagaacacactgtcagagaatactggacactgtaataagagccaactttgatgaggttcaaagtttccttctgcacttttggcaaggaatgccgccccacatgctgcctgtgctgggctcctccacggtggtgaacattgtcggcgtgtgtgactccatcctctacaaagctatctccggggtgctgatgcccactgtgctgcaggcattacctgacagcttaactcaggtgattcgaaagtttgccaagcaactggatgagtggctaaaagtggctctccacgacctcccagaaaacttgcgaaacatcaagttcgaattgtcgagaaggttctcccaaattctgagacggcaaacatcactaaatcatctctgccaggcatctcgaacagtgatccacagtgcagacatcacgttccaaatgctggaagactggaggaacgtggacctgaacagcatcaccaagcaaaccctttacaccatggaagactctcgcgatgagcaccggaaactcatcacccaattatatcaggagtttgaccatctcttggaggagcagtctcccatcgagtcctacattgagtggctggataccatggttgaccgctgtgttgtgaaggtggctgccaagagacaagggtccttgaagaaagtggcccagcagttcctcttgatgtggtcctgtttcggcacaagggtgatccgggacatgaccttgcacagcgcccccagcttcgggtcttttcacctaattcacttaatgtttgatgactacgtgctctacctgttagaatctctgcactgtcaggagcgggccaatgagctcatgcgagccatgaagggagaaggaagcactgcagaagtccgagaagagatcatcttgacagaggctgccgcaccaaccccttcaccagtgccatcgttttctccagcaaaatctgccacatctgtggaagtgccacctccctcttcccctgttagcaatccttcccctgagtacactggcctcagcactacaggagcaatgcaggcttacacgtggtctctaacatacacagtgacgacggctgctgggtccccagctgagaactcccaacagctgccctgtatgaggaacactcacgtgccttcttcctccgtcacacacaggataccagtttatccccacagagaggaacatggatacacgggaagctataactatgggagctatggcaaccagcatcctcaccccatgcagagccagtatccggccctccctcatgacacagctatctctgggccactccactatgccccttaccacaggagctctgcacaggtgaagaaatggagactatgagcagcttaatgccttgctgatggttacagtttaagtggcagagctgggatctgaaaattactccaggcacagtggctcagacctacaatcacagcactttgggaggccaaggtggaaagatcacttgaggccaggagtttaagaccatggcaacatagtgagactctgtctctctctatatattaatttttaaaacacaataaaagaaatactactccaga

SEQ ID NO: 281112 - DNA, 1660 bp, Homo sapiens
atgcaacctcaagctaattttaactttgtggaatttctttcccctcaacaagtacccttttaatagccccacttcccggatggaaccttgtttgatgagcagtactcccagactgcatcctaccccagtcactccccgctggccagaggtgccctcagccaacacgtgctacacaagcccgtctgtgcattctgcgaggtacggaaactctagtgacatgtatacacctctgacaacgcgcaggaattctgaatatgagcacatgcaacactttcctggctttgcttacatcaacggagaggcctctacaggatgggctaaatgactgctatcataggcatccatatttaatattaataataataattaataataataataaacccaacacccatcccccagaagactttatctctatacattgttaactcatggggctattcctaagtgcccattttcctaatgaacatgaggatgggatcaatgtgggatgaataaactttagttcagaaacaggacttactaaaagtcagtgggactgggtttctgtagccaagccagacttgactgtttctgtagagcactatctcgggcaggccattctgtgccttttccctctgttccatgactttgctttgtgttggcaaccacttctagtaagctactgattttcctgttgacaaaatctctttagtcttgaaggatggatactggagacagaatctggtttgtgttcttggatgggcacataatttaccaagagcattcaccttgccatctgtcttgtcattgtactgtacaaggaacagccctcagacgtgttctgcacatcccttcttcctggtggtaccatccctatttcctggagcaccagggctaaatggggagctatctggaaactctagattttctgtcatacccacatctgtcacagtacctgcattgtcttggaatgtaagcactgtcttgagggaaggaagaggtctgttctgtattgccttaagttgattgaggtttgtaggagactggttcttctacatacaaggatttgtcttaagtttgcacaatggctagtgtcagcaaaaggcaggagagggtttctgtttttttttaagttctatgagaatgtggatttatggcattgagtatcacactcagctctgctgtgttaactttgtgaaactggatggaacaaactttaacttaccaagcaccaagtgtgaaagtgactttcacggttccttcataaaactataataatatccgacactttgatagaaaaaaattcaaagctgtgcctttgagcctatactatactgtgtatgtgtggaaataaaaatgtattgtacttttggagaattttttgtaggcatttttctgtcagatttgtagtaatttgtgaggtttgttagagattaatataggttttctttctgtattataaaatgcaccaagcaattatggtggacctattaccctatgggtaagaaataaatggaaatatgacatcggatgtttcagcaactgttctgtaaataaaatctttgatcacaccactcagtgtgataattgtgtctacagctaaaatggaaatagttttatctgtacagttgtgcaagatatgaatggtttcacactcaaataaaaaatattgaaacga

SEQ ID NO: 281113 - DNA, 2186 bp, Homo sapiens
tggagaggccacagctgctggcttcctgggcttctccaaactcctgtgtgtcgccactgccaccggcagggagccaggagagagacagaaaggggctgagacagaatgatcaaaaggagagcccaccctggtgcgggaggcgacaggaccaggcctcgacggcgccgttccactgagagctggattgaaagatgtctcaacgaaagtgaaaacaaacgttattccagccacacatctctggggaatgtttctaatgatgaaaatgaggaaaaagaaaataatagagcatccaagccccactccactcctgctactctgcaatggctggaggagaactatgagattgcagagggggtctgcatccctcgcagtgccctctatatgcattacctggatttctgcgagaagaatgatacccaacctgtcaatgctgccagctttggaaagatcataaggcagcagtttcctcagttaaccaccagaagactcgggacccgaggacagtcaaagtaccattactatggcattgcagtgaaagaaagctcccaatattatgatgtgatgtattccaagaaaggagctgcctgggtgagtgagacgggcaagaaagaagtgagcaaacagacagtggcatattcaccccggtccaaactcggaacactgctgccagaatttcccaatgtcaaagatctaaatctgccagccagcctgcctgaggagaaggtttctacctttattatgatgtacagaacacactgtcagagaatactggacactgtaataagagccaactttgatgaggttcaaagtttccttctgcacttttggcaaggaatgccgccccacatgctgcctgtgctgggctcctccacggtggtgaacattgtcggcgtgtgtgactccatcctctacaaagctatctccggggtgctgatgcccactgtgctgcaggcattacctgacagcttaactcaggtgattcgaaagtttgccaagcaactggatgagtggctaaaagtggctctccacgacctcccagaaaacttgcgaaacatcaagttcgaattgtcgagaaggttctcccaaattctgagacggcaaacatcactaaatcatctctgccaggcatctcgaacagtgatccacagtgcagacatcacgttccaaatgctggaagactggaggaacgtggacctgaacagcatcaccaagcaaaccctttacaccatggaagactctcgcgatgagcaccggaaactcatcacccaattatatcaggagtttgaccatctcttggaggagcagtctcccatcgagtcctacattgagtggctggataccatggttgaccgctgtgttgtgaaggtggctgccaagagacaagggtccttgaagaaagtggcccagcagttcctcttgatgtggtcctgtttcggcacaagggtgatccgggacatgaccttgcacagcgcccccagcttcgggtcttttcacctaattcacttaatgtttgatgactacgtgctctacctgttagaatctctgcactgtcaggagcgggccaatgagctcatgcgagccatgaagggagaaggaagcactgcagaagtccgagaagagatcatcttgacagaggctgccgcaccaaccccttcaccagtgccatcgttttctccagcaaaatctgccacatctgtggaagtgccacctccctcttcccctgttagcaatccttcccctgagtacactggcctcagcactacaggtaatggaaagtccttcaaaaactttgggtagttaatgtttgaagaaagggctttctgccagcctgggcaacatagtgagacttcatttccacacacacaaaaagccagacatcttggctcacacctgtagtcccagctacttgggaggctgaggtgggagaattgcttgagcccaggagctacgatcgcaccactgcattctagccttagtgatacagtgagaccttgtctcaaaaaaggaaaaacagggctttctggaaaaacattcttctcccacaatctccaaaagataatgccaaaacctgggtatcttcctggatttgtgaatgacgtacaggtattcatttattcattggtacacattctgtatgctgctgttttcaagttggcaaattaagcatatgataaaatcccaaaact

SEQ ID NO: 281114 - DNA, 3352 bp, Homo sapiens
agcggggagaagccgttccgggcggaggcgagcagcagcgcgcggtccctacggtctgcgcgcggaattttctgataaccatactggcaaaatgaactgggctgccttcggagggtctgaattcttcatcccagaaggcattcagatagattcgagatgcccactaagcagaaatatcacggaatggtaccattactatggcattgcagtgaaagaaagctcccaatattatgatgtgatgtattccaagaaaggagctgcctgggtgagtgagacgggcaagaaagaagtgagcaaacagacagtggcatattcaccccggtccaaactcggaacactgctgccagaatttcccaatgtcaaagatctaaatctgccagccagcctgcctgaggagaaggtttctacctttattatgatgtacagaacacactgtcagagaatactggacactgtaataagagccaactttgatgaggttcaaagtttccttctgcacttttggcaaggaatgccgccccacatgctgcctgtgctgggctcctccacggtggtgaacattgtcggcgtgtgtgactccatcctctacaaagctatctccggggtgctgatgcccactgtgctgcaggcattacctgacagcttaactcaggtgattcgaaagtttgccaagcaactggatgagtggctaaaagtggctctccacgacctcccagaaaacttgcgaaacatcaagttcgaattgtcgagaaggttctcccaaattctgagacggcaaacatcactaaatcatctctgccaggcatctcgaacagtgatccacagtgcagacatcacgttccaaatgctggaagactggaggaacgtggacctgaacagcatcaccaagcaaaccctttacaccatggaagactctcgcgatgagcaccggaaactcatcacccaattatatcaggagtttgaccatctcttggaggagcagtctcccatcgagtcctacattgagtggctggataccatggttgaccgctgtgttgtgaaggtggctgccaagagacaagggtccttgaagaaagtggcccagcagttcctcttgatgtggtcctgtttcggcacaagggtgatccgggacatgaccttgcacagcgcccccagcttcgggtcttttcacctaattcacttaatgtttgatgactacgtgctctacctgttagaatctctgcactgtcaggagcgggccaatgagctcatgcgagccatgaagggagaaggaagcactgcagaagtccgagaagagatcatcttgacagaggctgccgcaccaaccccttcaccagtgccatcgttttctccagcaaaatctgccacatctgtggaagtgccacctccctcttcccctgttagcaatccttcccctgagtacactggcctcagcactacaggagcaatgcaggcttacacgtggtctctaacatacacagtgacgacggctgctgggtccccagctgagaactcccaacagctgccctgtatgaggaacactcacgtgccttcttcctccgtcacacacaggataccagtttatccccacagagaggaacatggatacacgggaagctataactatgggagctatggcaaccagcatcctcaccccatgcagagccagtatccggccctccctcatgacacagctatctctgggccactccactatgccccttaccacaggagctctgcacagtacccttttaatagccccacttcccggatggaaccttgtttgatgagcagtactcccagactgcatcctaccccagtcactccccgctggccagaggtgccctcagccaacacgtgctacacaagcccgtctgtgcattctgcgaggtacggaaactctagtgacatgtatacacctctgacaacgcgcaggaattctgaatatgagcacatgcaacactttcctggctttgcttacatcaacggagaggcctctacaggatgggctaaatgactgctatcataggcatccatatttaatattaataataataattaataataataataaacccaacacccatcccccagaagactttatctctatacattgttaactcatggggctattcctaagtgcccattttcctaatgaacatgaggatgggatcaatgtgggatgaataaactttagttcagaaacaggacttactaaaagtcagtgggactgggtttctgtagccaagccagacttgactgtttctgtagagcactatctcgggcaggccattctgtgccttttccctctgttccatgactttgctttgtgttggcaaccacttctagtaagctactgattttcctgttgacaaaatctctttagtcttgaaggatggatactggagacagaatctggtttgtgttcttggatgggcacataatttaccaagagcattcaccttgccatctgtcttgtcattgtactgtacaaggaacagccctcagacgtgttctgcacatcccttcttcctggtggtaccatccctatttcctggagcaccagggctaaatggggagctatctggaaactctagattttctgtcatacccacatctgtcacagtacctgcattgtcttggaatgtaagcactgtcttgagggaaggaagaggtctgttctgtattgccttaagttgattgaggtttgtaggagactggttcttctacatacaaggatttgtcttaagtttgcacaatggctagtgtcagcaaaaggcaggagagggtttctgtttttttttaagttctatgagaatgtggatttatggcattgagtatcacactcagctctgctgtgttaactttgtgaaactggatggaacaaactttaacttaccaagcaccaagtgtgaaagtgactttcacggttccttcataaaactataataatatccgacactttgatagaaaaaaattcaaagctgtgcctttgagcctatactatactgtgtatgtgtggaaataaaaatgtattgtacttttggagaattttttgtaggcatttttctgtcagatttgtagtaatttgtgaggtttgttagagattaatataggttttctttctgtattataaaatgcaccaagcaattatggtggacctattaccctatgggtaagaaataaatggaaatatgacatcggatgtttcagcaactgttctgtaaataaaatctttgatcacaccactcagtgtgataattgtgtctacagctaaaatggaaatagttttatctgtacagttgtgcaagatatgaatggtttcacactcaaataaaaaatattgaaacga

SEQ ID NO: 281115 - DNA, 3306 bp, Homo sapiens
aggtgggaaggcagttatgacagttgagaagtagtagaagacacggaaggcacagaaggcagacttcgctcagcacaaagaagaattttctgataaccatactggcaaaatgaactgggctgccttcggagggtctgaattcttcatcccagaaggcattcagatagattcgagatgcccactaagcagaaatatcacggaatgaaaggagctgcctgggtgagtgagacgggcaagaaagaagtgagcaaacagacagtggcatattcaccccggtccaaactcggaacactgctgccagaatttcccaatgtcaaagatctaaatctgccagccagcctgcctgaggagaaggtttctacctttattatgatgtacagaacacactgtcagagaatactggacactgtaataagagccaactttgatgaggttcaaagtttccttctgcacttttggcaaggaatgccgccccacatgctgcctgtgctgggctcctccacggtggtgaacattgtcggcgtgtgtgactccatcctctacaaagctatctccggggtgctgatgcccactgtgctgcaggcattacctgacagcttaactcaggtgattcgaaagtttgccaagcaactggatgagtggctaaaagtggctctccacgacctcccagaaaacttgcgaaacatcaagttcgaattgtcgagaaggttctcccaaattctgagacggcaaacatcactaaatcatctctgccaggcatctcgaacagtgatccacagtgcagacatcacgttccaaatgctggaagactggaggaacgtggacctgaacagcatcaccaagcaaaccctttacaccatggaagactctcgcgatgagcaccggaaactcatcacccaattatatcaggagtttgaccatctcttggaggagcagtctcccatcgagtcctacattgagtggctggataccatggttgaccgctgtgttgtgaaggtggctgccaagagacaagggtccttgaagaaagtggcccagcagttcctcttgatgtggtcctgtttcggcacaagggtgatccgggacatgaccttgcacagcgcccccagcttcgggtcttttcacctaattcacttaatgtttgatgactacgtgctctacctgttagaatctctgcactgtcaggagcgggccaatgagctcatgcgagccatgaagggagaaggaagcactgcagaagtccgagaagagatcatcttgacagaggctgccgcaccaaccccttcaccagtgccatcgttttctccagcaaaatctgccacatctgtggaagtgccacctccctcttcccctgttagcaatccttcccctgagtacactggcctcagcactacaggagcaatgcaggcttacacgtggtctctaacatacacagtgacgacggctgctgggtccccagctgagaactcccaacagctgccctgtatgaggaacactcacgtgccttcttcctccgtcacacacaggataccagtttatccccacagagaggaacatggatacacgggaagctataactatgggagctatggcaaccagcatcctcaccccatgcagagccagtatccggccctccctcatgacacagctatctctgggccactccactatgccccttaccacaggagctctgcacagtacccttttaatagccccacttcccggatggaaccttgtttgatgagcagtactcccagactgcatcctaccccagtcactccccgctggccagaggtgccctcagccaacacgtgctacacaagcccgtctgtgcattctgcgaggtacggaaactctagtgacatgtatacacctctgacaacgcgcaggaattctgaatatgagcacatgcaacactttcctggctttgcttacatcaacggagaggcctctacaggatgggctaaatgactgctatcataggcatccatatttaatattaataataataattaataataataataaacccaacacccatcccccagaagactttatctctatacattgttaactcatggggctattcctaagtgcccattttcctaatgaacatgaggatgggatcaatgtgggatgaataaactttagttcagaaacaggacttactaaaagtcagtgggactgggtttctgtagccaagccagacttgactgtttctgtagagcactatctcgggcaggccattctgtgccttttccctctgttccatgactttgctttgtgttggcaaccacttctagtaagctactgattttcctgttgacaaaatctctttagtcttgaaggatggatactggagacagaatctggtttgtgttcttggatgggcacataatttaccaagagcattcaccttgccatctgtcttgtcattgtactgtacaaggaacagccctcagacgtgttctgcacatcccttcttcctggtggtaccatccctatttcctggagcaccagggctaaatggggagctatctggaaactctagattttctgtcatacccacatctgtcacagtacctgcattgtcttggaatgtaagcactgtcttgagggaaggaagaggtctgttctgtattgccttaagttgattgaggtttgtaggagactggttcttctacatacaaggatttgtcttaagtttgcacaatggctagtgtcagcaaaaggcaggagagggtttctgtttttttttaagttctatgagaatgtggatttatggcattgagtatcacactcagctctgctgtgttaactttgtgaaactggatggaacaaactttaacttaccaagcaccaagtgtgaaagtgactttcacggttccttcataaaactataataatatccgacactttgatagaaaaaaattcaaagctgtgcctttgagcctatactatactgtgtatgtgtggaaataaaaatgtattgtacttttggagaattttttgtaggcatttttctgtcagatttgtagtaatttgtgaggtttgttagagattaatataggttttctttctgtattataaaatgcaccaagcaattatggtggacctattaccctatgggtaagaaataaatggaaatatgacatcggatgtttcagcaactgttctgtaaataaaatctttgatcacaccactcagtgtgataattgtgtctacagctaaaatggaaatagttttatctgtacagttgtgcaagatatgaatggtttcacactcaaataaaaaatattgaaacga

SEQ ID NO: 281116 - DNA, 803 bp, Homo sapiens
ggcacgagggtaggacgtgatgcaggaggcgcactcgaagatgtagacgatgagcatgagcaccagtgtccccatcccccaacccctggagtctcaccgtgaggaccatggaccggcggcggcagagtgcggcacccacaccaaaactggctaccatgaagaaggagaagccgcagaagatggcaatccaggcaccagcgaagacgtcatccttgcctgagactcccatcagtgggtatacacggtactggtcggctgtcacccatatggtctcagcaaacagggacaggcctgacagctggacagagcggtgggttaggaaggtctgctcggggccagcagccctggcaccaggcatctccacgagcaagttccctccccatttggagcctccactgccctctcagtaaagtgggcaaagacctcgccttccatgagcagcgatgagggtgagcagaggccaggagagaagagacagcccagccagacaaccgacccccacgccccagctgccagtttcttcggggataaaaggggatgccacgtggaaaggctggagcagtggactggcacagaggagatgcttggtccatctgccctcccttgacagtgctgttattccccgaggaggggaacatggccatggccataaacattacaaatgggccaggcaaggtggctcacacctgcagtcccagcattgtgggaggccgaggcgggaggattgcttgagcccaggagtttgagactagcctgggcaatagtgagaccccgtctctacaaaaaataaaaaaattagctag

SEQ ID NO: 281117 - DNA, 1101 bp, Homo sapiens
aacaaaatcagggcagggctacaggtgatctggtgaactggacttggtggatggtgtggaagggactttgggagagacctgtgcccatgataaaagggaagatgaagatgttcctttgagtttgcatgtgtggggcctttttggcatggttgacttgtctgtactccttcctgtgacttgacatcaaaattaggaacagcaagctctaccaaagcaaggtctcctctgcttcctcagactgccgaccagtgctgagaacagggacactgaatatctgtgagctgagcgcatccagccatcaactgactcactcactgaagaacgctacattctgggcatatcttccatgacagtccagcagggtagctgttggaaatccaaacatgtccactcctgcttacgacctcagtcaccacctcttcatatgattcttccatgggctgttcctgagcacctgagggagaaaaacaaacagaaacaaacaggaaagggcagaataattgatatgtgagaaggaaaaagtcaacagttgttgagacataagtgaatgctggagtacagtgactcaattatagcttgctgtgactttgaactcctggactcaacggatcctcccacttcagcctcccaaataactaggactacagcacctggttcttcttgacaactgcacattctgctacatgctgtgatgaccaggagaatcatttaaatttttatttggaggactcacttccaacttggaacacaagctgcaaaggaattccctaccagcatgccagcacatcatttggaagttcaaggtattcttgctcaacagctgcacacacattaaaagtccctggggtacatggcgcctgctgcctggggttggactctgtcgccggggattccagaaattagagtagaattcacagctctgcctctccacctgctgtgaggtcttcaagttacaactccgccgcctatcagggacctccgtgattagtaagggagaaattgtcatatttttctccctagatcacaggtctgaggaagcagtttccccaagattttgtaaaagtggctttataattaaaaacattgattttcctattagaa

SEQ ID NO: 281118 - DNA, 725 bp, Homo sapiens
aacaaaatcagggcagggctacaggtgatctggtgaactggacttggtggatggtgtggaagggactttgggagagacctgtgcccatgataaaagggaagatgaagatgttcctttgagtttgcatgtgtggggcctttttggcatggttgacttgtctgtactccttcctgtgacttgacatcaaaattagccttgcagcttcaggactgctgatcctgattatgctgtgcaaagggtgttcgttccacggtcacactgtctctatgaggcagcaacgtctaggagtgttatccccattgagggggcagataaaccaaggaaggaggagggcaggtgctggcccaagtcacacacagatgaaggcacacatggtcacgcatacctgggaaagcttagcagcactcctggctctcctcaggagttcatagaaccctgcgctgtgtggaccaccgagctcagaagggttgctgtgtgatgctcgaatcaggaggctctgatggactcttcccttctctgtctctccagcatctgactgaggcacgtttatgggactctggcgaggaagactccggtttgcagaacacctccaatggccactgcttaaattgaacaaatgatgcatcacaaaactacaacgggactcttcaaattcacggtcggcgcaatctgtatgtaattgtattgcaacaattgtccagcagatggcagtaaagtgtcatgaa

SEQ ID NO: 281119 - DNA, 553 bp, Homo sapiens
aagggactttgggagagacctgtgcccatgataaaagggaagatgaagatgttcctttgagtttgcatgtgtggggcctttttggcatggttgacttgtctgtactccttcctgtgacttgacatcaaaattaggtaagaaatcatgtatttattcatccttgttgacttttctagttttctgtggcattgattcttgaatggaagccctagcaatgaggaacttggcgtggaaaaggaggacagacatgcactgtctcaaccccctgtgtaaggagtagggtaatccaggccacctgctgcttggaattttcttcctgctcttttattgccctgaagggagttttgggtctgcctagagagtctggtagggttgagagtcaaactgtgcagctggtaagaagaatgggctgtaggcttgttaaaacacagtgtgctgtctctccctcccttttccgcaatctccgcagtttcggggtcagtaggtctgggataggccctgaggatttgcatttcctataagttcccaggtgatgctgatgtcctcaggaacc

SEQ ID NO: 281120 - DNA, 1084 bp, Homo sapiens
ttcggacgcgtgggtcagcttcaacatggccgaagcaagtagcgccaatctaggcagcggctgtgaggaaaaaaggcatgaggggtcgtcttcggaatctgtgccacccggcactaccatttcgagggtgaagctcctcgacaccatggtggacacttttcttcagaagctggtcgccgccggcagctaccagagattcactgactgctataagtgcttctaccagttgcagcctgcgatgacacagcaaatctatgacaagtttatagctcagttgcagacatctatccgggaggaaatctctgacatcaaagaggaggggaacctagaagctgtcttgaatgccttggataaaattgtggaagaaggcaaagtccgcaaagagccagcctggcgccccagcgggatcccagagaaggatctgcacagtgttatggcaccctacttcctgcagcaacgggacaccctgcggcgccatgtgcagaaacaggaggccgagaaccagcagctggcagatgccgtcctggcagggcggaggcaggtggaggagctgcagctacaggtccaggcccagcagcaggcctggcaggctctacacagagaacagagggagctggttgctgtgctgagggagcctgagtgaggagaccgccagccccagaagcagagggcagtcaaggtcaagagcctgtggtccagcatgcctggcctgggcgggctacctctgagaacggctgaaatggtgcccagtccatcagcagtgatggaatttgctggaggactaggccagagcaagcctcactgccactgtgcctttggggcacccttggggttggacatacaccccctttagattcctctgtttcttctacctggataattcttggccatgttctctcttctctaggttcaggtcagctctgcccctccgcccccctcctgctggttccccagcccttttccctggccctggcttggagaatctgttttcaatctccactgattgcccccttgctggccagcccaggggcctttaccatgttctctccacatccgtaaataaacttccttcactacactgtaa

SEQ ID NO: 281121 - DNA, 1049 bp, Homo sapiens
ttcggacgcgtgggtcagcttcaacatggccgaagcaagtagcgccaatctaggcagcggctgtgaggaaaaaaggcatgaggggtcgtcttcggaatctgtgccacccggcactaccatttcgagggtgaagctcctcgacaccatggtggacacttttcttcagaagctggtcgccgccggcagctaccagagattcactgactgctataagtgcttctaccagttgcagcctgcgatgacacagcaaatctatgacaagtttatagctcagttgcagacatctatccgggaggaaatctctgacatcaaagaggaggggaacctagaagctgtcttgaatgccttggataaaattgtggaagaaggcaaagtccgcaaagagccagcctggcgccccagcgggatcccagagaaggatctgcacagtgttatggcaccctacttcctgcagcaacgggacaccctgcggcgccatgtgcagaaacaggaggccgagaaccagcagctggcagatgccgtcctggcagggcggaggcaggtggaggagctgcagctacaggtccaggcccagcagcaggcctggcaggctctacacagagaacagagggagctggttgctgtgctgagggagcctgagtgaggagaccgccagccccagaagcagagggcagtcaaggtcaagagcctgtggtccagcatgcctggcctgggcgggctacctctgagaacggctgaaatggtgcccagtccatcagcagtgatggaatttgctggaggactaggccagagcaagcctcactgccactgtgcctttggggcacccttggggttggacatacaccccctttagattcctctgtttcttctacctggataattcttggccatgttctctcttctctaagtcgggttgccctcgccctctgggtcccagccttctggcggttggaaatggtactcactgtgcctgtggcccgggctcagtttcccgaaaatcctaggaaaaaaaaacgtttggggggagaccgttcttgatgcgataaaag

SEQ ID NO: 281122 - DNA, 799 bp, Homo sapiens
ttcggacgcgtgggtcagcttcaacatggccgaagcaagtagcgccaatctaggcagcggctgtgaggaaaaaaggcatgaggggtcgtcttcggaatctgtgccacccggcactaccatttcgagggtgaagctcctcgacaccatggtggacacttttcttcagaagctggtcgccgccggcagctaccagagattcactgactgctataagtgcttctaccagttgcagcctgcgatgacacagcaaatctatgacaagtttatagctcagttgcagacatctatccgggaggaaatctctgacatcaaagaggaggggaacctagaagctgtcttgaatgccttggataaaattgtggaagaaggcaaagtccgcaaagagccagcctggtgcgaagcccagcggtgcagagtccagcaaaggtgcagcctttgtgtccaagcaggagggcagcgaggtagtgaagagacccaggcgctacctgtatcaatggctgggagccccagtcccctacccggatcccctggagcccaggagggaggtgtgtgagctcaatccggactgtgacgagttggctgaccacatcggctttcaggaggcctatcggcgcttctacggcccggtctagggtgtcgctctgctggcctggccggcaaccccagttctgctcctctccaggcacccttctttcctcttccccttgcccttgccctgacctcccagccctatggatgtggggtccccatcatcccagctgctcccaataatcagaaaggaatttgaaaaaaaaaaaac

SEQ ID NO: 281123 - DNA, 441 bp, Homo sapiens
agtaatcttcaagagataaacacttaaactcacctggggctctcctaagaaggagtgaggatgctgatggggcattgatggggttgaaccatcctcggtgactcgtgcttagatgagagatttgcatccactggctttaaccagggccatgaagtggacagagctcagagtcctgtaatgcgaagcggaggtacccaggcaggctgatggccggcctcatgcttggccctccccacctttgcttctctccttcccgccactaccagagattcactgactgctataagtgcttctaccagttgcagcctgcgatgacacagcaaatctatgacaagtttatagctcagttgcagacatctatccgggaggaaatctctgacatcaaagaggaggggaacctagaagctgtcttgagacctcgggtcctctggtcagcccgcg

SEQ ID NO: 281124 - DNA, 1737 bp, Homo sapiens
ttcggacgcgtgggtcagcttcaacatggccgaagcaagtagcgccaatctaggcagcggctgtgaggaaaaaaggcatgaggggtcgtcttcggaatctgtgccacccggcactaccatttcgagggtgaagctcctcgacaccatggtggacacttttcttcagaagctggtcgccgccggcagctaccagagattcactgactgctataagtgcttctaccagttgcagcctgcgatgacacagcaaatctatgacaagtttatagctcagttgcagacatctatccgggaggaaatctctgacatcaaagaggaggggaacctagaagctgtcttgaatgccttggataaaattgtggaagaaggcaaagtccgcaaagagccagcctggcgccccagcgggatcccagagaaggatctgcacagtgttatggcaccctacttcctgcagcaacgggacaccctgcggcgccatgtgcagaaacaggaggccgagaaccagcagctggcagatgccgtcctggcagggcggaggcaggtggaggagctgcagctacaggtccaggcccagcagcaggcctggcaggctctacacagagaacagagggagctggttgctgtgctgagggagcctgagtgaggagaccgccagccccagaagcagagggcagtcaaggtcaagagcctgtggtccagcatgcctggcctgggcgggctacctctgagaacggctgaaatggtgcccagtccatcagcagtgatggaatttgctggaggactaggccagagcaagcctcactgccactgtgcctttggggcacccttggggttggacatacaccccctttagattcctctgtttcttctacctggataattcttggccatgttctctcttctctaggttcaggtcagctctgcccctccgcccccctcctgctggttccccagcccttttccctggccctggcttggagaatctgttttcaatctccactgattgcccccttgctggccagcccaggggcctttaccatgttctctccacatccgtaaataaacttccttcactacactgtaaaaaaccaaaaaaaaaaaaaaaaaaaaaaaaacaaaaaacacaaaccacaaaaaacaaaaacaaaaaaataaaaaaaaaaactcaacaaaaacacagaacaacaacacactcaaccacacgaaacgaccacaaacaaaccccacgaccggctcggcgcccacccacccccacagaagcataccaacacagacacaaccggtgggcgcgcgccccacccacacgaactaacaccaccggcaccctcctgcctacaggacacgcgtctccgccgcagcacggggggaactcccaccacaaacaacaacggcccggcgcccgacggagcgcttcgcaccacccacagcgcgtgaggccaggatgctgtaaacacacggcgaggcagaggacatatcacaataaaacccccgcggggggggggaaccaaacacacacacacgacagacaagcacgaagacgaaaacgaacacatgcaagaaaccagacacgagacgaacgacaacacaagcaaaagcagcgccaacgcaacacacagcgaaatcagaacacacggatagagccaacaaagccacgatcaagcctcacgcagagctacacgacgcgccagcgagacacacacccaaccagcgcacaacgcgtgaccgcggccagtcacc

SEQ ID NO: 281125 - DNA, 976 bp, Homo sapiens
gtggacaaggcccatcacactcagggaccaacgccgaatgggctgggacacttttcttcagaagctggtcgccgccggctaccagagattcactgactgctataagtgcttctaccagttgcagcctgcgatgacacagcaaatctatgacaagtttatagctcagttgcagacatctatccgggaggaaatctctgacatcaaagaggaggggaacctagaagctgtcttgaatgccttggataaaattgtggaagaaggcaaagtccgcaaagagccagcctggcgccccagcgggatcccagagaaggatctgcacagtgttatggcaccctacttcctgcagcaacgggacaccctgcggcgccatgtgcagaaacaggaggccgagaaccagcagctggcagatgccgtcctggcagggcggaggcaggtggaggagctgcagctacaggtccaggcccagcagcaggcctggcaggctctacacagagaacagagggagctggttgctgtgctgagggagcctgagtgaggagaccgccagccccagaagcagagggcagtcaaggtcaagagcctgtggtccagcatgcctggcctgggcgggctacctctgagaacggctgaaatggtgcccagtccatcagcagtgatggaatttgctggaggactaggccagagcaagcctcactgccactgtgcctttggggcacccttggggttggacatacaccccctttagattcctctgtttcttctacctggataattcttggccatgttctctcttctctaggttcaggtcagctctgcccctccgcccccctcctgctggttccccagcccttttccctggccctggcttggagaatctgttttcaatctccactgattgcccccttgctggccagcccaggggcctttaccatgttctctccacatccgtaaataaacttccttcactacactgtaa

SEQ ID NO: 281126 - DNA, 1090 bp, Homo sapiens
ttcggacgcgtgggtcagcttcaacatggccgaagcaagtagcgccaatctaggcagcggctgtgaggaaaaaaggcatgaggggtcgtcttcggaatctgtgccacccggcactaccatttcgagggtgaagctcctcgacaccatggtggacacttttcttcagaagctggtcgccgccggcagctctccactccttcattgggacggaagtgctggtccccgcctgccctctggtggacagtctgtgaaacaggccttcagttgggcggcgtgcaggttaccacaggggaggaaggaggaaatctctgacatcaaagaggaggggaacctagaagctgtcttgaatgccttggataaaattgtggaagaaggcaaagtccgcaaagagccagcctggcgccccagcgggatcccagagaaggatctgcacagtgttatggcaccctacttcctgcagcaacgggacaccctgcggcgccatgtgcagaaacaggaggccgagaaccagcagctggcagatgccgtcctggcagggcggaggcaggtggaggagctgcagctacaggtccaggcccagcagcaggcctggcaggctctacacagagaacagagggagctggttgctgtgctgagggagcctgagtgaggagaccgccagccccagaagcagagggcagtcaaggtcaagagcctgtggtccagcatgcctggcctgggcgggctacctctgagaacggctgaaatggtgcccagtccatcagcagtgatggaatttgctggaggactaggccagagcaagcctcactgccactgtgcctttggggcacccttggggttggacatacaccccctttagattcctctgtttcttctacctggataattcttggccatgttctctcttctctaggttcaggtcagctctgcccctccgcccccctcctgctggttccccagcccttttccctggccctggcttggagaatctgttttcaatctccactgattgcccccttgctggccagcccaggggcctttaccatgttctctccacatccgtaaataaacttccttcactacactgtaa

SEQ ID NO: 281127 - DNA, 1070 bp, Homo sapiens
tcaaagtcagacaggtagcctgtgatccaattattgccccccgggaaattttccgcgcacaattaaccgggtccgggggtcaacacaccggcactaccatttcgagggtgaagctcctcgacaccatggtggacacttttcttcagaagctggtcgccgccggcagctctccactccttcattgggacggaagtgctggtccccgcctgccctctggtggacagtctgtgaaacaggccttcagttgggcggcgtgcaggttaccacaggggaggaaggaggaaatctctgacatcaaagaggaggggaacctagaagctgtcttgaatgccttggataaaattgtggaagaaggcaaagtccgcaaagagccagcctggcgccccagcgggatcccagagaaggatctgcacagtgttatggcaccctacttcctgcagcaacgggacaccctgcggcgccatgtgcagaaacaggaggccgagaaccagcagctggcagatgccgtcctggcagggcggaggcaggtggaggagctgcagctacaggtccaggcccagcagcaggcctggcaggctctacacagagaacagagggagctggttgctgtgctgagggagcctgagtgaggagaccgccagccccagaagcagagggcagtcaaggtcaagagcctgtggtccagcatgcctggcctgggcgggctacctctgagaacggctgaaatggtgcccagtccatcagcagtgatggaatttgctggaggactaggccagagcaagcctcactgccactgtgcctttggggcacccttggggttggacatacaccccctttagattcctctgtttcttctacctggataattcttggccatgttctctcttctctaggttcaggtcagctctgcccctccgcccccctcctgctggttccccagcccttttccctggccctggcttggagaatctgttttcaatctccactgattgcccccttgctggccagcccaggggcctttaccatgttctctccacatccgtaaataaacttccttcactacactgtaa

SEQ ID NO: 281128 - DNA, 652 bp, Homo sapiens
gtcgagctgctcctccctctgtctgtcctgtgcacgaggcacaatcggagccacgcgaccaggacagcacgagctgaggccagccccacccggagcaggtgggaaacacatgggcgagctgcagctacaggtccaggcccagcagcaggcctggcaggctctacacagagaacagagggagctggttgctgtgctgagggagcctgagtgaggagaccgccagccccagaagcagagggcagtcaaggtcaagagcctgtggtccagcatgcctggcctgggcgggctacctctgagaacggctgaaatggtgcccagtccatcagcagtgatggaatttgctggaggactaggccagagcaagcctcactgccactgtgcctttggggcacccttggggttggacatacaccccctttagattcctctgtttcttctacctggataattcttggccatgttctctcttctctaggttcaggtcagctctgcccctccgcccccctcctgctggttccccagcccttttccctggccctggcttggagaatctgttttcaatctccactgattgcccccttgctggccagcccaggggcctttaccatgttctctccacatccgtaaataaacttccttcactacactgtaa

SEQ ID NO: 281129 - DNA, 754 bp, Homo sapiens
ttcggacgcgtgggtcagcttcaacatggccgaagcaagtagcgccaatctaggcagcggctgtgaggaaaaaaggcatgaggggtcgtcttcggaatctgtgccacccggcactaccatttcgagggtgaagctcctcgacaccatggtggacacttttcttcagaagctggtcgccgccggcagctaccagagattcactgactgctataagtgcttctaccagttgcagcctgcgatgacacagcaaatctatgacaagtttatagctcagttgcagacatctatccgggaggaaatctctgacatcaaagaggaggggaacctagaagctgtcttgaatgccttggataaaattgtggaagaaggcaaagtccgcaaagagccagcctggcgccccagcgggatcccagagaaggatctgcacagtgttatggcaccctacttcctgcagcaacgggacaccctgcggcgccatgtgcagaaacaggaggccgagaaccagcagctggcagatgccgtcctggcagggcggaggcaggtggaggagctgcagctacaggtccaggcccagcagcaggcctggcaggctctacacagagaacagagggagtggttccccagcccttttccctggccctggcttggagaatctgttttcaatctccactgattgcccccttgctggccagcccaggggcctttaccatgttctctccacatccgtaaataaacttccttcactacactgtaa

SEQ ID NO: 281130 - DNA, 1015 bp, Homo sapiens
ttcggacgcgtgggtcagcttcaacatggccgaagcaagtagcgccaatctaggcagcggctgtgaggaaaaaaggcatgaggggtcgtcttcggaatctgtgccacccggcactaccatttcgagggtgaagctcctcgacaccatggtggacacttttcttcagaagctggtcgccgccggcagctaccagagattcactgactgctataagtgcttctaccagttgcagcctgcgatgacacagcaaatctatgacaagtttatagctcagttgcagacatctatccgggaggaaatctctgacatcaaagaggaggggaacctagaagctgtcttgaatgccttggataaaattgtggaagaaggcaaagtccgcaaagagccagcctgcaacgggacaccctgcggcgccatgtgcagaaacaggaggccgagaaccagcagctggcagatgccgtcctggcagggcggaggcaggtggaggagctgcagctacaggtccaggcccagcagcaggcctggcaggctctacacagagaacagagggagctggttgctgtgctgagggagcctgagtgaggagaccgccagccccagaagcagagggcagtcaaggtcaagagcctgtggtccagcatgcctggcctgggcgggctacctctgagaacggctgaaatggtgcccagtccatcagcagtgatggaatttgctggaggactaggccagagcaagcctcactgccactgtgcctttggggcacccttggggttggacatacaccccctttagattcctctgtttcttctacctggataattcttggccatgttctctcttctctaggttcaggtcagctctgcccctccgcccccctcctgctggttccccagcccttttccctggccctggcttggagaatctgttttcaatctccactgattgcccccttgctggccagcccagggggcaatcagtggagattgaaaacagattctactagttctagattcgc

SEQ ID NO: 281131 - DNA, 594 bp, Homo sapiens
atgagctggggtgaaccaggctccctttcctttgcaggtgcgaagcccagcggtgcagagtccagcaaaggtgcagcctttgtgtccaagcaggagggcagcgaggtagtgaagagacccaggcgctacctgtatcaatggctgggagccccagtcccctacccggatcccctggagcccaggagggaggtgtgtgagctcaatccggactgtgacgagttggctgaccacatcggctttcaggaggcctatcggcgcttctacggcccggtctagggtgtcgctctgctggcctggccggcaaccccagttctgctcctctccaggcacccttctttcctcttccccttgcccttgccctgacctcccagccctatggatgtggggtccccatcatcccagctgctcccaaataaactccagaagaggaaaaaaaaacaaagacacaaaaccaaatcaagactaaaaaaaaaaacaaaccgagcggagctttaataggggcgggggagaacaaaaaaacgaaatgaagagcgcccagagaccaaaaagtggatcggacacacacgcagtttttaaaaaggaaaaacggggggc

SEQ ID NO: 281132 - DNA, 500 bp, Homo sapiens
gagggatgggcattttgcacgggggctgatgccaccacgtcgggtgtctcagagccccagtcccctacccggatcccctggagcccaggagggaggtgtgtgagctcaatccggactgtgacgagttggctgaccacatcggctttcaggaggcctatcggcgcttctacggcccggtctagggtgtcgctctgctggcctggccggcaaccccagttctgctcctctccaggcacccttctttcctcttccccttgcccttgccctgacctcccagccctatggatgtggggtccccatcatcccagctgctcccaaataaactccagaagaggaaaaaaaaacaaagacacaaaaccaaatcaagactaaaaaaaaaaacaaaccgagcggagctttaataggggcgggggagaacaaaaaaacgaaatgaagagcgcccagagaccaaaaagtggatcggacacacacgcagtttttaaaaaggaaaaacggggggc

SEQ ID NO: 281133 - DNA, 1418 bp, Homo sapiens
ttcggacgcgtgggtcagcttcaacatggccgaagcaagtagcgccaatctaggcagcggctgtgaggaaaaaaggcatgaggggtcgtcttcggaatctgtgccacccggcactaccatttcgagggtgaagctcctcgacaccatggtggacacttttcttcagaagctggtcgccgccggcagctaccagagattcactgactgctataagtgcttctaccagttgcagcctgcgatgacacagcaaatctatgacaagtttatagctcagttgcagacatctatccgggaggaaatctctgacatcaaagaggaggggaacctagaagctgtcttgaatgccttggataaaattgtggaagaaggcaaagtccgcaaagagccagcctggcgccccagcgggatcccagagaaggatctgcacagtgttatggcaccctacttcctgcagcaacgggacaccctgcggcgccatgtgcagaaacaggaggccgagaaccagcagctggcagatgccgtcctggcagggcggaggcaggtggaggagctgcagctacaggtccaggcccagcagcaggcctggcaggctctacacagagaacagagggagctggttgctgtgctgagggagcctgagtgaggagaccgccagccccagaagcagagggcagtcaaggtcaagagcctgtggtccagcatgcctggcctgggcgggctacctctgagaacggctgaaatggtgcccagtccatcagcagtgatggaatttgctggaggactaggccagagcaagcctcactgccactgtgcctttggggcacccttggggttggacatacaccccctttagattcctctgtttcttctacctggataattcttggccatgttctctcttctctaggttcaggtcagctctgcccctccgcccccctcctgctggttccccagcccttttccctggccctggcttggagaatctgttttcaatctccactgattgcccccttgctggccagcccaggggcctttaccatgttctctccacatccgtaaataaacttccttcactacactgtaaaaaactaacacgacaagacaccagtactcaaaaaaaaaaaaaaagggggggggcgcaaaaaaaaacacccaggagagggggccaaaggcttaagacgtaaccagcatttctgatagaaagggagacccacagagggagacgtgaaaaaaagcaaaagaaagggacgacgatataacacgggcgcgcacggggaaacacggcatacagggaactcgggaaaagacaccacaccgcgggggacacagcgggaaactcccagagaaatagcgcacggaaaaaaatcggggtaaggtaccccagaagtagtcgagaatgcccgcagtaacgaaatacg

SEQ ID NO: 281134 - DNA, 1021 bp, Homo sapiens
ttcggacgcgtgggtcagcttcaacatggccgaagcaagtagcgccaatctaggcagcggctgtgaggaaaaaaggcatgaggggtcgtcttcggaatctgtgccacccggcactaccatttcgagggtgaagctcctcgacaccatggtggacacttttcttcagaagctggtcgccgccggcagctaccagagattcactgactgctataagtgcttctaccagttgcagcctgcgatgacacagcaaatctatgacaagtttatagctcagttgcagacatctatccgggaggaaatctctgacatcaaagaggaggggaacctagaagctgtcttgaatgccttggataaaattgtggaagaaggcaaagtccgcaaagagccagcctggcgccccagcgggatcccagagaaggatctgcacagtgttatggcaccctacttcctgcagcaacgggacaccctgcggcgccatgtgcagaaacaggaggccgagaaccagcagctggcagatgccgtcctggcagggcggaggcaggtggaggagctgcagctacaggtccaggcccagcagcaggcctggcaggctctacacagagaacagagggagctggttgctgtgctgagggagcctgagtgaggagaccgccagccccagaagcagagggcagtcaaggtcaagagcctgtggtccagcatgcctggcctgggcgggctacctctgagaacggctgaaatggtgcccagtccatcagcagtgatggaatttgctggaggactaggccagagcaagctcatgcatgggcttgggcacttggggtggattaaccccttaattctctgttctactggatatctgggcagtctccttctagtaggatggccgcccctgtggccagcttccggcggtggaatgtaccgggccgggcacaggctacgctcacaagaaaatcaaggaaaaacggttgggaaagaggaccgctgaaggcagagagaaaagtcactgctcctgtattgt

SEQ ID NO: 281135 - DNA, 646 bp, Homo sapiens
gtggacaaggcccatcacactcagggaccaacgccgaatgggctgggacacttttcttcagaagctggtcgccgccggctaccagagattcactgactgctataagtgcttctaccagttgcagcctgcgatgacacagcaaatctatgacaagtttatagctcagttgcagacatctatccgggaggaaatctctgacatcaaagaggaggggaacctagaagctgtcttgaatgccttggataaaattgtggaagaaggcaaagtccgcaaagagccagcctggcgccccagcgggatcccagagaaggatctgcacagtgttatggcaccctacttcctgcagcaacgggacaccctgcggcgccatgtgcagaaacaggaggccgagaaccagcagctggcagatgccgtcctggcagggcggaggcaggtggaggagctgcagctacaggtccaggcccagcagcaggcctggcaggctctacacagagaacagagggagtggttccccagcccttttccctggccctggcttggagaatctgttttcaatctccactgattgcccccttgctggccagcccaggggcctttaccatgttctctccacatccgtaaataaacttccttcactacactgtaa

SEQ ID NO: 281136 - DNA, 1196 bp, Homo sapiens
ttcggacgcgtgggtcagcttcaacatggccgaagcaagtagcgccaatctaggcagcggctgtgaggaaaaaaggcatgaggggtcgtcttcggaatctgtgccacccggcactaccatttcgagggtgaagctcctcgacaccatggtggacacttttcttcagaagctggtcgccgccggcagctctccactccttcattgggacggaagtgctggtccccgcctgccctctggtggacagtctgtgaaacaggccttcagttgggcggcgtgcaggttaccacaggggaggaagctaccagagattcactgactgctataagtgcttctaccagttgcagcctgcgatgacacagcaaatctatgacaagtttatagctcagttgcagacatctatccgggaggaaatctctgacatcaaagaggaggggaacctagaagctgtcttgaatgccttggataaaattgtggaagaaggcaaagtccgcaaagagccagcctggcgccccagcgggatcccagagaaggatctgcacagtgttatggcaccctacttcctgcagcaacgggacaccctgcggcgccatgtgcagaaacaggaggccgagaaccagcagctggcagatgccgtcctggcagggcggaggcaggtggaggagctgcagctacaggtccaggcccagcagcaggcctggcaggctctacacagagaacagagggagctggttgctgtgctgagggagcctgagtgaggagaccgccagccccagaagcagagggcagtcaaggtcaagagcctgtggtccagcatgcctggcctgggcgggctacctctgagaacggctgaaatggtgcccagtccatcagcagtgatggaatttgctggaggactaggccagagcaagcctcactgccactgtgcctttggggcacccttggggttggacatacaccccctttagattcctctgtttcttctacctggataattcttggccatgttctctcttctctaggttcaggtcagctctgcccctccgcccccctcctgctggttccccagcccttttccctggccctggcttggagaatctgttttcaatctccactgattgcccccttgctggccagcccaggggcctttaccatgttctctccacatccgtaaataaacttccttcactacactgtaa

SEQ ID NO: 281137 - DNA, 1157 bp, Homo sapiens
agtaatcttcaagagataaacacttaaactcacctggggctctcctaagaaggagtgaggatgctgatggggcattgatggggttgaaccatcctcggtgactcgtgcttagatgagagatttgcatccactggctttaaccagggccatgaagtggacagagctcagagtcctgtaatgcgaagcggaggtacccaggcaggctgatggccggcctcatgcttggccctccccacctttgcttctctccttcccgccactaccagagattcactgactgctataagtgcttctaccagttgcagcctgcgatgacacagcaaatctatgacaagtttatagctcagttgcagacatctatccgggaggaaatctctgacatcaaagaggaggggaacctagaagctgtcttgaatgccttggataaaattgtggaagaaggcaaagtccgcaaagagccagcctggcgccccagcgggatcccagagaaggatctgcacagtgttatggcaccctacttcctgcagcaacgggacaccctgcggcgccatgtgcagaaacaggaggccgagaaccagcagctggcagatgccgtcctggcagggcggaggcaggtggaggagctgcagctacaggtccaggcccagcagcaggcctggcaggctctacacagagaacagagggagctggttgctgtgctgagggagcctgagtgaggagaccgccagccccagaagcagagggcagtcaaggtcaagagcctgtggtccagcatgcctggcctgggcgggctacctctgagaacggctgaaatggtgcccagtccatcagcagtgatggaatttgctggaggactaggccagagcaagcctcactgccactgtgcctttggggcacccttggggttggacatacaccccctttagattcctctgtttcttctacctggataattcttggccatgttctctcttctctaggttcaggtcagctctgcccctccgcccccctcctgctggttccccagcccttttccctggccctggcttggagaatctgttttcaatctccactgattgcccccttgctggccagcccaggggcctttaccatgttctctccacatccgtaaataaacttccttcactacactgtaa

SEQ ID NO: 281138 - DNA, 1182 bp, Homo sapiens
aaactattctgagaagctatcacgtttcggcgtcgcgcggaccacgatatgtaaggctgatctatggtcataggctgttatccgataggaagagtcactgaggtgcgagttgcagctcatgttgcgtatagtcattgttcgtccaccacagtacaacataaccgctctctgcgaggggatgcacgacgtcgctcctagcaacaatagtctcgaggaactgcgtatgtttcctttgcagggatcgactttgagctcggactctagtcaagcatgagcgtcacaattcgacggtcgtagtattctaaagttgactgcctcacgcagttgcagcctgcgatgacacagcaaatctatgacaagtttatagctcagttgcagacatctatccgggaggaaatctctgacatcaaagaggaggggaacctagaagctgtcttgaatgccttggataaaattgtggaagaaggcaaagtccgcaaagagccagcctggcgccccagcgggatcccagagaaggatctgcacagtgttatggcaccctacttcctgcagcaacgggacaccctgcggcgccatgtgcagaaacaggaggccgagaaccagcagctggcagatgccgtcctggcagggcggaggcaggtggaggagctgcagctacaggtccaggcccagcagcaggcctggcaggctctacacagagaacagagggagctggttgctgtgctgagggagcctgagtgaggagaccgccagccccagaagcagagggcagtcaaggtcaagagcctgtggtccagcatgcctggcctgggcgggctacctctgagaacggctgaaatggtgcccagtccatcagcagtgatggaatttgctggaggactaggccagagcaagcctcactgccactgtgcctttggggcacccttggggttggacatacaccccctttagattcctctgtttcttctacctggataattcttggccatgttctctcttctctaggttcaggtcagctctgcccctccgcccccctcctgctggttccccagcccttttccctggccctggcttggagaatctgttttcaatctccactgattgcccccttgctggccagcccaggggcctttaccatgttctctccacatccgtaaataaacttccttcactacactgtaa

SEQ ID NO: 281139 - DNA, 1146 bp, Homo sapiens
ttcggacgcgtgggtcagcttcaacatggccgaagcaagtagcgccaatctaggcagcggctgtgaggaaaaaaggcatgaggggtcgtcttcggaatctgtgccacccggcactaccatttcgagggtgaagctcctcgacaccatggtggacacttttcttcagaagctggtcgccgccggcagctaccagagattcactgactgctataagtgcttctaccagttgcagcctgcgatgacacagcaaatctatgacaagtttatagctcagttgcagacatctatccgggaggaaatctctgacatcaaagaggaggggaacctagaagctgtcttgaatgccttggataaaattgtggaagaaggcaaagtccgcaaagagccagcctggcgccccagcgggatcccagagaaggatctgcacagtgttatggcaccctacttcctgcagcaacgggacaccctgcggcgccatgtgcagaaacaggaggccgagaaccagcagctggcagatgccgtcctggcagggcggaggcaggtggaggagctgcagctacaggtccaggcccagcagcaggcctggcaggtgcgaagcccagcggtgcagagtccagcaaaggtgcagcctttgtgtccaagcaggagggcagcgaggtagtgaagagacccaggcgctacctgtatcaatggctgggagccccagtcccctacccggatcccctggagcccaggagggaggtgtgtgagctcaatccggactgtgacgagttggctgaccacatcggctttcaggaggcctatcggcgcttctacggcccggtctagggtgtcgctctgctggcctggccggcaaccccagttctgctcctctccaggcacccttctttcctcttccccttgcccttgccctgacctcccagccctatggatgtggggtccccatcatcccagctgctcccaaataaactccagaagaggaaaaaaaaacaaagacacaaaaccaaatcaagactaaaaaaaaaaacaaaccgagcggagctttaataggggcgggggagaacaaaaaaacgaaatgaagagcgcccagagaccaaaaagtggatcggacacacacgcagtttttaaaaaggaaaaacggggggc

SEQ ID NO: 281140 - DNA, 639 bp, Homo sapiens
cgcagccaccgagacaccatgagagccctcacactcctcgccctattggccctggccgcactttgcatcgctggccaggcaggtgcgaagcccagcggtgcagagtccagcaaaggtgcagcctttgtgtccaagcaggagggcagcgaggtagtgaagagacccaggcgctacctgtatcaatggctgggagccccagtcccctacccggatcccctggagcccaggagggaggtgtgtgagctcaatccggactgtgacgagttggctgaccacatcggctttcaggaggcctatcggcgcttctacggcccggtctagggtgtcgctctgctggcctggccggcaaccccagttctgctcctctccaggcacccttctttcctcttccccttgcccttgccctgacctcccagccctatggatgtggggtccccatcatcccagctgctcccaaataaactccagaagaggaaaaaaaaacaaagacacaaaaccaaatcaagactaaaaaaaaaaacaaaccgagcggagctttaataggggcgggggagaacaaaaaaacgaaatgaagagcgcccagagaccaaaaagtggatcggacacacacgcagtttttaaaaaggaaaaacggggggc

SEQ ID NO: 281141 - DNA, 1121 bp, Homo sapiens
ttcggacgcgtgggtcagcttcaacatggccgaagcaagtagcgccaatctaggcagcggctgtgaggaaaaaaggcatgaggggtcgtcttcggaatctgtgccacccggcactaccatttcgagggtgaagctcctcgacaccatggtggacacttttcttcagaagctggtcgccgccggcagacggagtttcactcttgttgcccagactggagtgcagtggcgtgatctcggctcatggcaacctccacctcctgggttcaagaggaaatctctgacatcaaagaggaggggaacctagaagctgtcttgaatgccttggataaaattgtggaagaaggcaaagtccgcaaagagccagcctggcgccccagcgggatcccagagaaggatctgcacagtgttatggcaccctacttcctgcagcaacgggacaccctgcggcgccatgtgcagaaacaggaggccgagaaccagcagctggcagatgccgtcctggcagggcggaggcaggtggaggagctgcagctacaggtccaggcccagcagcaggcctggcaggtgcgaagcccagcggtgcagagtccagcaaaggtgcagcctttgtgtccaagcaggagggcagcgaggtagtgaagagacccaggcgctacctgtatcaatggctgggagccccagtcccctacccggatcccctggagcccaggagggaggtgtgtgagctcaatccggactgtgacgagttggctgaccacatcggctttcaggaggcctatcggcgcttctacggcccggtctagggtgtcgctctgctggcctggccggcaaccccagttctgctcctctccaggcacccttctttcctcttccccttgcccttgccctgacctcccagccctatggatgtggggtccccatcatcccagctgctcccaaataaactccagaagaggaaaaaaaaacaaagacacaaaaccaaatcaagactaaaaaaaaaaacaaaccgagcggagctttaataggggcgggggagaacaaaaaaacgaaatgaagagcgcccagagaccaaaaagtggatcggacacacacgcagtttttaaaaaggaaaaacggggggc

SEQ ID NO: 281142 - DNA, 447 bp, Homo sapiens
tgtgggcttggaagctgaaccttcttccacaagggccttccgcctccttcattccttgtgccccgtgtggccctccaggcgccccagcgggatcccagagaaggatctgcacagtgttatggcaccctacttcctgcagcaacgggacaccctgcggcgccatgtgcagaaacaggaggccgagaaccagcagctggcagatgccgtcctggcagggcggaggcaggtggaggagctgcagctacaggtccaggcccagcagcaggcctggcaggtcagtgtcccagcctgcctcttcctcttccttctctaatgggccctctgagatccgcaaattggtggcttcctccattccaacacaggggacccccacagggggtaggagagcttgccccctggggaacagtcatgaattacctctccttgggcgtgtgcagtagcctctgc

SEQ ID NO: 281143 - DNA, 735 bp, Homo sapiens
  misc_feature (378)..(378): n is a, c, g, or t
  misc_feature (381)..(382): n is a, c, g, or t
acaggacgaacattcttgagttccaaacttgcctcttccatctactgactacttagaccaggtagtataatatgtcgagctcactttccttaagtggaaaaagaagacaatattatctagtttctaggattactagaaggatttataaataacacataaaaagtgtttatataccaggcttatataaataaaagatattgtcataatttatctaattacttcccctaaaacctaacttaatagtgcttataaactacttttaatttgttgatggaaaactaagtgttaagtgcttcttagctacacacaatgaatgcaattttcagtccagttgccaaatatggtttattaggaagagaaccccctgggagaaggaanccnngaagaattgatgaggtcaacacagctagggcatgattacctgttataaggtgtagaaaacgttgccaggacaacatcacgcccgttgatacgaatcacatctgtaactgcctggagaatgttgaaataaaaatgagagtctccaggaactgagcagttcaagcgcgccttcaggaacgacgtccactgtttctccaggactctttgagatcctcccatatcattcttacaaacctgagccactcttgggaaaactacctgcagaggaaaaacacatagggaaaattaaatgcattcattttgcaaggagatcttagtagaatctgcattccttgaaaacagaaacaaaacaac

SEQ ID NO: 281144 - DNA, 482 bp, Homo sapiens
agggtaaatgttcaagaaactcttctccaaatccaaattccacttggattccacttcgggaggaaagtccatgtgaagacacagtgagaaggcaagaaggcatccatctgcaagtcaggaaaagagccctcatcagaaaccaaatgttgtgagaacttgatcttggacttcccagcctccagaactgtgagaaaattaatttatgttgtctaagccacacagtctgtagtatactgttatggcagcctgagcagattatgacagatgtcaaagagaacttcagccttagctgatatgttagctgtaatcttttaatgttttagaatgagagtgtatgtatgtattactcatgtgactaaaacattaactttttaaagtcaactttgtcttccctcttgccccataaccatgcttttcccctttatcttcctttgaacaatattaattaaggcctgttgcagacatatgcattctgagccttc

SEQ ID NO: 281145 - DNA, 758 bp, Homo sapiens
gaaaacgggaatcccgaagaaatggtgggtcctggccatccgtgagatcttcccagggcagctcccctctgtggaacccaatctgtcttccatcctgtgtggccgagggccaggcttctcactaggcctctgcaggaggctgccatttgtcctgcccaccttcttagaagcgagacggagcagacccatctgctactgccctttctataataactaaagttagctgccctggactattcaccccctagtctcaatttaaaaagatccccatggccacagggcccctgcctgggggcttgtcacctcccccaccttcttcctgagtcactcctgcagccttgctccctaacctgccccacagccttgcctggatgtctatctccctggcttggtgccagttcctccaagtcgatggcacctccctccctctcaaccacttgagcaaactccaagacatcttctaccccaacaccagcaattgtgccaagggccattaggctctcagcatgactatttttagagaccccgtgtctgtcactgaaaccttttttgtgggagactattcctcccatctgcaacagctgcccctgctaactgcccttctctcctccctctcatcccagagaaacaggtcagctgggagcttctgcccccactgcctagggaccaacaggggcaggaggcagtcactgaccccgagacgtttgcatcctgcacagctagaggtcctttattaaaagcacactgttggtttctgc

SEQ ID NO: 281146 - DNA, 494 bp, Homo sapiens
gataaacagtggctttggagcagaccagtggagaaggtccagaagtggaaatggagtcctggcagaagcgatacgattcgctccaaaagattgtggagaagcagcagcagaagatggatcagttgcgctcacaagtacaggtgagcaggaatccttgggacatggtgggcagaacttaatgatggaatctctagaatttagccaatatttattttgttctctgccatgcaggttgctcagtgttagggatacaaaaagaatgagacccagtcagtgcttttgagccttgctgagaggacacaaatatagtagggagtttcagcacagtactgtgagagcagtccccacagtatcctgggggagtgcaggagagtcagtgggaggaagggaggtaaaagagaggtttctggagatcctgaacctacaaggatgaggagttagccaggcaaacaagaggagcctgttagggctccaaagcctgttagggggtaccg

SEQ ID NO: 281147 - DNA, 557 bp, Homo sapiens
tttagaatataaaatatatataaatgtggtaaaaattattaaaataattattttattttgaactccggagacggcattgactacagccagcagaagagggagaacattggggacttgatccaggagacactggaggccttcgagcgctacggaggagaaaatgcctttatcaacattaagtacgtggtcccaacctacgagtcttgcttgctaaactaacagtggcagcagctgggacttgaaacctcccgttggtgttgggatcatctgtctctgttgcttttagcatctcattccttgtgacttccacagctttcttttctacagctgctaaaatagtggcttatgggccattggactgttagccctattgagagcaaggctttccaatacataaatagtgcctgtttcttagattacaatagtgtactgtgcttatttgttctaagagaagaattgcttctttatacagctccgacagaagcaggagtccgagttaaaccttcagttgtatagacaataaactataattttcatatgcaattcaaaaaaaaatg

SEQ ID NO: 281148 - DNA, 449 bp, Homo sapiens
gtattgcctgtttcaaatgtgacagtgtagaaattgagaagctggattaccatcattatctgcctctgttttttgatgggctttgtgaaatgacatttccctatgagttttttgctcggcaaggaatccacgacatgctggaacacggtgggaacaagatcctacctgtccttccacagctcattatcccgataaaaaatgccttgaacctccgaaaccgacaggtcatctgtgtcactctcaaggtcctccagcatctggttgtgtcagctgagatggtgggcaaggccttggtgccttattaccgtcaaatcctccctgtcctgaacatctttaagaatatgaatgacctccctggttgcgcctgcccggagggaaggattattctgagttgtctgtaacctggtagggcgatgtctaaagaaatcagaatccagctctgaaaaaaa

SEQ ID NO: 281149 - DNA, 1324 bp, Homo sapiens
aggagtttctgtggagccagccaccctcaccaggtgccttccattagagtttaatgctttgctgcggtttcctgaaagagccccacagagagtgggtctcgatgggtcctgaaccgcaccacaaccggccagtgagacctcctgctcacatccgtaaagcccactgattcttttactacactttttatgagaacaagacattttctaggaagatggtggcagaaaaagagaccctgagcttaaacaaatgcccagacaagatgccgaagaggaccaagctgctggcacaacagccgctcccggtgcaccagcctcactctctggtttctgagggtttcacagtcaaagccatgatgaaaaactcagtcgtgagaggccctccagctgcaggggcatttaaagaaagaccaaccaagcccacagcatttcgaaaattctatgagcgaggtgacttcccaattgcccttgagcatgattcgaaaggaaacaaaatcgcctggaaggtagaaattgagaagctggattaccatcattatctgcctctgttttttgatgggctttgtgaaatgacatttccctatgagttttttgctcggcaaggaatccacgacatgctggaacacggtgggaacaagatcctacctgtccttccacagctcattatcccgataaaaaatgccttgaacctccgaaaccgacaggtcatctgtgtcactctcaaggtcctccagcatctggttgtgtcagctgagatggtgggcaaggccttggtgccttattaccgtcaaatcctccctgtcctgaacatctttaagaatatgaatgtgaactccggagacggcattgactacagccagcagaagagggagaacattggggacttgatccaggagacactggaggccttcgagcgctacggaggagaaaatgcctttatcaacattaagtacgtggtcccaacctacgagtcttgcttgctaaactaacagtggcagcagctgggacttgaaacctcccgttggtgttgggatcatctgtctctgttgcttttagcatctcattccttgtgacttccacagctttcttttctacagctgctaaaatagtggcttatgggccattggactgttagccctattgagagcaaggctttccaatacataaatagtgcctgtttcttagattacaatagtgtactgtgcttatttgttctaagagaagaattgcttctttatacagctccgacagaagcaggagtccgagttaaaccttcagttgtatagacaataaactataattttcatatgcaattcaaaaaaaaatg

SEQ ID NO: 281150 - DNA, 1443 bp, Homo sapiens
gcggggcgtggcgccataccggggcgtggggcggcgcagagaggctgtacctggcaggtacccacgtacctatcatggtcactgggtaggtggcggctgcgggccaggaacaggcccatgcgcgcagcggcgccagccgcgcctcccaccagcggctctcctgggttaaatcctccaggcctccccgcccccgcgcccggccctaggaatgcgcacgcgcggagggcgcggcccagggcctgctgggagtcgtagttctaacgcgtagtttctcctcacgcctcctgcccccagccccccaccgccgccctttccggcttcaggcccagcaatcttacgtcaccggggggcggggctatgcgcccgccgtgttgaccagtcggcttagcaaccgggaggcttacctttggaagcttgttgcagctctagccaaggtcctgccctcttcccgccccgcccctagggtccagctcccttcacctaggagctgccaaacatctggatcaacctgggcactacgaggggttgaatttctaccattatcgcgccttttgatatttttttccagacctcctgctcacatccgtaaagcccactgattcttttactacactttttatgagaacaagacattttctaggaagatggtggcagaaaaagagaccctgagcttaaacaaatgcccagacaagatgccgaagaggaccaagctgctggcacaacagccgctcccggtgcaccagcctcactctctggtttctgagggtttcacagtcaaagccatgatgaaaaactcagtcgtgagaggccctccagctgcaggggcatttaaagaaagaccaaccaagcccacagcatttcgaaaattctatgagcgaggtgacttcccaattgcccttgagcatgattcgaaaggaaacaaaatcgcctggaaggtagaaattgagaagctggattaccatcattatctgcctctgttttttgatgggctttgtgaaatgacatttccctatgagttttttgctcggcaaggaatccacgacatgctggaacacggtgggaacaagatcctacctgtccttccacagctcattatcccgataaaaaatgccttgaacctccgaaaccgacaggtcatctgtgtcactctcaaggtcctccagcatctggttgtgtcagctgagatggtgggcaaggccttggtgccttattaccgtcaaatcctccctgtcctgaacatctttaagaatatgaatggctgggctcctccgtaggttctcctgccaacaagcgagacagaaaggaggcggcagctgggggaactcagccttccttcccaccacacctgcaccttgctgagccactgctcccaagacgaggcacagaattcccagagcagcctggcttcaacctactcatttggtgttctttaaattaaaaaaa

SEQ ID NO: 281151 - DNA, 677 bp, Homo sapiens
ctcccacccccccccccatccccccccccacatctttccctttcctcccccttttacttcgggtaaaactctttgcccaggctggagtgcagtggcgcgatcatggctcgttgcaacctcgaccacctgggctcaagtgatcctcccacctcagcctctcaagtagctgagattatagtgaactccggagacggcattgactacagccagcagaagagggagaacattggggacttgatccaggagacactggaggccttcgagcgctacggaggagaaaatgcctttatcaacattaagtacgtggtcccaacctacgagtcttgcttgctaaactaacagtggcagcagctgggacttgaaacctcccgttggtgttgggatcatctgtctctgttgcttttagcatctcattccttgtgacttccacagctttcttttctacagctgctaaaatagtggcttatgggccattggactgttagccctattgagagcaaggctttccaatacataaatagtgcctgtttcttagattacaatagtgtactgtgcttatttgttctaagagaagaattgcttctttatacagctccgacagaagcaggagtccgagttaaaccttcagttgtatagacaataaactataattttcatatgcaattcaaaaaaaaatg

SEQ ID NO: 281152 - DNA, 559 bp, Homo sapiens
ctagactgtgtaggacttttcgggaaattgcagagaagtaactggcctctttgtgtgtttgcatgcaccatgaactccggagacggcattgactacagccagcagaagagggagaacattggggacttgatccaggagacactggaggccttcgagcgctacggaggagaaaatgcctttatcaacattaagtacgtggtcccaacctacgagtcttgcttgctaaactaacagtggcagcagctgggacttgaaacctcccgttggtgttgggatcatctgtctctgttgcttttagcatctcattccttgtgacttccacagctttcttttctacagctgctaaaatagtggcttatgggccattggactgttagccctattgagagcaaggctttccaatacataaatagtgcctgtttcttagattacaatagtgtactgtgcttatttgttctaagagaagaattgcttctttatacagctccgacagaagcaggagtccgagttaaaccttcagttgtatagacaataaactataattttcatatgcaattca

SEQ ID NO: 281153 - DNA, 991 bp, Homo sapiens
gcggggcgtggcgccataccggggcgtggggcggcgcagagaggctgtacctggcaggtacccacgtacctatcatggtcactgggtaggtggcggctgcgggccaggaacaggcccatgcgcgcagcggcgccagccgcgcctcccaccagcggctctcctgggttaaatcctccaggcctccccgcccccgcgcccggccctaggaatgcgcacgcgcggagggcgcggcccagggcctgctgggagtcgtagttctaacgcgtagtttctcctcacgcctcctgcccccagccccccaccgccgccctttccggcttcaggcccagcaatcttacgtcaccggggggcggggctatgcgcccgccgtgttgaccagtcggcttagcaaccgggaggcttacctttggaagcttgttgcagctctagccaaggtcctgccctcttcccgccccgcccctagggtccagctcccttcacctaggagctgccaaacatctggatcaacctgggcactacgaggggttgaatttctaccattatcgcgccttttgatatttttttccagacctcctgctcacatccgtaaagcccactgattcttttactacactttttatgagaacaagacattttctaggaagatggtggcagaaaaagagaccctgagcttaaacaaatgcccagacaagatgccgaagaggaccaagctgctggcacaacagccgctcccggtgcaccagcctcactctctggtttctgagggtttcacagtcaaagccatgatgaaaaactcagtcgtgagaggccctccagctgcaggggcatttaaagaaagaccaaccaagcccacagcatttcgaaaattctatgagcgaggtgacttcccaattgcccttgagcatgattcgaaaggaaacaaaatcgcctggaaggtaagtcagggcacagctgtgccggccagctgcacccgctgaagtgacatctccca

SEQ ID NO: 281154 - DNA, 1756 bp, Homo sapiens
gcggggcgtggcgccataccggggcgtggggcggcgcagagaggctgtacctggcaggtacccacgtacctatcatggtcactgggtaggtggcggctgcgggccaggaacaggcccatgcgcgcagcggcgccagccgcgcctcccaccagcggctctcctgggttaaatcctccaggcctccccgcccccgcgcccggccctaggaatgcgcacgcgcggagggcgcggcccagggcctgctgggagtcgtagttctaacgcgtagtttctcctcacgcctcctgcccccagccccccaccgccgccctttccggcttcaggcccagcaatcttacgtcaccggggggcggggctatgcgcccgccgtgttgaccagtcggcttagcaaccgggaggcttacctttggaagcttgttgcagctctagccaaggtcctgccctcttcccgccccgcccctagggtccagctcccttcacctaggagctgccaaacatctggatcaacctgggcactacgaggggttgaatttctaccattatcgcgccttttgatatttttttccagacctcctgctcacatccgtaaagcccactgattcttttactacactttttatgagaacaagacattttctaggaagatggtggcagaaaaagagaccctgagcttaaacaaatgcccagacaagatgccgaagaggaccaagctgctggcacaacagccgctcccggtgcaccagcctcactctctggtttctgagggtttcacagtcaaagccatgatgaaaaactcagtcgtgagaggccctccagctgcaggggcatttaaagaaagaccaaccaagcccacagcatttcgaaaattctatgagcgaggtgacttcccaattgcccttgagcatgattcgaaaggaaacaaaatcgcctggaaggtagaaattgagaagctggattaccatcattatctgcctctgttttttgatgggctttgtgaaatgacatttccctatgagttttttgctcggcaaggaatccacgacatgctggaacacggtgggaacaagatcctacctgtccttccacagctcattatcccgataaaaaatgccttgaacctccgaaaccgacaggtcatctgtgtcactctcaaggtcctccagcatctggttgtgtcagctgagatggtgggcaaggccttggtgccttattaccgtcaaatcctccctgtcctgaacatctttaagaatatgaatgtgaactccggagacggcattgactacagccagcagaagagggagaacattggggacttgatccaggagacactggaggccttcgagcgctacggaggagaaaatgcctttatcaacattaagtacgtggtcccaacctacgagtcttgcttgctaaactaacagtggcagcagctgggacttgaaacctcccgttggtgttgggatcatctgtctctgttgcttttagcatctcattccttgtgacttccacagctttcttttctacagctgctaaaatagtggcttatgggccattggactgttagccctattgagagcaaggctttccaatacataaatagtgcctgtttcttagattacaatagtgtactgtgcttatttgttctaagagaagaattgcttctttatacagctccgacagaagcaggagtccgagttaaaccttcagttgtatagacaataaactataattttcatatgcaattcaaaaaaaaatg

SEQ ID NO: 281155 - DNA, 1486 bp, Homo sapiens
gcggggcgtggcgccataccggggcgtggggcggcgcagagaggctgtacctggcaggtacccacgtacctatcatggtcactgggtaggtggcggctgcgggccaggaacaggcccatgcgcgcagcggcgccagccgcgcctcccaccagcggctctcctgggttaaatcctccaggcctccccgcccccgcgcccggccctaggaatgcgcacgcgcggagggcgcggcccagggcctgctgggagtcgtagttctaacgcgtagtttctcctcacgcctcctgcccccagccccccaccgccgccctttccggcttcaggcccagcaatcttacgtcaccggggggcggggctatgcgcccgccgtgttgaccagtcggcttagcaaccgggaggcttacctttggaagcttgttgcagctctagccaaggtcctgccctcttcccgccccgcccctagggtccagctcccttcacctaggagctgccaaacatctggatcaacctgggcactacgaggggttgaatttctaccattatcgcgccttttgatatttttttccagacctcctgctcacatccgtaaagcccactgattcttttactacactttttatgagaacaagacattttctaggaagatggtggcagaaaaagagaccctgagcttaaacaaatgcccagacaagatgccgaagaggaccaagctgctggcacaacagccgctcccggtgcaccagcctcactctctggtttctgagggtttcacagtcaaagccatgatgaaaaactcagtcgtgagaggccctccagctgcaggggcatttaaagaaagaccaaccaagcccacagcatttcgaaaattctatgagcgaggtgacttcccaattgcccttgagcatgattcgaaaggaaacaaaatcgcctggaaggtagaaattgagaagctggattaccatcattatctgcctctgttttttgatgggctttgtgaaatgacatttccctatgagttttttgctcggcaaggaatccacgacatgctggaacacggtgggaacaagatcctacctgtccttccacagctcattatcccgataaaaaatgccttgaacctccgaaaccgacaggtcatctgtgtcactctcaaggtcctccagcatctggttgtgtcagctgagatggtgggcaaggccttggtgccttattaccgtcaaatcctccctgtcctgaacatctttaagaatatgaatgtaacccatcgacaaagaagtgaattgtcctccatgttagcgaagtggggaggtccagacttgctccttgtctttctaccattttctaccatcattgtatgtaaaagtctaatcttcattttaagtcagtttatgcttcccagactaaactctgcaacaaataatatgaatgtcacacatttcatcatttgtaattaattccaaactaaataaaacaaggagttgtgaaa

SEQ ID NO: 281156 - DNA, 1625 bp, Homo sapiens
gcggggcgtggcgccataccggggcgtggggcggcgcagagaggctgtacctggcaggtacccacgtacctatcatggtcactgggtaggtggcggctgcgggccaggaacaggcccatgcgcgcagcggcgccagccgcgcctcccaccagcggctctcctgggttaaatcctccaggcctccccgcccccgcgcccggccctaggaatgcgcacgcgcggagggcgcggcccagggcctgctgggagtcgtagttctaacgcgtagtttctcctcacgcctcctgcccccagccccccaccgccgccctttccggcttcaggcccagcaatcttacgtcaccggggggcggggctatgcgcccgccgtgttgaccagtcggcttagcaaccgggaggcttacctttggaagcttgttgcagctctagccaaggtcctgccctcttcccgccccgcccctagggtccagctcccttcacctaggagctgccaaacatctggatcaacctgggcactacgaggggttgaatttctaccattatcgcgccttttgatatttttttccagacctcctgctcacatccgtaaagcccactgattcttttactacactttttatgagaacaagacattttctaggaagatggtggcagaaaaagagaccctgagcttaaacaaatgcccagacaagatgccgaagaggaccaagctgctggcacaacagccgctcccggtgcaccagcctcactctctggtttctgagggtttcacagtcaaagccatgatgaaaaactcagtcgtgagaggccctccagctgcaggggcatttaaagaaagaccaaccaagcccacagcatttcgaaaattctatgagcgaggtgacttcccaattgcccttgagcatgattcgaaaggaaacaaaatcgcctggaagattctaggaatgaaaaattacaaaaccacatcaccttggcccttaagtaacagatgaaaactactgacagacggcagcgaatcatgtcttccaatgaatagcagaataatgctggaaattggaaaaattcaatgtcaaggtagaaattgagaagctggattaccatcattatctgcctctgttttttgatgggctttgtgaaatgacatttccctatgagttttttgctcggcaaggaatccacgacatgctggaacacggtgggaacaagatcctacctgtccttccacagctcattatcccgataaaaaatgccttgaacctccgaaaccgacaggtcatctgtgtcactctcaaggtcctccagcatctggttgtgtcagctgagatggtgggcaaggccttggtgccttattaccgtcaaatcctccctgtcctgaacatctttaagaatatgaatgtaacccatcgacaaagaagtgaattgtcctccatgttagcgaagtggggaggtccagacttgctccttgtctttctaccattttctaccatcattgtatgtaaaagtctaatcttcattttaagtcagtttatgcttcccagactaaactctgcaacaaataatatgaatgtcacacatttcatcatttgtaattaattccaaactaaataaaacaaggagttgtgaaa

SEQ ID NO: 281157 - DNA, 1127 bp, Homo sapiens
atctaaaggacacggcggagcagagagagatgctcggccgctcctcctcctccgggtccaggacttgcttcttatttgctggacgctgatctccctgcagccctcggaggcggcggccgcgctgctttcatttcggggctgtcatcaccagaaacgccggctgccggccgcccaccagctcggctccagccaggcggtggtctctacaaggatgtctgacctagagtggagatggggtgactgaggatggaaatctagtctgaactccactctccaatttggcagaagacctgtgtcttactcagctttgtgttccttacatctctgtagcacacactcccctgcgaaggggttttataaggaacccagagccaagacaaaggaatcaggaggaattctagcacaatgggaagcccctgaagggtttaagcagaagacaataaaagactccgagaagtggcagcagggagtggaggaaaaaaagcctggaatttaccctgctttctgctctgcacatggaatgccccctccatgtgtccattgtcatccaaggtgttttgacaggtctagagtggggtaaaagaatggtatttattcaggcctaatattgaggcttggggctgggctgtatatcagagggcatgcatagacaaagctgaacaaaggggcacacctactgggcacctgctgggcacttctctaaaagtggcactgagacatcattaggatgaattagaactagggcaccagttaacccgggcctgcatgctagtgaaaggaaaattgcgcctctccctcaaccctgctccagacaactgaatggtgacttcaagaacaaatattcaggctgggtgcggtggctcacacctgtaatcccaacacttttggaggctgaggtgagtggatcacctgaggtcaggagttcgagactagcctggccaacatggtgaaaccctgtttctactaaagatacaaaaattagctgggcgtggtggtgggtgccagtaatctcagctaggaggctgaggcaggagaatcgcttgagcctgggaggcagaggttgttgagatggtgccattgcacttcagcctggacgacaagagcataactctgtctcaaaaaaaaaa

SEQ ID NO: 281158 - DNA, 1228 bp, Homo sapiens
aggcaagagtgaggaggacagctgggagagctgtttgtgactgaagagcagagagtacagacagaactacacagttctcaaattccatacaaaattttaatacgtttttcacttcacagattctgaacctgccacaggaccagctcctttggtgagcgaagtgtgtgagcgaaggaaagattcttgggtagaacttcataaagtctgtcataagatcagccccagaggaggagacttttcagatcccatccctcatacacattcagaaggccaaggaaacaccctcaggattgaactatgataaagaaggcttttggacttggacctcatccaaggagctggctgcctgcactttcacagaccgtcagcttcatccccaggccccaaatcctgaatttgccgtgtcaatgaaaaaccatcatcagcttttctttacattaaaaactgattgtgatcatagcagtttttcctgttttctgggatcactgctgcgaagaggaaaagtcaccagaggataaaatgacacacacgcaaactcttctgtggctgaaattcccctcactcttcctgcctctaaccgaaaaggaggatacagaccaaggagcacttcatgaaggaaaaccaaggcccaagtcatacagctagtaaaaggaggagccacaattcaaaccaggactgatttcaaaattcgcattccttccactatgccatggaaagtacagtagggtgtttttatgtcaactgcagccagacacatcaattttctcctctgagaggacaggatataaatctgaagaaacaatgtatatgaaaatatgctctatgctataaggcaagatttatatgtaagtcagacatagcagcaccaagagacaaaacagacagtgttcactaggacgaacaagcggctcaaaaggcactggagtttccctgtaagaactacaaacaccacgggagtgatgttaactcagatttttccatataaaagattcttcctgtaaaaatatcctgtgcctttgtgctaaataaaagtaaaatgatgctttttagagtgaagtctaaacacctcagattcagcaagagtgagatcagctagatttgcaaagtcaagaaaattggctgtttccctcctccttaagctaatagaatccaactgttggagcatgacatcattcctgagccccaaaccccgagcagagactacagacactcgcctgactcccagaaa

SEQ ID NO: 281159 - DNA, 995 bp, Homo sapiens
aggcaagagtgaggaggacagctgggagagctgtttgtgactgaagagcagagagtacagacagaactacacagttctcaaattccatacaaaattttaatacgtttttcacttcacagattctgaacctgccacaggaccagctcctttggtgagcgaagtgtgtgagcgaaggaaagattcttgggtagaacttcataaagtctgtcataagatcagccccagaggaggagacttttcagatcccatccctcatacacattcagaaggccaaggaaacaccctcaggattgaactatgataaagaaggcttttggacttggacctcatccaaggagctggctgcctgcactttcacagaccgtcagcttcatccccaggccccaaatcctgaatttgccgtgtcaatgaaaaaccatcatcagcttttctttacattaaaaactgattgtgatcatagcagtttttcctgttttctgggatcactgctgcgaagaggaaaagtcaccagaggataaaatgacacacacgcaaactcttctgtggctgaaattcccctcactcttcctgcctctaaccgaaaaggaggatacagaccaaggagcacttcatgaaggtcagacatagcagcaccaagagacaaaacagacagtgttcactaggacgaacaagcggctcaaaaggcactggagtttccctgtaagaactacaaacaccacgggagtgatgttaactcagatttttccatataaaagattcttcctgtaaaaatatcctgtgcctttgtgctaaataaaagtaaaatgatgctttttagagtgaagtctaaacacctcagattcagcaagagtgagatcagctagatttgcaaagtcaagaaaattggctgtttccctcctccttaagctaatagaatccaactgttggagcatgacatcattcctgagccccaaaccccgagcagagactacagacactcgcctgactcccagaaa

SEQ ID NO: 281160 - DNA, 336 bp, Homo sapiens
cggccgcgcggatcaccgtggttcttgcggctcccgggcgtggccatttacaacccgcctcgcacctgctagagaaaagaccccggccatggatgggagacctaggacaaagatggaaaagagaatcaactctgccttaggcgaacaatttaccataatattctgagacaggagtggaataacacctccagccattacctgcaaatgagagctgctttaggcgggcatttgatcgagcttcctggactttatctgtcaatgacttccaggcatctgaaaggaaataaagaaaacccgtaagccagaaaatatgcacgtaaacccttcttaatacca

SEQ ID NO: 281161 - DNA, 524 bp, Homo sapiens
cggccgcgcggatcaccgtggttcttgcggctcccgggcgtggccatttacaacccgcctcgcacctgctagaggtccaatccaacaatgtctccaaatggggtgtcagggttgaagatggcctgcagcactgcctgatcatttggagtccccatggtgctcaactccaaaatcccaaaagaaaagaccccggccatggatgggagacctaggacaaagatggaaaagagtgcttggcaccagacagctgctcaatgaggaacacaactgcatcatggagaatccccagcatcctcaaaccgttaacacctagaagaatcagaagcaccagggaagtgaggagcgcagtcaacaggaaacagcatggtcctacagaaatgcctatgctatagtcactctgccagaggctgctccagggtgaattatagtacatattagctcgaaattagcatcagatagccattaaaatgatgctgatacagatctatcaatatggaaaatgtttgtgatagacggctaagtga

SEQ ID NO: 281162 - DNA, 547 bp, Homo sapiens
cgggaggccagcaggccagcctatgtgcagagctacactccagatcaaatgcccaccttcttctcgttcttccttttctgcttcctctccgaggtccaatccaacaatgtctccaaatggggtgtcagggttgaagatggcctgcagcactgcctgatcatttggagtccccatggtgctcaactccaaaatcccaaaaggtgactccagatgagagaagagggagggacgtggtgagggtggagcctccagcaggaagttgatctgaaaggatgaggaccaccccttcgtgaggagtgtctccctgtccatggctgtagcatttgctcaacctgtggcctggagggttgaccctggcttggcagactacttggttatttctcaactgcccctgcccccaggagaaacagtaaacaaatccagcttcagccttaaggtggagtgcagctagagaaggtgttctccagcttctccctgaaatgctttcagtttattatattcacagttgagaaaaccgataaaaatcaatacttaacctccttggatg

SEQ ID NO: 281163 - DNA, 417 bp, Homo sapiens
cggccgcgcggatcaccgtggttcttgcggctcccgggcgtggccatttacaacccgcctcgcacctgctagagaaaagaccccggccatggatgggagacctaggacaaagatggaaaagagtgcttggcaccagacagctgctcaatgaggaacacaactgcatcatggagaatccccagcatcctcaaaccgttaacacctagaagaatcagaagcaccagggaagtgaggagcgcagtcaacaggaaacagcatggtcctacagaaatgcctatgctatagtcactctgccagaggctgctccagggtgaattatagtacatattagctcgaaattagcatcagatagccattaaaatgatgctgatacagatctatcaatatggaaaatgtttgtgatagacggctaagtga

SEQ ID NO: 281164 - DNA, 447 bp, Homo sapiens
gcggccgcggctcaccaccccccggctggtccccagcccgcgccgagtacccccgagtgcccttctctccgggcgcgggcaggacgcaggagcaggcggagtcgaaaagaccccggccatggatgggagacctaggacaaagatggaaaagagtgcttggcaccagacagctgctcaatgaggaacacaactgcatcatggagaatccccagcatcctcaaaccgttaacacctagaagaatcagaagcaccagggaagtgaggagcgcagtcaacaggaaacagcatggtcctacagaaatgcctatgctatagtcactctgccagaggctgctccagggtgaattatagtacatattagctcgaaattagcatcagatagccattaaaatgatgctgatacagatctatcaatatggaaaatgtttgtgatagacggctaagtga

SEQ ID NO: 281165 - DNA, 239 bp, Homo sapiens
agctgctcagagcattcaactggtttacaatttctgtaaacagaagccagtcaagacaaatataagaaaaatgcaagataatgaaaactgaagagcggcagatacaacttttttagataatggcttgaattttaacttgacatcagtctgagttggcatagggcttgcatactgtttcatattgatgctgctagtagcaagagctttccttcgaccagaaggggattcctggaagatta

SEQ ID NO: 281166 - DNA, 711 bp, Homo sapiens
ccgagagcagagtccatgaggagggctgtttggggctggtcaggcacgaaggctggtctgtgacaggccttccaggcctaaaggcaatgagagccaccttgtgactcacatgtggtcagcctctcctggcattctacggaattcaacaatttatctggatcgaatccccgggaaatatgtagaatgacatttacaagctgggcctctcctcgctcagctcccactgccgcgcagcccactcgtgggcatctgagtttgggcagagtcggcctcaccttgtcagccaggtcccagatccgggctgtgccatcgttgctggcagagatgaagaggtccttggaaggctacctcaggtgagagcttcagcacagactcctccatcacccagcctctgccagaatattccagtgactgcagagcaaagcagccaattctcctgttcttggacagctcaagctcttagttacctgtggagaggttctgaacgatgccagccgctgctgtgtggaagatgatgtcagcgccatcattaagcatatgtttacagctgtattgcttcaaaactgaagatgagaggagcaaggggaagaaacctgcattgtggcaaattcagcggattttaagtattgacccttcgcggttgtggattctgcgtgaacacttagtactggatgttcaccaaacacctgtgtttgtctccagagcggtgtg

SEQ ID NO: 281167 - DNA, 1243 bp, Homo sapiens
atggcgtctgcggcagcagcggaggccgagaagggatctccagttgtggtgggcctgctagttgtgggcaatatcattattctgctgtcaggcctgtccctgtttgctgagaccatatgggtgacagccgaccagtaccgtgtatacccactgatgggagtctcaggcaaggatgacgtcttcgctggtgcctggattgccatcttctgcggcttctccttcttcatggtagccagttttggtgtgggtgccgcactctgccgccgccggtccatggtcctcacgtacctggtgctcatgctcatcgtctacatcttcgagtgcgcctcctgcatcacgtcctacacccaccgtgactacatggtgtccaacccatccctgatcaccaagcagatgctgaccttctacagcgcggacaccgaccagggccaggagctgacccgcctctgggaccgcgtcatgattgagcaagaatgctgtggcacatctggtcccatggactgggtgaacttcacgtcagccttccgggcggccactccggaggtggtgttcccctggcccccactgtgctgtcgccggacgggaaacttcatccccctcaacgaggagggctgccgcctggggcacatggactacctgttcaccaagggctgcttcgaacacatcggccacgccatcgacagctacacgtggggtatctcgtggtttgggtttgccatcctgatgtggacgctcccggtcatgctgatagccatgtatttctacaccatgctctgagggacaggaggggaaggcaacatacacaccccggactcctccgcatcctcctcctgcttcctccgctgggcctggatggctgcctcacctctcacctcccaacgtccctagcccttacgtccttccacttccaagatctttttccaggttcctgagccctactgtgtctcaggtgtgccctgaaaccccagggcttgtgtgcacatatccttagcccatctttcaagggacctctccatgatcccacctcccattcacagatacctctcttgtagctctctgacctcctccttcatggcaggcatcgccattcttgctgaaccgtttgtgattgccatttgagctctggaagcctctattgccatgagagttctgtcacggtcactttactgtccccatcatcacccagcacggggctaagcatatactagatagtcaataaataaataaataatgaatgaatgaa

SEQ ID NO: 281168 - DNA, 516 bp, Homo sapiens
gcggccgcttccctgcccggcagccccgcgcctagccagcgctgtttcaagccctacccgctcatcaccccctgctacatcaagaccaccacccggcagctcagctcgcccaatcactccccgtctcagtcccctaatcagagccccaggatcaagaggcggccggaaccctccctgagccgagggtccagaactgccctggcctccgtagccgccccggccaagaagcaccgggcagacggcggccttgcggccggcctgagccgctcggctgactggacggaggagctaggcgcccgcacgccccgggtgggaggctccgcgcacctgctggagcgcggggtggcgagtgacagcggcggtggggtgtccccagcactggccgccaaggcgtctggggcccccgcggctgcggatggcttccagaacgtgttcacaggtgagcgcgccctgctgctggcctccgggtctcaagtcgcctgtcagtcagggccttcccctgccacccgccctccc

SEQ ID NO: 281169 - DNA, 521 bp, Homo sapiens
gcggccgcttccctgcccggcagccccgcgcctagccagcgctgtttcaagccctacccgctcatcaccccctgctacatcaagaccaccacccggcagctcagctcgcccaatcactccccgtctcagtcccctaatcagagccccaggatcaagaggcggccggaaccctccctgagccgagggtccagaactgccctggcctccgtagccgccccggccaagaagcaccgggcagacggcggccttgcggccggcctgagccgctcggctgactggacggaggagctaggcgcccgcacgccccgggtgggaggctccgcgcacctgctggagcgcggggtggcgagtgacagcggcggtggggtgtccccagcactggccgccaaggcgtctggggcccccgcggctgcggatggcttccagaacgtgttcacagggcgaacgctgttggagaagctgttcagccagcaggagaacgggcctccagaagaagcagagaagttttgctcccggatcat

SEQ ID NO: 281170 - DNA, 2748 bp, Homo sapiens
cggcttctcactctgttgcccaagctggagtgcagtggcacaatctcaactcactacaatctccgcctcccaggttcaagcaattctcgtgccttggcttcctgagtagctgggattacaggcacgtgctaccacacccagccaatttttgtatttttagtagagatggggcttcatcatgctggccaggccggtctcaaactcctggtctcaagtgatctgcctgcctcggcctcccaaagtgctgggattacagatgtgagccactacacccagcccttctcttcatttttaaagtctctattactatctttgaattcactaattttttcttctgcagtgtctaatctgctgttaatcccagccaatatatttttcatctaaaacactgtattcttcatcactagaagtttgatttgggtcttttttataccttccatatctcttcttaccattctcatgttctctaacatcctgaacatacagagtacatttataattgttgtcctaacatctttgtctactaattcttttttttcttttttgataagagtctcgctctgtcacccaggctgtagtgaaatggcacgatctcagctcgctgcaacctttacctcctgggttcaagtcattcttgtacctcagcctcccaagtagctgggattacaggcgtgtgccaccaggcctggctaatttttgtgtttttagtagagatgggtttcgccatgttggctgtgctgatctcgaactcctgggctcaagtgatctgcccacctgagcctcccaaagtgctagcattacaggcaggagctaccgcacccaaccctttgtctattaattctaccaactgggttatttctgggtatgtttccattctgtgatttttctccattttatgggtcatattttcctttgcatccctggtaatttctgccagggactatgaattttgctttgccagacattgtgaattttgctttgttttgggggctggattttttctttttttttttttttgtattccctcaaatatttaagggtttgttctgaaatatacttcattaacttggaaatagtttaatctcttcaaaatttgcttttaaactttggtaggctggtctagaacagctgttagtctagatttttcttttcttttcttttctttttgcctctggttccagttcttgtgatagaattaatttgatcccattactgtggactctattcaatgcctgtcatgttaagaggtatttccatacagactggtgagaacatgaatgttctctgtgtgagctctggaaactgttctgtctgctgctttccagtgattttttccctgacttccagtagtctcctcacacaaaagggctgatcaacgctcagctgctgactcatgagcaagtctatgcagctccccagagagttctctctgtgcagatctttcctctccagtactctgacctgcaaaattatcgccatctcagcctccttgaaagatgaactttgtttcttcaactcaacaacatctccagcctctgtgtgcagcctggaaattccatccaggcagtaaggtggagtgctcttagggcccatctcatttgtttcctttctttcagggatcattatcagcaaggcttgctgtccaacgtctgaaaaccactgttttatatattttgtctgctttttttgacaggagggtaaatctagtccctgttacagctttttggctggaggcagaaatcttgtttgtgatttttaagaattactctcttaaatttaattttgttttataattatgtaaaatacaaagctctgaagttaaaacaaggtacagtaatattctatataacattttggtcagtgatgaaccacatatatgacagtggtcccataaaataatacattttagttgtaccttttctgtgtttagttaaacaaacactaggtgttacattacaactgcctacattattcagtacacaatatgctgtacaggtgtgcagcctaggagcaataggctatactatataactgcgatgttagtaggctacactatctaggtttgtgtaagtgcactctgtgatgtttgcacaatgatggtatcacctaatgacgcatttctcagaatgtatccctatcattaagtgatgcattcagaaaagtctagggtctaaccctttgcttttccctacacactcactgaggtaaacattaaaaaaaaaaatttccccctccaccccttttaagtttttattatttccatactattgtttttattattaacataaacaagtatatacatccacttacatctctactttcttcttaggtgattagcagcatactacaaaattctctcaaactactgttttacttagtaatttatcctgaagatcactccatacaagtatatagagatagtcttcattgcctatcttttgaatttataacttaaaagaaggaattaaaaatgtaaaaacattatcactgatattttcaaggtctttacttacgccatgctgaaagagggttttgcatcctggtcagataaagaagcaatggtgtgctgaggaaatccttcatagaagaaaatgtattactttctttttccaagcaaacagcaaaattctaggactaagaacctaaaaatgttcttctcaaaaagccaatgaagttgtacaaaatatcactttactgcctttcagataagcttattatagcatgatgaaactgactaattccaagcta

SEQ ID NO: 281171 - DNA, 908 bp, Homo sapiens
tctgaaattgtggcaataatcaatagtttaccaaccaaaaagagtccaggacagcatggatgggctggagacaacagaaacagaaacgattgtggaaacagaaatcaaagaacaatctgcagaagaggatgctgaagcagaagtggataacagcaaacagctaattccaactcttcagcgatctgtgtctgaggaatcggcaaactccctggtctctgttggtgtagaagccaaaatcagtgaacagctctgcgctttttgttactgtggggaaaaaagttccttaggacaaggagacttaaaacaattcagaataacgcctggatttatcttgccatggagaaaccaaccttctaacaagaaggacattgatgacaacagcaatggaacctatgagaaaatgcaaaactcagcaccacgaaaacaaagaggacagagaaaagaacgatctcctcagcagaatatagtatcttgtgtaagtgtaagcacccagacagcttcagatgatcaagctggtaaactgtgggatgaactcagtctggttgggcttccagatgccattgatatccaagccttatttgattctacaggcacttgttgggctcatcaccgttgtgtggagtggtcactaggagtatgccagatggaagaaccattgttagtgaacgtggacaaagctgttcagaacgatgtgcattttgtaagcaccttggagccactatcaaatgctgtgaagagaaatgtacccagatgtatcattatccttgtgctgcaggagccggcacctttcaggatttcagtcacatcttcctgctttgtccagaacacattgaccaagctcctgaaagatcgaaggaagatgcaaactgtgcagtgcacgacagcccaaacggtacgagctcgatcta

SEQ ID NO: 281172 - DNA, 819 bp, Homo sapiens
taaagccaaaggaaatactcagtttatgtgttaaatacaattcctgactaggatatgagagttggttaaaaaaacattatattatggaatggaaaaacaaatttacaatttaatacttccctgtgggttaggagactctttttcttacttgttacttatacgatataatatggcaacccagtttaatatcataccatggataatactaacagatgaattctaaaagttgtttcatgacagttaatggctgataaattaaaattgatttggcagtacattgcatttaaacagttaaaaatgaaacaattttctgcttgtattcactttcacagttattttattttattttcagagaacgatctcctcagcagaatatagtatcttgtgtaagtgtaagcacccagacagcttcagatgatcaagctggtaaactgtgggatgaactcagtctggttgggcttccagatgccattgatatccaagccttatttgattctacaggcacttgttgggctcatcaccgttgtgtggagtggtcactaggagtatgccagatggaagaaccattgttagtgaacgtggacaaagctgttcagaacgatgtgcattttgtaagcaccttggagccactatcaaatgctgtgaagagaaatgtacccagatgtatcattatccttgtgctgcaggagccggcacctttcaggatttcagtcacatcttcctgctttgtccagaacacattgaccaagctcctgaaagatcgaaggaagatgcaaactgtgcagtgcacgacagcccaaacggtacgagctcgatcta

SEQ ID NO: 281173 - DNA, 1123 bp, Homo sapiens
cggccgcggcggcgggagccccccaggaggaggaccgggatccatgtgtctttcctggtgactaggatgtcgtcggaggaggacaagagcgtggagcagccgcagccgccgccaccaccccccgaggagcctggagccccggccccgagccccgcagccgcagacaaaagacctcggggccggcctcgcaaagatggcgcttcccctttccagagagccagaaagaaacctcgaagtagggggaaaactgcagtggaagatgaggacagcatggatgggctggagacaacagaaacagaaacgattgtggaaacagaaatcaaagaacaatctgcagaagaggatgctgaagcagaagtggataacagcaaacagctaattccaactcttcagcgatctgtgtctgaggaatcggcaaactccctggtctctgttggtgtagaagccaaaatcagtgaacagctctgcgctttttgttactgtggggaaaaaagttccttaggacaaggagacttaaaacaattcagaataacgcctggatttatcttgccatggagaaaccaaccttctaacaagaaggacattgatgacaacagcaatggaacctatgagaaaatgcaaaactcagcaccacgaaaacaaagaggacagagaaaagaacgatctcctcagcagaatatagtatcttgtgtaagtgtaagcacccagacagcttcagatgatcaagctggtaaactgtgggatgaactcagtctggttgggcttccagatgccattgatatccaagccttatttgattctacaggcacttgttgggctcatcaccgttgtgtggagtggtcactaggagtatgccagatggaagaaccattgttagtgaacgtggacaaagctgttcagaacgatgtgcattttgtaagcaccttggagccactatcaaatgctgtgaagagaaatgtacccagatgtatcattatccttgtgctgcaggagccggcacctttcaggatttcagtcacatcttcctgctttgtccagaacacattgaccaagctcctgaaagatcgaaggaagatgcaaactgtgcagtgcacgacagcccaaacggtacgagctcgatcta

SEQ ID NO: 281174 - DNA, 958 bp, Homo sapiens
ctctagagatcccgtattgtctacacaaagatgcgcttccccttaccagagagccagaaagaacctcgaagtagggggaaaactgcagtggaagatgaggacagcatggatgggctggagacaacagaaacagaaacgattgtggaaacagaaatcaaagaacaatctgcagaagaggatgctgaagcagaagtggataacagcaaacagctaattccaactcttcagcgatctgtgtctgaggaatcggcaaactccctggtctctgttggtgtagaagccaaaatcagtgaacagctctgcgctttttgttactgtggggaaaaaagttccttaggacaaggagacttaaaacaattcagaataacgcctggatttatcttgccatggagaaaccaaccttctaacaagaaggacattgatgacaacagcaatggaacctatgagaaaatgcaaaactcagcaccacgaaaacaaagaggacagagaaaagaacgatctcctcagcagaatatagtatcttgtgtaagtgtaagcacccagacagcttcagatgatcaagctggtaaactgtgggatgaactcagtctggttgggcttccagatgccattgatatccaagccttatttgattctacaggcacttgttgggctcatcaccgttgtgtggagtggtcactaggagtatgccagatggaagaaccattgttagtgaacgtggacaaagctgttcagaacgatgtgcattttgtaagcaccttggagccactatcaaatgctgtgaagagaaatgtacccagatgtatcattatccttgtgctgcaggagccggcacctttcaggatttcagtcacatcttcctgctttgtccagaacacattgaccaagctcctgaaagatcgaaggaagatgcaaactgtgcagtgcacgacagcccaaacggtacgagctcgatcta

SEQ ID NO: 281175 - DNA, 543 bp, Homo sapiens
aaaacaggagtttccctggacaagttcttctcttgttgccaccgtgtgagatgtgcctttcaccttctgccatgattgtgaggccttcccagccacgtggaactactatttatttaaaaatacacaagaaactgttgactatcacccatggagggaaggctgaagaaccgagggtctggtgtagaagagagagttcctgaaaatgaacatttttgtccatccctgctgcaccacttcttcaagtataagatatatactcacttgtccagggacatcccagggaaggtgaacttgcccaggcagatgcgatagacagcgctcagaggaatccgctgcagctgcacacaactcagcatgatgaagtcgtatttgcagatcaagagagtcttgtctgtgaccagtagaattctctccttctcattgttccagtggtctatcctataggaatcatcatagcaaataaaaattgatgacacagcctaagttaaaagcaatgaccttcacatctctcctagcacagaaaacagtgaagtttgatcaact

SEQ ID NO: 281176 - DNA, 1195 bp, Homo sapiens
gagagacaaggaaatgctgtcaccgcggttaacacgcacgtggaggtggttaaagggaagacctgggttttagtcctgtctccatcaacctcaagaaatgggacctcatggaagggaggggaggcaatgccgaggatgtgctcctgagcaggtgccacaattcttcacctgtaaggctgatctaagaagattcctaattatcaattgagagcagagatattccacttccaattacatggcctgcctgctcactcttacttcctattcacactctcttggagaccactttgtgattctaccaaattctataggagaggtgacaaccccaaagagaaggctctagaaagatgacatttggaaatgtgtacgctagtgtctgctggctcctcctgagccatttttactctgtgaatgagatcaaaggccacctaactgcctaaatcaccacaaagggacaaactggtatctcagagcactcagcaacaaaaacaagaaagctaagcctctgcactgcaatgtggcagggcttctggctaagtatagcaagcaattctgatgtggagacaaacagcagcaatgggaatgatatgccaatgaaggattccaacagttgggtctgcaagtgtgcttgtcctgtgacacaaacggcctagacatctcagcactgcttggagctgctcattgggggagcctaagaaacatcagccctttcacaacctcttgctcctgagcagagctcatctcccaagagcacatcagcccgcagcccagtctgatgagaagcacagtattcccctgtgccagtggcagcctcagagcatcctgaaagagcgcttcctagacacgcagtggaagccatgacttcccctaagctgccggtgctgcctctgaactcatgtggaggttcttttttcagtgtccccagaggcagcagaaaaatccgttttccattttggaatctatcaagtaggacaaatctgccacctgggagcatctcctcaagggcaatctctgctccctttcctacatggcctgacaataccctcgagttagaaatgtcccatgttggctaggcacagtggctcatgcctgtaatcccagcactttgggaggctgaggtgggaggattgcttgaggccaggagttttgagaccagcctgacatagagagactatgcctctattattttaaaaaa

SEQ ID NO: 281177 - DNA, 1205 bp, Homo sapiens
gagagacaaggaaatgctgtcaccgcggttaacacgcacgtggaggtggttaaagggaagacctgggttttagtcctgtctccatcaacctcaagaaatgggacctcatggaagggaggggaggcaatgccgaggatgtgctcctgagcaggtgccacaattcttcacctgtaagattgctgacagaaaagtgagacctcctccaccccaaggtctcctaagagaatgctgctagccaaaaaaagatctgctgataattgaggaagagcatctttaaaaagacactcaactacatttcagaaacataaagatctaagtgttggctctacaagggaagaaataaagagaaagaactttttttcctcctacaacaggtctagacaacgtcatacaaggagttgcacgcatatccaaaacaaaagcaaggcaaaaacaagcaaaaaagcaacaaatgcattccaaaatgatgtccatttatcagcccagaaatgtactggatactggtttagttcagcctgtaggtgctgggaagaaattccgacaaatccaagtcagttgcaaaaagggaaaactccagacatatcacccaatgaacttgtaagaaagcatatgagcttccctgaacagattttactccaggtttgcagcccgcaagatttaagatggggccatgaggttaaatcttgtaaactcagaagtgttcacgctactgcatccctaaactctgtaactctctacatactctttaaagcagtgtttctctgcatctttcattccatagccattgtccacctgatccaaaatatcctaagtttttcagtgtttggaagcagggtttccaatttttgtgtatacagaaaaggggggtgtgtgtgaaaaaataagtattagaaaaaaaacatgttatacatatctatcacagaaatgagtgggcaaggtttagaagatggctgaaaccaagccaatactaaggtctactggttggctgcaacaagtttaaaatgtcttcataagggccctggttgggcaatactatacttgctgacagtacttgggatctgccacagacctatagcaaaggactgttcaacttctccaaaaagctggtattaaccaccagaagaaataagaagttcaaggccaaaatatccaaatgaaccaaccactctacttgctgaaatgccataaagcttctttaccccaga

SEQ ID NO: 281178 - DNA, 907 bp, Homo sapiens
gagagacaaggaaatgctgtcaccgcggttaacacgcacgtggaggtggttaaagggaagacctgggttttagtcctgtctccatcaacctcaagaaatgggacctcatggaagggaggggaggcaatgccgaggatgtgctcctgagcaggtgccacaattcttcacctgtaaggcctctccagaggcccaaactttaatagaatctgagagaaaaaagtggccagtctatctgctgtccagagtgatgccaaactctttctcccggagccagttctccccgttgggcagtcaggaaacaataagtgaacaagaagtaacctcagaagaagaaagaactttgggagaatgcactgagaaaggccagactgagtccccttggatgaagttaattaagaaacaaacatgacaggatattgcaatcaaaaccaaggaatgcagtgaggacaggtttctcagttgcccagaggagaaaacatagttccttctgaactaaaattagaaagccgctggcaaggaaacataagaagcatggataagaggctgaaaaccgtaagtcagcaatggggatggaggtgggtacaggaagagagcgagtatctattttgttttatttcttctgtaattccttaagattgtttgcgcctgagctttgggactgcagtagtctcccctacggggcgtcaagtaacaggctgggagctctggcaagaagttctcaaacttctcacaattctgctaagagcttgcagatatctagctggaagatcaaggatccaagtaaaaacattaaaggaaggtttttgcccactccccggtgagaggtcatctgcccagggagtgctctcgtgtcctgacaccatcgcccgactggggatatatcagtaaccgggctgtcgtcgatgcc

SEQ ID NO: 281179 - DNA, 384 bp, Homo sapiens
aaataagaagttcaaggccaaaatatccaaatgaaccaaccactctacttgctgaaatgccataaagcttctttaccccagacatttgcccaaatcttataatttcttttctcctctctgacaggcctctccagaggcccaaactttaatagaatctgagagaaaaaagtggccagtctatctgctgtccagagtgatgccaaactctttctcccggagccagttctccccgttgggcagtcaggtgaggatccgattattaacaaactctacttgggtctccttggcaaagagtttctggcttcagcagcctagctcaggggggttcataattatgtcagactcgctttttttcttgtagttgcttttaaccaaagaggttaa

SEQ ID NO: 281180 - DNA, 2122 bp, Homo sapiens
ggacgactggactgcctgtgttcctgttgctcttcacagaagctccatgaaagcgggcttcgcttttgttcatgcagccagaggctcaacacatgacctcgaagccgccaaggctttatcaaacggatttctcccaaaaacttcgtttccttccgcgacgccctgcaagaaccctgtattcctgagtccctggctcagcgtctgctaccccgatgctgtcaatcagatcctgctaatctgagcggccgtggctccgtcccggctccgcgtccgctgacaggtcaccgctgtgagtctccggattaccagtccaaacgggacggcttgaggtccccgcgccctagggacctgcggggcccgagcgcagggcgcgccagagaactacatttcccacagagctcttgggaagccggggccgccgagacccacggcccggcgggcgggctcgcggggagactcctgggagttgtagtccattccgccggcgccggcgctggcgctgctgcgggctcggcgccggcctttgtctgcgggcacgcgccgctgcggtgctcaggaacagcccatggaagaatcatatgaagaggtggtgactgaggtcgtaagcaggagtggacatgtttggatttccaacagctaccctgctggactgtcatggaagatatgcccagaatgtagcgttcttcaatgtgatgactgaagcccaccacaaatatgaccactctgaggctacaggatcctcaagctgggatatccaaaattctttcagaagagagaagctggaacaaaaatccccagattcgaagacactacaggaagattcacctggagtgagacaaagggtctatgagtgccaggagtgtggaaaatccttccggcaaaaaggtagtctaacgttacatgagagaatccacactggtcaaaagccttttgagtgcacccactgtggaaaaagcttcagggccaaaggcaatcttgttacacatcaacggatacacacgggagagaagccttatcagtgcaaggagtgtgggaaaagcttcagtcaacgaggtagtctcgctgtccacgagagactccacactggacagaaaccctacgagtgtgctatttgtcagagaagcttcaggaatcagagtaaccttgctgttcacaggagagttcacagtggtgagaagccctatagatgtgatcagtgtggaaaagccttcagtcagaaaggaagcttaattgttcacatcagagtccacacaggcctgaagccctatgcctgtacccagtgcaggaagagtttccacaccagggggaattgtattctgcatggcaaaatccacacaggagagacaccctatctgtgcggccagtgtggaaaaagcttcacccagagagggagtctggctgtgcaccagcgaagctgctcacagaggctcaccctttgaccactttcctgaagagaagttctctttatgaattaagagtacaaaatcctctgagatgaagcaacctatccagttctatggaatgaatggagaatctttcagaaagaccatcattgggtagggcaaactgatttttttcctttcccccaaaagagtatgaaaaataaatgtcttgtttattatcattaaacaacaacagacaaacaacaaaaggggacacgctaaaaaataacaccacgcaggggacgcaagcctcagggcagaaccgaggacttgcccacaggggcccaaatacagacagccagaacgccagcgcacgcacatgacagcagtaaccaagacgagacggcaacactgcaccgggaacaacggaacagacaccctacagacgaggagggacccaccaggggcaccacaacacaagcagcgattacagccacagcaaacacaccgacagcggtcaacagggccacacaccgaacaagcccgccccgcggcaccaagatggccaggagcagacgcgggaactattcgcagcggagagaaaacgaacacacccaacacagcaacggcgacagaccaaaaacagacaggaggaacgccagagaccaagaagacgaacaaaggcgatagccaccaaagagcacgacgacaaggacgacaggacggccgagcgacaccgc

SEQ ID NO: 281181 - DNA, 444 bp, Homo sapiens
cagtacactgctatggagaatgcctatttgagtcagctctaacttacctagctctgtgacctttgacaggctccctttgctcccattatctgtatcactctcatggcattgttttcaggattgcattgtctatgcaaagaataaggcctggcacatcataagcactcaaagtattatgtttctttttccctattctaaccagagagggagtctggctgtgcaccagcgaagctgctcacagaggctcaccctttgaccactttcctgaagagaagttctctttatgaattaagagtacaaaatcctctgagatgaagcaacctatccagttctatggaatgaatggagaatctttcagaaagaccatcattgggtagggcaaactgatttttttcctttcccccaaaagagtatgaaaaataaatgtcttgtttattatcatta

SEQ ID NO: 281182 - DNA, 633 bp, Homo sapiens
ggacgactggactgcctgtgttcctgttgctcttcacagaagctccatgaaagcgggcttcgcttttgttcatgcagccagaggctcaacacatgacctcgaagccgccaaggctttatcaaacggatttctcccaaaaacttcgtttccttccgcgacgccctgcaagaaccctgtattcctgagtccctggctcagcgtctgctaccccgatgctgtcaatcagatcctgctaatctgagcggccgtggctccgtcccggctccgcgtccgctgacaggtcaccgctgtgagtctccggattaccagtccaaacgggacggcttgaggtccccgcgccctagggacctgcggggcccgagcgcagggcgcgccagagaactacatttcccacagagctcttgggaagccggggccgccgagacccacggcccggcgggcgggctcgcggggagactcctgggagttgtagtccattccgccggcgccggcgctggcgctgctgcgggctcggcgccggcctttgtctgcgggcacgcgccgctgcggtgagtgaggccgctggccgggtcagagcgcgggggcaaggcggggctgcgccatcaaaccgctgtcccgggccctccggggttt

SEQ ID NO: 281183 - DNA, 340 bp, Homo sapiens
ccagcgaagctgctcacagaggctcaccctttgaccactttcctggtgcacagccagactccctctctgggtgaagctttttccacactggccgccagagagggagtctggctgtgcaccagcgaagctgctcacagaggctcaccctttgaccactttcctgaagagaagttctctttatgaattaagagtacaaaatcctctgagatgaagcaacctatccagttctatggaatgaatggagaatctttcagaaagaccatcattgggtagggcaaactgatttttttcctttcccccaaaagagtatgaaaaataaatgtcttgtttattatcatta

SEQ ID NO: 281184 - DNA, 1199 bp, Homo sapiens
gcggccgccaaggaaatgagcaggcctggccggcccgggccccgagggaggccagccgcgagcggagaggtcggcggtccgcagagcagggtcccgtggaccggagagcgggatgccgaggtgctcaggaacagcccatggaagaatcatatgaagaggtggtgactgaggtcgtaagcaggagtggacatgtttggatttccaacagctaccctgctggactgtcatggaagatatgcccagaatgtagcgttcttcaatgtgatgactgaagcccaccacaaatatgaccactctgaggctacaggatcctcaagctgggatatccaaaattctttcagaagagagaagctggaacaaaaatccccagattcgaagacactacaggaagattcacctggagtgagacaaagggtctatgagtgccaggagtgtggaaaatccttccggcaaaaaggtagtctaacgttacatgagagaatccacactggtcaaaagccttttgagtgcacccactgtggaaaaagcttcagggccaaaggcaatcttgttacacatcaacggatacacacgggagagaagccttatcagtgcaaggagtgtgggaaaagcttcagtcaacgaggtagtctcgctgtccacgagagactccacactggacagaaaccctacgagtgtgctatttgtcagagaagcttcaggaatcagagtaaccttgctgttcacaggagagttcacagtggtgagaagccctatagatgtgatcagtgtggaaaagccttcagtcagaaaggaagcttaattgttcacatcagagtccacacaggcctgaagccctatgcctgtacccagtgcaggaagagtttccacaccagggggaattgtattctgcatggcaaaatccacacaggagagacaccctatctgtgcggccagtgtggaaaaagcttcacccagagagggagtctggctgtgcaccagcgaagctgctcacagaggctcaccctttgaccactttcctgaagagaagttctctttatgaattaagagtacaaaatcctctgagatgaagcaacctatccagttctatggaatgaatggagaatctttcagaaagaccatcattgggtagggcaaactgatttttttcctttcccccaaaagagtatgaaaaataaatgtcttgtttattatcatta

SEQ ID NO: 281185 - DNA, 1259 bp, Homo sapiens
tgttgactttttccttctcacatatcaattattctgccctttcctgtttgtttctgtttgtttttctccctcaggtgctcaggaacagcccatggaagaatcatatgaagaggtggtgactgaggtcgtaagcaggagtggacatgtttggatttccaacagctaccctgctggactgtcatggaagatatgcccagaatgtagcgttcttcagtgagtgagtcagttgatggctggatgcgctcagctcacagatattcagtgtccctgttctcagcactggtcggcagtctgaggaagcagaggagaccttgctttgatgtgatgactgaagcccaccacaaatatgaccactctgaggctacaggatcctcaagctgggatatccaaaattctttcagaagagagaagctggaacaaaaatccccagattcgaagacactacaggaagattcacctggagtgagacaaagggtctatgagtgccaggagtgtggaaaatccttccggcaaaaaggtagtctaacgttacatgagagaatccacactggtcaaaagccttttgagtgcacccactgtggaaaaagcttcagggccaaaggcaatcttgttacacatcaacggatacacacgggagagaagccttatcagtgcaaggagtgtgggaaaagcttcagtcaacgaggtagtctcgctgtccacgagagactccacactggacagaaaccctacgagtgtgctatttgtcagagaagcttcaggaatcagagtaaccttgctgttcacaggagagttcacagtggtgagaagccctatagatgtgatcagtgtggaaaagccttcagtcagaaaggaagcttaattgttcacatcagagtccacacaggcctgaagccctatgcctgtacccagtgcaggaagagtttccacaccagggggaattgtattctgcatggcaaaatccacacaggagagacaccctatctgtgcggccagtgtggaaaaagcttcacccagagagggagtctggctgtgcaccagcgaagctgctcacagaggctcaccctttgaccactttcctgaagagaagttctctttatgaattaagagtacaaaatcctctgagatgaagcaacctatccagttctatggaatgaatggagaatctttcagaaagaccatcattgggtagggcaaactgatttttttcctttcccccaaaagagtatgaaaaataaatgtcttgtttattatcatta

SEQ ID NO: 281186 - DNA, 1672 bp, Homo sapiens
ggacgactggactgcctgtgttcctgttgctcttcacagaagctccatgaaagcgggcttcgcttttgttcatgcagccagaggctcaacacatgacctcgaagccgccaaggctttatcaaacggatttctcccaaaaacttcgtttccttccgcgacgccctgcaagaaccctgtattcctgagtccctggctcagcgtctgctaccccgatgctgtcaatcagatcctgctaatctgagcggccgtggctccgtcccggctccgcgtccgctgacaggtcaccgctgtgagtctccggattaccagtccaaacgggacggcttgaggtccccgcgccctagggacctgcggggcccgagcgcagggcgcgccagagaactacatttcccacagagctcttgggaagccggggccgccgagacccacggcccggcgggcgggctcgcggggagactcctgggagttgtagtccattccgccggcgccggcgctggcgctgctgcgggctcggcgccggcctttgtctgcgggcacgcgccgctgcggtgctcaggaacagcccatggaagaatcatatgaagaggtggtgactgaggtcgtaagcaggagtggacatgtttggatttccaacagctaccctgctggactgtcatggaagatatgcccagaatgtagcgttcttcaatgtgatgactgaagcccaccacaaatatgaccactctgaggctacaggatcctcaagctgggatatccaaaattctttcagaagagagaagctggaacaaaaatccccagattcgaagacactacaggaagattcacctggagtgagacaaagggtctatgagtgccaggagtgtggaaaatccttccggcaaaaaggtagtctaacgttacatgagagaatccacactggtcaaaagccttttgagtgcacccactgtggaaaaagcttcagggccaaaggcaatcttgttacacatcaacggatacacacgggagagaagccttatcagtgcaaggagtgtgggaaaagcttcagtcaacgaggtagtctcgctgtccacgagagactccacactggacagaaaccctacgagtgtgctatttgtcagagaagcttcaggaatcagagtaaccttgctgttcacaggagagttcacagtggtgagaagccctatagatgtgatcagtgtggaaaagccttcagtcagaaaggaagcttaattgttcacatcagagtccacacaggcctgaagccctatgcctgtacccagtgcaggaagagtttccacaccagggggaattgtattctgcatggcaaaatccacacaggagagacaccctatctgtgcggccagtgtggaaaaagcttcacccagagagggagtctggctgtgcaccagcgaagctgctcacagaggctcaccctttgaccactttcctgaagagaagttctctttatgaattaagagtacaaaatcctctgagatgaagcaacctatccagttctatggaatgaatggagaatctttcagaaagaccatcattgggtagggcaaactgatttttttcctttcccccaaaagagtatgaaaaataaatgtcttgtttattatcattaaaaaaagtcgacgcggccgcgaatttagtagtagtaggcggccgc

SEQ ID NO: 281187 - DNA, 572 bp, Homo sapiens
ggtggtgatctgaggatccctctccacactggacagaaaccctacgagtgtgctatttgtcagagaagcttcaggaatcagagtaaccttgctgttcacaggagagttcacagtggtgagaagccctatagatgtgatcagtgtggaaaagccttcagtcagaaaggaagcttaattgttcacatcagagtccacacaggcctgaagccctatgcctgtacccagtgcaggaagagtttccacaccagggggaattgtattctgcatggcaaaatccacacaggagagacaccctatctgtgcggccagtgtggaaaaagcttcacccagagagggagtctggctgtgcaccagcgaagctgctcacagaggctcaccctttgaccactttcctgaagagaagttctctttatgaattaagagtacaaaatcctctgagatgaagcaacctatccagttctatggaatgaatggagaatctttcagaaagaccatcattgggtagggcaaactgatttttttcctttcccccaaaagagtatgaaaaataaatgtcttgtttattatcatta

SEQ ID NO: 281188 - DNA, 899 bp, Homo sapiens
gcggccgccaaggaaatgagcaggcctggccggcccgggccccgagggaggccagccgcgagcggagaggtcggcggtccgcagagcagggtcccgtggaccggagagcgggatgccgaggtgctcaggaacagcccatggaagaatcatatgaagaggtggtgactgaggtcgtaagcaggagtggacatgtttggatttccaacagctaccctgctggactgtcatggaagatatgcccagaatgtagcgttcttcaatgtgatgactgaagcccaccacaaatatgaccactctgaggctacaggatcctcaagctgggatatccaaaattctttcagaagagagaagctggaacaaaaatccccagattcgaagacactacaggaagattcacctggagtgagacaaagggtctatgagtgccaggagtgtggaaaatccttccggcaaaaaggtagtctaacgttacatgagagaatccacactggtcaaaagccttttgagtgcacccactgtggaaaaagcttcagggccaaaggcaatcttgttacacatcaacggatacacaccagggggaattgtattctgcatggcaaaatccacacaggagagacaccctatctgtgcggccagtgtggaaaaagcttcacccagagagggagtctggctgtgcaccagcgaagctgctcacagaggctcaccctttgaccactttcctgaagagaagttctctttatgaattaagagtacaaaatcctctgagatgaagcaacctatccagttctatggaatgaatggagaatctttcagaaagaccatcattgggtagggcaaactgatttttttcctttcccccaaaagagtatgaaaaataaatgtcttgtttattatcatta

SEQ ID NO: 281189 - DNA, 999 bp, Homo sapiens
  misc_feature (32)..(32): n is a, c, g, or t
  misc_feature (49)..(49): n is a, c, g, or t
tgacggtgtctgcgagtagcagccacactcangagggagaggagcccanggaggaacagtaacataactaagacatttgacatataaactccttgagggtagggcttggcactacgtacaagattttagagcacctggctcagctgcccataccctggagcatcggtgccaaatggccccagaacaccgtcgaaggtgtttccctttgtctgcgggcacgcgccgctgcggtgctcaggaacagcccatggaagaatcatatgaagaggtggtgactgaggtcgtaagcaggagtggacatgtttggatttccaacagctaccctgctggactgtcatggaagatatgcccagaatgtagcgttcttcaatgtgatgactgaagcccaccacaaatatgaccactctgaggctacaggatcctcaagctgggatatccaaaattctttcagaagagagaagctggaacaaaaatccccagattcgaagacactacaggaagattcacctggagtgagacaaagggtctatgagtgccaggagtgtggaaaatccttccggcaaaaaggtaagtccacacaggcctgaagccctatgcctgtacccagtgcaggaagagtttccacaccagggggaattgtattctgcatggcaaaatccacacaggagagacaccctatctgtgcggccagtgtggaaaaagcttcacccagagagggagtctggctgtgcaccagcgaagctgctcacagaggctcaccctttgaccactttcctgaagagaagttctctttatgaattaagagtacaaaatcctctgagatgaagcaacctatccagttctatggaatgaatggagaatctttcagaaagaccatcattgggtagggcaaactgatttttttcctttcccccaaaagagtatgaaaaataaatgtcttgtttattatcattaaaaaaagtcgacgcggccgcgaatttagtagtagtaggcggccgc

SEQ ID NO: 281190 - DNA, 1627 bp, Homo sapiens
ggacgactggactgcctgtgttcctgttgctcttcacagaagctccatgaaagcgggcttcgcttttgttcatgcagccagaggctcaacacatgacctcgaagccgccaaggctttatcaaacggatttctcccaaaaacttcgtttccttccgcgacgccctgcaagaaccctgtattcctgagtccctggctcagcgtctgctaccccgatgctgtcaatcagatcctgctaatctgagcggccgtggctccgtcccggctccgcgtccgctgacaggtcaccgctgtgagtctccggattaccagtccaaacgggacggcttgaggtccccgcgccctagggacctgcggggcccgagcgcagggcgcgccagagaactacatttcccacagagctcttgggaagccggggccgccgagacccacggcccggcgggcgggctcgcggggagactcctgggagttgtagtccattccgccggcgccggcgctggcgctgctgcgggctcggcgccggcctttgtctgcgggcacgcgccgctgcggtgctcaggaacagcccatggaagaatcatatgaagaggtggtgactgaggtcgtaagcaggagtggacatgtttggatttccaacagctaccctgctggactgtcatggaagatatgcccagaatgtagcgttcttcaatgtgatgactgaagcccaccacaaatatgaccactctgaggctacaggatcctcaagctgggatatccaaaattctttcagaagagagaagctggaacaaaaatccccagattcgaagacactacaggaagattcacctggagtgagacaaagggtctatgagtgccaggagtgtggaaaatccttccggcaaaaaggtagtctaacgttacatgagagaatccacactggtcaaaagccttttgagtgcacccactgtggaaaaagcttcagggccaaaggcaatcttgttacacatcaacggatacacacgggagagaagccttatcagtgcaaggagtgtgggaaaagcttcagtcaacgaggtagtctcgctgtccacgagagactccacactggacagaaaccctacgagtgtgctatttgtcagagaagcttcaggaatcagagtaaccttgctgttcacaggagagttcacagtggtgagaagccctatagatgtgatcagtgtggaaaagccttcagtcagaaaggaagcttaattgttcacatcagagtccacacaggcctgaagccctatgcctgtacccagtgcaggaagagtttccacaccagggggaattgtattctgcatggcaaaatccacacaggagagacaccctatctgtgcggccagtgtggaaaaagcttcacccagagagggagtctggctgtgcaccagcgaagctgctcacagaggctcaccctttgaccactttcctgaagagaagttctctttatgaattaagagtacaaaatcctctgagatgaagcaacctatccagttctatggaatgaatggagaatctttcagaaagaccatcattgggtagggcaaactgatttttttcctttcccccaaaagagtatgaaaaataaatgtcttgtttattatcatta

SEQ ID NO: 281191 - DNA, 1309 bp, Homo sapiens
  misc_feature (32)..(32): n is a, c, g, or t
  misc_feature (49)..(49): n is a, c, g, or t
tgacggtgtctgcgagtagcagccacactcangagggagaggagcccanggaggaacagtaacataactaagacatttgacatataaactccttgagggtagggcttggcactacgtacaagattttagagcacctggctcagctgcccataccctggagcatcggtgccaaatggccccagaacaccgtcgaaggtgtttccctttgtctgcgggcacgcgccgctgcggtgctcaggaacagcccatggaagaatcatatgaagaggtggtgactgaggtcgtaagcaggagtggacatgtttggatttccaacagctaccctgctggactgtcatggaagatatgcccagaatgtagcgttcttcaatgtgatgactgaagcccaccacaaatatgaccactctgaggctacaggatcctcaagctgggatatccaaaattctttcagaagagagaagctggaacaaaaatccccagattcgaagacactacaggaagattcacctggagtgagacaaagggtctatgagtgccaggagtgtggaaaatccttccggcaaaaaggtagtctaacgttacatgagagaatccacactggtcaaaagccttttgagtgcacccactgtggaaaaagcttcagggccaaaggcaatcttgttacacatcaacggatacacacgggagagaagccttatcagtgcaaggagtgtgggaaaagcttcagtcaacgaggtagtctcgctgtccacgagagactccacactggacagaaaccctacgagtgtgctatttgtcagagaagcttcaggaatcagagtaaccttgctgttcacaggagagttcacagtggtgagaagccctatagatgtgatcagtgtggaaaagccttcagtcagaaaggaagcttaattgttcacatcagagtccacacaggcctgaagccctatgcctgtacccagtgcaggaagagtttccacaccagggggaattgtattctgcatggcaaaatccacacaggagagacaccctatctgtgcggccagtgtggaaaaagcttcacccagagagggagtctggctgtgcaccagcgaagctgctcacagaggctcaccctttgaccactttcctgaagagaagttctctttatgaattaagagtacaaaatcctctgagatgaagcaacctatccagttctatggaatgaatggagaatctttcagaaagaccatcattgggtagggcaaactgatttttttcctttcccccaaaagagtatgaaaaataaatgtcttgtttattatcatta

SEQ ID NO: 281192 - DNA, 1069 bp, Homo sapiens
cacccactgtggaaaaagcttcagggccaaaggcaatcttgttacacatcaacggatacacacgggagagaagccttatcagtgcaaggagtgtgggaaaagcttcagtcaacgaggtagtctcgctgtccacgagagtccacactgtccacaaatatgaccactctgaggctacaggatcctcaagctgggatatccaaaattctttcagaagagagaagctggaacaaaaatccccagattcgaagacactacaggaagattcacctggagtgagacaaagggtctatgagtgccaggagtgtggaaaatccttccggcaaaaaggtagtctaacgttacatgagagaatccacactggtcaaaagccttttgagtgcacccactgtggaaaaagcttcagggccaaaggcaatcttgttacacatcaacggatacacacgggagagaagccttatcagtgcaaggagtgtgggaaaagcttcagtcaacgaggtagtctcgctgtccacgagagactccacactggacagaaaccctacgagtgtgctatttgtcagagaagcttcaggaatcagagtaaccttgctgttcacaggagagttcacagtggtgagaagccctatagatgtgatcagtgtggaaaagccttcagtcagaaaggaagcttaattgttcacatcagagtccacacaggcctgaagccctatgcctgtacccagtgcaggaagagtttccacaccagggggaattgtattctgcatggcaaaatccacacaggagagacaccctatctgtgcggccagtgtggaaaaagcttcacccagagagggagtctggctgtgcaccagcgaagctgctcacagaggctcaccctttgaccactttcctgaagagaagttctctttatgaattaagagtacaaaatcctctgagatgaagcaacctatccagttctatggaatgaatggagaatctttcagaaagaccatcattgggtagggcaaactgatttttttcctttcccccaaaagagtatgaaaaataaatgtcttgtttattatcatta

SEQ ID NO: 281193 - DNA, 644 bp, Homo sapiens
gcattgtctatgcaaagaataaggcctggcacatcataagcactcaaagtattatgtttctttttccctattctaactcagcattattggtgcttcttatatgacttccctctcattttatcagatgtgatgactgaagcccaccacaaatatgaccactctgaggctacaggatcctcaagctgggatatccaaaattctttcagaagagagaagctggaacaaaaatccccagattcgaagacactacaggaagattcacctggagtgagacaaagggtctatgagtgccaggagtgtggaaaatccttccggcaaaaaggtagtctaacgttacatgagagaatccacactggtcaaaagccttttgagtgcacccactgtggaaaaagcttcagggccaaaggcaatcttgttacacatcaacggatacacacgggagagaagccttatcagtgcaaggagtgtgggaaaagcttcagtcaacgaggtagtctcgctgtccacgagagactccacactggacagaaaccctacgagtgtgctatttgtcagagaagcttcaggaatcagagtaaccttgctgttcacaggagagttcacagtggtgagaagccctatagatgtgatcagtgtggaaaagc

SEQ ID NO: 281194 - DNA, 361 bp, Homo sapiens
cacactcatagggtcctgtgtcattccttgtgacactgagtagagtgagggtcctgttgccattggacagctgcagcctgggactgaccgggaggctctgattgtttatccaccacagaccaggatctcccctctgggctgcagatgcctaagaagaaaggaactgaaccaactctggtattggggtccacagatgccaaataaggcccctggagtagaggagaggttaagactgtggctgaagacaaatctcctgtaactgatcttccagttacggtctgtgtgaccttgatatagtgactgtatttattgccatgtggctcagtttcccctcagtgaaatagtataaatggttaatggt

SEQ ID NO: 281195 - DNA, 285 bp, Homo sapiens
ctgcctgagcctctcggattacagtttcaggtatgtctttatcagcagtgtgaaaatggacgaatgcactaatacaacaggctccctggtcccccaccttctcggactaagtcctctgcagtgttgactccgtgttctatgagcttctggcagtcatctagtggtttaatggtctcctgttcaatggtgtccacctcttgcaaaagggtcaccaatcgctcatccaggagctttccaagggttccctttaaatcattaaaatgctgtttgagaacatcccttgtc

SEQ ID NO: 281196 - DNA, 7640 bp, Homo sapiens
actcactatagggctcgagcggccgcccgggcaggtaaagaatcagaagacatttgtgctttggggagcagaggccctcagggtatagagaaggaagaagagagaggttcactgtagtcctgaagcagaaataagacctgtggctgaaggaagccttagcaattcactccttcctcttcctgagaactctctgtaggaagtctcacctagcagaggcttcacagtatttcagagaagccaaagattgtttgcctctttggaaactgttatccttccatcatgactgtgtcactcctgccactgttccaccatagagatggcgtcctttgcagcaaaccgtaagttataaggatgagggaagaagagtagagggccaaaaggattccattttgaggaaaaactacagtttgccttgccaggtagaagaatcaggcgcccagacaccatgtcacaaccctccagaactgacgttggcaggaagtagagactttgttgcctgtgtcccccatcctcaccatgtcttcgactcagggcaatggggaacactggaagtccctggagtcagtgggcatcagccgcaaagagctagcgatggccgaagccctgcagatggagtatgatgccctgtcccggctccggcatgacaaggaggagaacagagccaagcagaacgcagacccctctctcatcagctgggatgagcctggggtagacttttacagcaagccagcaggaaggcggaccgacctcaagctgttacgcggtctctctggctctgatcctacccttaactacaactcactatccccacaggaagggccgcccaaccactctacctcccaagggccacagcctggctcagatccctggcccaaaggctccctgtctggagactatctctacatttttgatggttcagatgggggagtctcttcgtccccaggaccaggggacatagagggctcttgcaagaaactatccccacctcctctgcctccccgagcttctatctgggatacccctcccctgcctcccagaaaggggtccccctcatcctccaagatctcccagcccagtgacatcaacactttctctttggtcgaacaattgccaggcaaactgctagagcatcggatcctagaagaggaagaggtgctgggaggtgggggtcaggggcgcctactggggtctgtggactatgatggtatcaatgatgcaattactaggctcaacttgaaatcgacctatgatgcggagatgttgcgggatgccaccaggggctggaaggagggccgagggccgctggacttcagcaaagacacctctggaaaacccgtggccaggagcaagactatgccccctcaggtgcccccccgcacctatgcctcccgctatggcaaccgaaagaatgcgacgcctggcaagaaccgccggatttctgcagccccggtgggctcccggccccacactgttgccaatggccatgagttgtttgaggtctcagaagagagagatgaggaggttgctgcattttgccacatgctggatatccttcgatctggctctgacatccaagactacttcctcactggctatgtctggagtgctgtcacccctagcccagagcacctcggggatgaggtcaacctgaaggtgactgtgttgtgtgacaggcttcaagaggcactcactttcacctgcaactgttcctccactgtagacttgcttatctaccagaccctgtgctacacccatgatgacctgaggaatgtggacgtgggtgactttgtgctaaagccctgcgggctggaggagttcctgcagaacaagcatgccttgggcagtcatgagtacatccaatactgccgcaagtttgacattgacattcggctacagctgatggagcagaaggttgtgcgcagtgacctggcccggacggtgaatgatgaccagagcccctccaccttgaactacctcgtccatctccaagagaggcctgtcaagcagaccatcagcaggcaggccctgagtcttctgttcgacacttaccacaatgaggtggatgccttcctgctggctgatggagacttcccactgaaggctgacagggtggtccagtccgtcaaggccatctgcaacgccctggccgccgtggaaacccctgagatcaccagtgctctcaaccagctgcccccctgcccctcccgcatgcagcctaaaattcagaaggatcccagtgtcttggctgtgagggaaaaccgagagaaggtcgtggaagccctgaccgctgccatcttggacctggtggagctgtactgcaacacattcaacgcagacttccagacggcagtgcccgggagccgcaagcatgacctggtccaggaggcctgccatttcgccaggtccctggccttcactgtctatgccacccaccgcatccccatcatctgggctaccagctatgaagatttctacctctcctgctccctcagccatggcggcaaggagctgtgcagccccctgcagacccgaagagctcacttctccaagtacctcttccacctcatcgtctgggaccagcagatctgcttcccagtgcaggtgaaccggctgcctcgggagacactgctgtgtgccactctctatgctctgcccatccccccaccggggagctcctcagaggccaataagcagcggcgggtgcctgaagccctgggctgggtcactaccccactcttcaacttcaggcaggtcctgacctgtggccggaagcttctgggtttgtggccagcaacacaggaaaatcccagcgcccgttggagtgcacctaatttccaccagccagacagtgtcatcctgcagattgacttccccacctcggcctttgacatcaagttcaccagcccccctggagacaagttcagcccccgctatgagtttggcagcctccgggaagaagaccagcgcaagcttaaagacatcatgcagaaagagtccttgtactggctcactgatgctgacaagaagcgcctgtgggagaagcgatattactgccactcggaggtgagctcgctccccctggtgctcgccagcgcccccagctgggagtgggcttgcctgcctgacatctatgttctcctgaagcagtggacccacatgaaccaccaggatgccctggggctcctgcatgccaccttcccggaccaggaggtgcgtcgtatggctgtgcagtggattggctcactctcagatgctgagctgctagactacctgccccagctggtacaggccctgaagtatgaatgctacctggacagcccgttggtgcgcttcctcctgaaacgagctgtgtctgacttgagagtgactcactacttcttctggttactgaaggacggcctcaaggactctcagttcagcatccgctaccagtatctgctggcagccttactgtgctgctgtggcaaggggctgagagaagagtttaaccgccagtgctggcttgtcaatgccctggccaaactggcccagcaggtccgggaggcagccccatctgcaaggcagggaatcctccgcacgggcctggaggaggtgaagcagttctttgccctcaatggctcgtgccgcttgccactcagccccagtctgctggttaagggaattgtgcccagggactgttcctacttcaactccaatgctgtccccctcaaactctccttccaaaatgtggatcccctgggtgagaacatccgtgtcatcttcaagtgtggggacgaccttcgccaggacatgctaacgctgcagatgattcgcatcatgagcaagatctgggtccaggaggggctggacatgcgcatggtcatcttccgctgcttctccaccggccggggcagagggatggtggagatgatccctaatgctgagaccctgcgtaagatccaggtggagcatggggtgaccggctcgttcaaggaccggcccctggcagactggctgcagaaacacaaccctggggaggacgagtatgagaaggctgtggagaactttatctactcctgcgctggctgctgcgtggccacgtacgtcttgggcatctgtgaccgacataatgacaacatcatgctgaagaccactggtcacatgttccacattgattttggccgcttcctgggccatgcccagatgtttggcaacatcaagcgggaccgtgccccctttgtcttcacctcggacatggcgtatgtcatcaacgggggtgacaagccttccagccgcttccatgattttgttgacctttgctgccaagcctacaacctcattcgcaagcacacccacctcttcctcaaccttctgggcctgatgttgtcctgtgggatccctgaactctcagacctggaggacctcaagtatgtgtacgatgccctgaggcctcaggatacagaggccaatgccactacctacttcactaggttgattgagtccagcctgggcagtgtagccacaaagctcaattttttcatccataatctggctcagatgaagttcacgggctcagatgaccggctgaccctctcctttgcctcccgaacacacactctcaagagctctggccgaatcagtgatgttttcctctgccgccatgagaagatcttccaccccaacaaaggctatatatatgtggtaaaggtgatgcgagagaacactcacgaggccacctacatccagcggacctttgaggagttccaggaattacacaataagttgcggctgctcttcccttcttcccacttgcccagcttccctagtcgcttcgtgatcggccgctcccggggagaggcggtggccgagcggcggagggaggagctaaacggttacatctggcacttgatccacgcaccccctgaggtggccgagtgtgatttggtgtacaccttcttccacccactgccccgggatgagaaggctatgggcaccagcccagctcctaagtcctcagatggcacatgggcccggcccgtcggaaaggtgggaggggaggtgaagctgtccatctcctacaaaaacaataaactcttcatcatggtgatgcatattcggggcttgcaactgctccaggatggaaatgaccctgacccctatgtgaaaatttacctccttcctgaccctcagaaaaccactaagaggaaaaccaaagtggcccggaaaacctgcaatcctacctacaatgagatgttggtatatgatgggatccccaagggtgacctgcagcagcgggagctccagctgagcgtgctgagtgagcagggattctgggagaacgtcctcctcggtgaggtgaacatccgcctgcgagagctggacctggctcaggagaagaccggctggttcgccctgggatctcgaagtcatggcaccttgtgagcccagcagagccaccacccagcatcccaggctggtggcaggagctgggggagaggactctcccctgtgagactcctccttgtgaagggccagggccctgggcaggcctccagctcggtccaggtgattctggcctctgtggtaggaggcagggagagtaagacatgctctgctgtctcttcctctggagactgaacttgggttggttgtgatgagcagccccttggaggctgtgaggttgcagcaaagttttaagtttaccttgtgtcaagggagcaatgcttggtttggggagtgtgtggggtgggctgtatgaagtagcattttgggggtgggtgggtggatatcttaatttttatttttaaaaaatgaaatagtgatgttgtcctaactgggacaggaagccttgcgagaagggacgtacctatgccccagaaggcaagagaggaagactatttggactttttgtatgattaaggttcttattggacttttccctaggttttttttttttgttattgttgttgttgtttcgttttctagctataggaactatctggggaggggcccagtgggtcctcggccagagccctctctaaggacaggttggggagggttggggagggctgcctgtgctggactgaggcttgtgccactgggcctttctgattttgcctccaaaggagagcgctgtgatacctacatgtgtaaggaagggccttccgtattggggttctgccaaggacccgtattcagggacccatgctcttttggggggacttttcctcttgtcttccctactttattaggacttgccctgaataccattttctaccccttgcccctccattctcctggcccttctgggggtcagctggtctctatgaatatgctgggggtgcttccccataggtctctcccttcatttgtctctggtgggacaaaatactgactcagtccttagatgtagtttcacccaagagcatcttggccctgggaagaggtccctaggctgcagatgctactgactgcttgctaggtagcctctggaaagcattccccatccatcactccccacttctttctgctgtgctgcttccctcccaaactccatttctgtcaccctttttataagacttttcctcattctgtggggccataaacctatttagtctggagccaaagggatgccctatctgaaggaaaggggcatggggtgggggattccatcaaaactgttgttttttgccccatgatttttctttggtcagtaggaggctggattggagtggtgattattcccctggagctaagctcaggagcccgaagggagagactgagactgactcccttatctcttcatattctttattccctaccagatggatttttttttttttttttggagacggagtctcgccctgtcgccaggctggagtgtagtggcatgatctcgactcactgcaaaatctgcctcccgggttcaagcgattctcctacctcagcctcccgagtagctgggattacaggcatgtgccaccacgccaagctaatttttgtatttttagtagagacggggtttcaccatgttggccaggatggtctcgatctcttgacctcgtgatctgcctgccttggcctcccaaagtgctgggattacaggcgtgagccaccatgccccgccccagatggattttacatttgctcttttgtgtttcgctccaaagggttgtcttcctcgccaaaaggagggagggactttgaatttgatatgaatctttaaaaccagaattggctggatatttcccatgattgggaaaagagtgaaatgaggacattctgtaaactgtccctccctaattccaaggatcagaaactccccgttttgctgactcattccataactggagaaagaagctccattgaccgaagccacagggcagcatggaagtttaaattttctctaaaattaaaatgccaaggataaagctggctgcttccaggagggggaagaggagtggggagtgggcggtgaaacttttccagatgaacggaccataaatgtgttactggctttgtgcctgtagctcattttattatgacctatatgctcctgatttaaagagatctgtgtactgtttacttcccacttcccagaatcccttgtatctcctttctcgggaattgtattttctaataaatgacatttgagaaaaaaa

SEQ ID NO: 281197 - DNA, 565 bp, Homo sapiens
taacaatttccccagggaaccagctatgacatgattacgattttaaatcgccccacaatagggaatttggccctcaaggcccaagaattcggcaacgagggggactttgaatttgatatgaatctttaaaaccagaattggctggatatttcccatgattgggaaaagagtgaaatgaggacattctgtaaactgtccctccctaattccaaggatcagaaactccccgttttgctgactcattccataactggagaaagaagctccattgaccgaagccacagggcagcatggaagtttaaattttctctaaaattaaaatgccaaggataaagctggctgcttccaggagggggaagaggagtggggagtgggcggtgaaacttttccagatgaacggaccataaatgtgttactggctttgtgcctgtagctcattttattatgacctatatgctcctgatttaaagagatctgtgtactgtttacttcccacttcccagaatcccttgtatctcctttctcgggaattgtattttctaataaatgacatttgagaaaaaaa

SEQ ID NO: 281198 - DNA, 329 bp, Homo sapiens
gcggccgcctactactactactgcgaattcaagcttctaacgatgtacggggacatggaagtttaaattttctctaaaattaaaatgccaaggataaagctggctgcttccaggagggggaagaggagtggggagtgggcggtgaaacttttccagatgaacggaccataaatgtgttactggctttgtgcctgtagctcattttattatgacctatatgctcctgatttaaagagatctgtgtactgtttacttcccacttcccagaatcccttgtatctcctttctcgggaattgtattttctaataaatgacatttgagaaaaaaa

SEQ ID NO: 281199 - DNA, 417 bp, Homo sapiens
ccctgagagggaggctgtatcctcagcctcagcctcagcctgacttcctgggccacctgttgcttgaagccacaggagtggcccctcctaatttgacttcctgtcctccataggatctgcttcccagtgcaggtgaaccggctgcctcgggagacactgctgtgtgccactctctatgctctgcccatccccccaccggggagctcctcagaggccaataagcagcggcgggtgcctgaagccctgggctgggtcactaccccactcttcaacttcaggcaggtcctgacctgtggccggaagcttctgggtttgtggccagcaacacaggaaaatcccagcgcccgttggagtgcacctaatttccaccagccagacagtgtcatcctgcaggtgaggctttagcccttccctccc

SEQ ID NO: 281200 - DNA, 7953 bp, Homo sapiens
ccacctcggcctcccaaagtgttgggattacgggcatgggccacctctcccagcttgttcttgcattttgtaagatcacatagagtatcaaaactggaaaggacctgggccatcacttccctgagaaaaagtgactttctcaaggtcatgcagttagtagcaatgctggaactgaacgcctaccccgcagatcacaacatgacccgtgaaaggacctatcctgcaacactttggagtttcgtgccgacccaattagtggctttgtctttgggaaatttacttccccaaaacactgggacattgggatggaattcactcaccccaaatcatcaccctggttaaggagactaaagaatcagaagacatttgtgctttggggagcagaggccctcagggtatagagaaggaagaagagagaggttcactgtagtcctgaagcagaaataagacctgtggctgaaggaagccttagcaattcactccttcctcttcctgagaactctctgtaggaagtctcacctagcagaggcttcacagtatttcagagaagccaaagattgtttgcctctttggaaactgttatccttccatcatgactgtgtcactcctgccactgttccaccatagagatggcgtcctttgcagcaaaccgtaagttataaggatgagggaagaagagtagagggccaaaaggattccattttgaggaaaaactacagtttgccttgccaggtagaagaatcaggcgcccagacaccatgtcacaaccctccagaactgacgttggcaggaagtagagactttgttgcctgtgtcccccatcctcaccatgtcttcgactcagggcaatggggaacactggaagtccctggagtcagtgggcatcagccgcaaagagctagcgatggccgaagccctgcagatggagtatgatgccctgtcccggctccggcatgacaaggaggagaacagagccaagcagaacgcagacccctctctcatcagctgggatgagcctggggtagacttttacagcaagccagcaggaaggcggaccgacctcaagctgttacgcggtctctctggctctgatcctacccttaactacaactcactatccccacaggaagggccgcccaaccactctacctcccaagggccacagcctggctcagatccctggcccaaaggctccctgtctggagactatctctacatttttgatggttcagatgggggagtctcttcgtccccaggaccaggggacatagagggctcttgcaagaaactatccccacctcctctgcctccccgagcttctatctgggatacccctcccctgcctcccagaaaggggtccccctcatcctccaagatctcccagcccagtgacatcaacactttctctttggtcgaacaattgccaggcaaactgctagagcatcggatcctagaagaggaagaggtgctgggaggtgggggtcaggggcgcctactggggtctgtggactatgatggtatcaatgatgcaattactaggctcaacttgaaatcgacctatgatgcggagatgttgcgggatgccaccaggggctggaaggagggccgagggccgctggacttcagcaaagacacctctggaaaacccgtggccaggagcaagactatgccccctcaggtgcccccccgcacctatgcctcccgctatggcaaccgaaagaatgcgacgcctggcaagaaccgccggatttctgcagccccggtgggctcccggccccacactgttgccaatggccatgagttgtttgaggtctcagaagagagagatgaggaggttgctgcattttgccacatgctggatatccttcgatctggctctgacatccaagactacttcctcactggctatgtctggagtgctgtcacccctagcccagagcacctcggggatgaggtcaacctgaaggtgactgtgttgtgtgacaggcttcaagaggcactcactttcacctgcaactgttcctccactgtagacttgcttatctaccagaccctgtgctacacccatgatgacctgaggaatgtggacgtgggtgactttgtgctaaagccctgcgggctggaggagttcctgcagaacaagcatgccttgggcagtcatgagtacatccaatactgccgcaagtttgacattgacattcggctacagctgatggagcagaaggttgtgcgcagtgacctggcccggacggtgaatgatgaccagagcccctccaccttgaactacctcgtccatctccaagagaggcctgtcaagcagaccatcagcaggcaggccctgagtcttctgttcgacacttaccacaatgaggtggatgccttcctgctggctgatggagacttcccactgaaggctgacagggtggtccagtccgtcaaggccatctgcaacgccctggccgccgtggaaacccctgagatcaccagtgctctcaaccagctgcccccctgcccctcccgcatgcagcctaaaattcagaaggatcccagtgtcttggctgtgagggaaaaccgagagaaggtcgtggaagccctgaccgctgccatcttggacctggtggagctgtactgcaacacattcaacgcagacttccagacggcagtgcccgggagccgcaagcatgacctggtccaggaggcctgccatttcgccaggtccctggccttcactgtctatgccacccaccgcatccccatcatctgggctaccagctatgaagatttctacctctcctgctccctcagccatggcggcaaggagctgtgcagccccctgcagacccgaagagctcacttctccaagtacctcttccacctcatcgtctgggaccagcagatctgcttcccagtgcaggtgaaccggctgcctcgggagacactgctgtgtgccactctctatgctctgcccatccccccaccggggagctcctcagaggccaataagcagcggcgggtgcctgaagccctgggctgggtcactaccccactcttcaacttcaggcaggtcctgacctgtggccggaagcttctgggtttgtggccagcaacacaggaaaatcccagcgcccgttggagtgcacctaatttccaccagccagacagtgtcatcctgcagattgacttccccacctcggcctttgacatcaagttcaccagcccccctggagacaagttcagcccccgctatgagtttggcagcctccgggaagaagaccagcgcaagcttaaagacatcatgcagaaagagtccttgtactggctcactgatgctgacaagaagcgcctgtgggagaagcgatattactgccactcggaggtgagctcgctccccctggtgctcgccagcgcccccagctgggagtgggcttgcctgcctgacatctatgttctcctgaagcagtggacccacatgaaccaccaggatgccctggggctcctgcatgccaccttcccggaccaggaggtgcgtcgtatggctgtgcagtggattggctcactctcagatgctgagctgctagactacctgccccagctggtacaggccctgaagtatgaatgctacctggacagcccgttggtgcgcttcctcctgaaacgagctgtgtctgacttgagagtgactcactacttcttctggttactgaaggacggcctcaaggactctcagttcagcatccgctaccagtatctgctggcagccttactgtgctgctgtggcaaggggctgagagaagagtttaaccgccagtgctggcttgtcaatgccctggccaaactggcccagcaggtccgggaggcagccccatctgcaaggcagggaatcctccgcacgggcctggaggaggtgaagcagttctttgccctcaatggctcgtgccgcttgccactcagccccagtctgctggttaagggaattgtgcccagggactgttcctacttcaactccaatgctgtccccctcaaactctccttccaaaatgtggatcccctgggtgagaacatccgtgtcatcttcaagtgtggggacgaccttcgccaggacatgctaacgctgcagatgattcgcatcatgagcaagatctgggtccaggaggggctggacatgcgcatggtcatcttccgctgcttctccaccggccggggcagagggatggtggagatgatccctaatgctgagaccctgcgtaagatccaggtggagcatggggtgaccggctcgttcaaggaccggcccctggcagactggctgcagaaacacaaccctggggaggacgagtatgagaaggctgtggagaactttatctactcctgcgctggctgctgcgtggccacgtacgtcttgggcatctgtgaccgacataatgacaacatcatgctgaagaccactggtcacatgttccacattgattttggccgcttcctgggccatgcccagatgtttggcaacatcaagcgggaccgtgccccctttgtcttcacctcggacatggcgtatgtcatcaacgggggtgacaagccttccagccgcttccatgattttgttgacctttgctgccaagcctacaacctcattcgcaagcacacccacctcttcctcaaccttctgggcctgatgttgtcctgtgggatccctgaactctcagacctggaggacctcaagtatgtgtacgatgccctgaggcctcaggatacagaggccaatgccactacctacttcactaggttgattgagtccagcctgggcagtgtagccacaaagctcaattttttcatccataatctggctcagatgaagttcacgggctcagatgaccggctgaccctctcctttgcctcccgaacacacactctcaagagctctggccgaatcagtgatgttttcctctgccgccatgagaagatcttccaccccaacaaaggctatatatatgtggtaaaggtgatgcgagagaacactcacgaggccacctacatccagcggacctttgaggagttccaggaattacacaataagttgcggctgctcttcccttcttcccacttgcccagcttccctagtcgcttcgtgatcggccgctcccggggagaggcggtggccgagcggcggagggaggagctaaacggttacatctggcacttgatccacgcaccccctgaggtggccgagtgtgatttggtgtacaccttcttccacccactgccccgggatgagaaggctatgggcaccagcccagctcctaagtcctcagatggcacatgggcccggcccgtcggaaaggtgggaggggaggtgaagctgtccatctcctacaaaaacaataaactcttcatcatggtgatgcatattcggggcttgcaactgctccaggatggaaatgaccctgacccctatgtgaaaatttacctccttcctgaccctcagaaaaccactaagaggaaaaccaaagtggcccggaaaacctgcaatcctacctacaatgagatgttggtatatgatgggatccccaagggtgacctgcagcagcgggagctccagctgagcgtgctgagtgagcagggattctgggagaacgtcctcctcggtgaggtgaacatccgcctgcgagagctggacctggctcaggagaagaccggctggttcgccctgggatctcgaagtcatggcaccttgtgagcccagcagagccaccacccagcatcccaggctggtggcaggagctgggggagaggactctcccctgtgagactcctccttgtgaagggccagggccctgggcaggcctccagctcggtccaggtgattctggcctctgtggtaggaggcagggagagtaagacatgctctgctgtctcttcctctggagactgaacttgggttggttgtgatgagcagccccttggaggctgtgaggttgcagcaaagttttaagtttaccttgtgtcaagggagcaatgcttggtttggggagtgtgtggggtgggctgtatgaagtagcattttgggggtgggtgggtggatatcttaatttttatttttaaaaaatgaaatagtgatgttgtcctaactgggacaggaagccttgcgagaagggacgtacctatgccccagaaggcaagagaggaagactatttggactttttgtatgattaaggttcttattggacttttccctaggttttttttttttgttattgttgttgttgtttcgttttctagctataggaactatctggggaggggcccagtgggtcctcggccagagccctctctaaggacaggttggggagggttggggagggctgcctgtgctggactgaggcttgtgccactgggcctttctgattttgcctccaaaggagagcgctgtgatacctacatgtgtaaggaagggccttccgtattggggttctgccaaggacccgtattcagggacccatgctcttttggggggacttttcctcttgtcttccctactttattaggacttgccctgaataccattttctaccccttgcccctccattctcctggcccttctgggggtcagctggtctctatgaatatgctgggggtgcttccccataggtctctcccttcatttgtctctggtgggacaaaatactgactcagtccttagatgtagtttcacccaagagcatcttggccctgggaagaggtccctaggctgcagatgctactgactgcttgctaggtagcctctggaaagcattccccatccatcactccccacttctttctgctgtgctgcttccctcccaaactccatttctgtcaccctttttataagacttttcctcattctgtggggccataaacctatttagtctggagccaaagggatgccctatctgaaggaaaggggcatggggtgggggattccatcaaaactgttgttttttgccccatgatttttctttggtcagtaggaggctggattggagtggtgattattcccctggagctaagctcaggagcccgaagggagagactgagactgactcccttatctcttcatattctttattccctaccagatggatttttttttttttttttggagacggagtctcgccctgtcgccaggctggagtgtagtggcatgatctcgactcactgcaaaatctgcctcccgggttcaagcgattctcctacctcagcctcccgagtagctgggattacaggcatgtgccaccacgccaagctaatttttgtatttttagtagagacggggtttcaccatgttggccaggatggtctcgatctcttgacctcgtgatctgcctgccttggcctcccaaagtgctgggattacaggcgtgagccaccatgccccgccccagatggattttacatttgctcttttgtgtttcgctccaaagggttgtcttcctcgccaaaaggagggagggactttgaatttgatatgaatctttaaaaccagaattggctggatatttcccatgattgggaaaagagtgaaatgaggacattctgtaaactgtccctccctaattccaaggatcagaaactccccgttttgctgactcattccataactggagaaagaagctccattgaccgaagccacagggcagcatggaagtttaaattttctctaaaattaaaatgccaaggataaagctggctgcttccaggagggggaagaggagtggggagtgggcggtgaaacttttccagatgaacggaccataaatgtgttactggctttgtgcctgtagctcattttattatgacctatatgctcctgatttaaagagatctgtgtactgtttacttcccacttcccagaatcccttgtatctcctttctcgggaattgtattttctaataaatgacatttgagaaaaaaa

SEQ ID NO: 281201 - DNA, 6984 bp, Homo sapiens
tgcccctggctgctgatgccttctgtgacagcttagcattctacttcattccgtcctggtttcctccttagccattgtttaaggggcactggggttttcccaccttgtgtctagcctttgggaaccttcccaactctgaagagctacacagttcttccttcctccgcttctgctaagagagtccccccaaaagcagaatcagctcctgggataagccacatccctagagctcagggatttttaaaggccctgctctgagaggtggggctgttcccgctatttatagggactgggagattcctgttcccagctctgagttcctcacacccagctgggcctgctcactgagtcagggcaccctggtaggtggtcacctctgtcactccttctctctcctgcctcccctactccctcacccttccccatcccctgcatgtcatcagagttctgagacagagctcagcccagaatctccttgaagaagcggacacaaagcaaaaagctcttgccagttctgagtggggaaatgcggccttggtcctccccggctcagcttgttgcaggggctcagcctgctgggaggggggaccccttgggccctcggcctataccaccgccccgctttcgtcgggcttccagccagagggaacctccttatcccaggccagcggagccagctctggaactggctggctccaaatgccagcctgatacccctgctgccagcctctgcccggcagactcccccagccagcatcgggtgatgccaccagggcctgccagctgggcaaacgtgggctcccggccccacactgttgccaatggccatgagttgtttgaggtctcagaagagagagatgaggaggttgctgcattttgccacatgctggatatccttcgatctggctctgacatccaagactacttcctcactggctatgtctggagtgctgtcacccctagcccagagcacctcggggatgaggtcaacctgaaggtgactgtgttgtgtgacaggcttcaagaggcactcactttcacctgcaactgttcctccactgtagacttgcttatctaccagaccctgtgctacacccatgatgacctgaggaatgtggacgtgggtgactttgtgctaaagccctgcgggctggaggagttcctgcagaacaagcatgccttgggcagtcatgagtacatccaatactgccgcaagtttgacattgacattcggctacagctgatggagcagaaggttgtgcgcagtgacctggcccggacggtgaatgatgaccagagcccctccaccttgaactacctcgtccatctccaagagaggcctgtcaagcagaccatcagcaggcaggccctgagtcttctgttcgacacttaccacaatgaggtggatgccttcctgctggctgatggagacttcccactgaaggctgacagggtggtccagtccgtcaaggccatctgcaacgccctggccgccgtggaaacccctgagatcaccagtgctctcaaccagctgcccccctgcccctcccgcatgcagcctaaaattcagaaggatcccagtgtcttggctgtgagggaaaaccgagagaaggtcgtggaagccctgaccgctgccatcttggacctggtggagctgtactgcaacacattcaacgcagacttccagacggcagtgcccgggagccgcaagcatgacctggtccaggaggcctgccatttcgccaggtccctggccttcactgtctatgccacccaccgcatccccatcatctgggctaccagctatgaagatttctacctctcctgctccctcagccatggcggcaaggagctgtgcagccccctgcagacccgaagagctcacttctccaagtacctcttccacctcatcgtctgggaccagcagatctgcttcccagtgcaggtgaaccggctgcctcgggagacactgctgtgtgccactctctatgctctgcccatccccccaccggggagctcctcagaggccaataagcagcggcgggtgcctgaagccctgggctgggtcactaccccactcttcaacttcaggcaggtcctgacctgtggccggaagcttctgggtttgtggccagcaacacaggaaaatcccagcgcccgttggagtgcacctaatttccaccagccagacagtgtcatcctgcagattgacttccccacctcggcctttgacatcaagttcaccagcccccctggagacaagttcagcccccgctatgagtttggcagcctccgggaagaagaccagcgcaagcttaaagacatcatgcagaaagagtccttgtactggctcactgatgctgacaagaagcgcctgtgggagaagcgatattactgccactcggaggtgagctcgctccccctggtgctcgccagcgcccccagctgggagtgggcttgcctgcctgacatctatgttctcctgaagcagtggacccacatgaaccaccaggatgccctggggctcctgcatgccaccttcccggaccaggaggtgcgtcgtatggctgtgcagtggattggctcactctcagatgctgagctgctagactacctgccccagctggtacaggccctgaagtatgaatgctacctggacagcccgttggtgcgcttcctcctgaaacgagctgtgtctgacttgagagtgactcactacttcttctggttactgaaggacggcctcaaggactctcagttcagcatccgctaccagtatctgctggcagccttactgtgctgctgtggcaaggggctgagagaagagtttaaccgccagtgctggcttgtcaatgccctggccaaactggcccagcaggtccgggaggcagccccatctgcaaggcagggaatcctccgcacgggcctggaggaggtgaagcagttctttgccctcaatggctcgtgccgcttgccactcagccccagtctgctggttaagggaattgtgcccagggactgttcctacttcaactccaatgctgtccccctcaaactctccttccaaaatgtggatcccctgggtgagaacatccgtgtcatcttcaagtgtggggacgaccttcgccaggacatgctaacgctgcagatgattcgcatcatgagcaagatctgggtccaggaggggctggacatgcgcatggtcatcttccgctgcttctccaccggccggggcagagggatggtggagatgatccctaatgctgagaccctgcgtaagatccaggtggagcatggggtgaccggctcgttcaaggaccggcccctggcagactggctgcagaaacacaaccctggggaggacgagtatgagaaggctgtggagaactttatctactcctgcgctggctgctgcgtggccacgtacgtcttgggcatctgtgaccgacataatgacaacatcatgctgaagaccactggtcacatgttccacattgattttggccgcttcctgggccatgcccagatgtttggcaacatcaagcgggaccgtgccccctttgtcttcacctcggacatggcgtatgtcatcaacgggggtgacaagccttccagccgcttccatgattttgttgacctttgctgccaagcctacaacctcattcgcaagcacacccacctcttcctcaaccttctgggcctgatgttgtcctgtgggatccctgaactctcagacctggaggacctcaagtatgtgtacgatgccctgaggcctcaggatacagaggccaatgccactacctacttcactaggttgattgagtccagcctgggcagtgtagccacaaagctcaattttttcatccataatctggctcagatgaagttcacgggctcagatgaccggctgaccctctcctttgcctcccgaacacacactctcaagagctctggccgaatcagtgatgttttcctctgccgccatgagaagatcttccaccccaacaaaggctatatatatgtggtaaaggtgatgcgagagaacactcacgaggccacctacatccagcggacctttgaggagttccaggaattacacaataagttgcggctgctcttcccttcttcccacttgcccagcttccctagtcgcttcgtgatcggccgctcccggggagaggcggtggccgagcggcggagggaggagctaaacggttacatctggcacttgatccacgcaccccctgaggtggccgagtgtgatttggtgtacaccttcttccacccactgccccgggatgagaaggctatgggcaccagcccagctcctaagtcctcagatggcacatgggcccggcccgtcggaaaggtgggaggggaggtgaagctgtccatctcctacaaaaacaataaactcttcatcatggtgatgcatattcggggcttgcaactgctccaggatggaaatgaccctgacccctatgtgaaaatttacctccttcctgaccctcagaaaaccactaagaggaaaaccaaagtggcccggaaaacctgcaatcctacctacaatgagatgttggtatatgatgggatccccaagggtgacctgcagcagcgggagctccagctgagcgtgctgagtgagcagggattctgggagaacgtcctcctcggtgaggtgaacatccgcctgcgagagctggacctggctcaggagaagaccggctggttcgccctgggatctcgaagtcatggcaccttgtgagcccagcagagccaccacccagcatcccaggctggtggcaggagctgggggagaggactctcccctgtgagactcctccttgtgaagggccagggccctgggcaggcctccagctcggtccaggtgattctggcctctgtggtaggaggcagggagagtaagacatgctctgctgtctcttcctctggagactgaacttgggttggttgtgatgagcagccccttggaggctgtgaggttgcagcaaagttttaagtttaccttgtgtcaagggagcaatgcttggtttggggagtgtgtggggtgggctgtatgaagtagcattttgggggtgggtgggtggatatcttaatttttatttttaaaaaatgaaatagtgatgttgtcctaactgggacaggaagccttgcgagaagggacgtacctatgccccagaaggcaagagaggaagactatttggactttttgtatgattaaggttcttattggacttttccctaggttttttttttttgttattgttgttgttgtttcgttttctagctataggaactatctggggaggggcccagtgggtcctcggccagagccctctctaaggacaggttggggagggttggggagggctgcctgtgctggactgaggcttgtgccactgggcctttctgattttgcctccaaaggagagcgctgtgatacctacatgtgtaaggaagggccttccgtattggggttctgccaaggacccgtattcagggacccatgctcttttggggggacttttcctcttgtcttccctactttattaggacttgccctgaataccattttctaccccttgcccctccattctcctggcccttctgggggtcagctggtctctatgaatatgctgggggtgcttccccataggtctctcccttcatttgtctctggtgggacaaaatactgactcagtccttagatgtagtttcacccaagagcatcttggccctgggaagaggtccctaggctgcagatgctactgactgcttgctaggtagcctctggaaagcattccccatccatcactccccacttctttctgctgtgctgcttccctcccaaactccatttctgtcaccctttttataagacttttcctcattctgtggggccataaacctatttagtctggagccaaagggatgccctatctgaaggaaaggggcatggggtgggggattccatcaaaactgttgttttttgccccatgatttttctttggtcagtaggaggctggattggagtggtgattattcccctggagctaagctcaggagcccgaagggagagactgagactgactcccttatctcttcatattctttattccctaccagatggatttttttttttttttttggagacggagtctcgccctgtcgccaggctggagtgtagtggcatgatctcgactcactgcaaaatctgcctcccgggttcaagcgattctcctacctcagcctcccgagtagctgggattacaggcatgtgccaccacgccaagctaatttttgtatttttagtagagacggggtttcaccatgttggccaggatggtctcgatctcttgacctcgtgatctgcctgccttggcctcccaaagtgctgggattacaggcgtgagccaccatgccccgccccagatggattttacatttgctcttttgtgtttcgctccaaagggttgtcttcctcgccaaaaggagggagggactttgaatttgatatgaatctttaaaaccagaattggctggatatttcccatgattgggaaaagagtgaaatgaggacattctgtaaactgtccctccctaattccaaggatcagaaactccccgttttgctgactcattccataactggagaaagaagctccattgaccgaagccacagggcagcatggaagtttaaattttctctaaaattaaaatgccaaggataaagctggctgcttccaggagggggaagaggagtggggagtgggcggtgaaacttttccagatgaacggaccataaatgtgttactggctttgtgcctgtagctcattttattatgacctatatgctcctgatttaaagagatctgtgtactgtttacttcccacttcccagaatcccttgtatctcctttctcgggaattgtattttctaataaatgacatttgagaaaaaaa

SEQ ID NO: 281202 - DNA, 684 bp, Homo sapiens
cccgggaggtcaccatattgatgccgaacttagtgcggacacccgatcggcatagcgcactacagcccagaactcctggactcaagcgatcctcctgccttggcctcccaaagtgctgggattacaggcgtgagccaccatgccccgccccagatggattttacatttgctcttttgtgtttcgctccaaagggttgtcttcctcgccaaaaggagggagggactttgaatttgatatgaatctttaaaaccagaattggctggatatttcccatgattgggaaaagagtgaaatgaggacattctgtaaactgtccctccctaattccaaggatcagaaactccccgttttgctgactcattccataactggagaaagaagctccattgaccgaagccacagggcagcatggaagtttaaattttctctaaaattaaaatgccaaggataaagctggctgcttccaggagggggaagaggagtggggagtgggcggtgaaacttttccagatgaacggaccataaatgtgttactggctttgtgcctgtagctcattttattatgacctatatgctcctgatttaaagagatctgtgtactgtttacttcccacttcccagaatcccttgtatctcctttctcgggaattgtattttctaataaatgacatttgagaaaaaaa

SEQ ID NO: 281203 - DNA, 5440 bp, Homo sapiens
ccacctcggcctcccaaagtgttgggattacgggcatgggccacctctcccagcttgttcttgcattttgtaagatcacatagagtatcaaaactggaaaggacctgggccatcacttccctgagaaaaagtgactttctcaaggtcatgcagttagtagcaatgctggaactgaacgcctaccccgcagatcacaacatgacccgtgaaaggacctatcctgcaacactttggagtttcgtgccgacccaattagtggctttgtctttgggaaatttacttccccaaaacactgggacattgggatggaattcactcaccccaaatcatcaccctggttaaggagactaaagaatcagaagacatttgtgctttggggagcagaggccctcagggtatagagaaggaagaagagagaggttcactgtagtcctgaagcagaaataagacctgtggctgaaggaagccttagcaattcactccttcctcttcctgagaactctctgtaggaagtctcacctagcagaggcttcacagtatttcagagaagccaaagattgtttgcctctttggaaactgttatccttccatcatgactgtgtcactcctgccactgttccaccatagagatggcgtcctttgcagcaaaccgtaagttataaggatgagggaagaagagtagagggccaaaaggattccattttgaggaaaaactacagtttgccttgccaggtagaagaatcaggcgcccagacaccatgtcacaaccctccagaactgacgttggcaggaagtagagactttgttgcctgtgtcccccatcctcaccatgtcttcgactcagggcaatggggaacactggaagtccctggagtcagtgggcatcagccgcaaagagctagcgatggccgaagccctgcagatggagtatgatgccctgtcccggctccggcatgacaaggaggagaacagagccaagcagaacgcagacccctctctcatcagctgggatgagcctggggtagacttttacagcaagccagcaggaaggcggaccgacctcaagctgttacgcggtctctctggctctgatcctacccttaactacaactcactatccccacaggaagggccgcccaaccactctacctcccaagggccacagcctggctcagatccctggcccaaaggctccctgtctggagactatctctacatttttgatggttcagatgggggagtctcttcgtccccaggaccaggggacatagagggctcttgcaagaaactatccccacctcctctgcctccccgagcttctatctgggatacccctcccctgcctcccagaaaggggtccccctcatcctccaagatctcccagcccagtgacatcaacactttctctttggtcgaacaattgccaggcaaactgctagagcatcggatcctagaagaggaagaggtgctgggaggtgggggtcaggggcgcctactggggtctgtggactatgatggtatcaatgatgcaattactaggctcaacttgaaatcgacctatgatgcggagatgttgcgggatgccaccaggggctggaaggagggccgagggccgctggacttcagcaaagacacctctggaaaacccgtggccaggagcaagactatgccccctcaggtgcccccccgcacctatgcctcccgctatggcaaccgaaagaatgcgacgcctggcaagaaccgccggatttctgcagccccggtgggctcccggccccacactgttgccaatggccatgagttgtttgaggtctcagaagagagagatgaggaggttgctgcattttgccacatgctggatatccttcgatctggctctgacatccaagactacttcctcactggctatgtctggagtgctgtcacccctagcccagagcacctcggggatgaggtcaacctgaaggtgactgtgttgtgtgacaggcttcaagaggcactcactttcacctgcaactgttcctccactgtagacttgcttatctaccagaccctgtgctacacccatgatgacctgaggaatgtggacgtgggtgactttgtgctaaagccctgcgggctggaggagttcctgcagaacaagcatgccttgggcagtcatgagtacatccaatactgccgcaagtttgacattgacattcggctacagctgatggagcagaaggttgtgcgcagtgacctggcccggacggtgaatgatgaccagagcccctccaccttgaactacctcgtccatctccaagagaggcctgtcaagcagaccatcagcaggcaggccctgagtcttctgttcgacacttaccacaatgaggtggatgccttcctgctggctgatggagacttcccactgaaggctgacagggtggtccagtccgtcaaggccatctgcaacgccctggccgccgtggaaacccctgagatcaccagtgctctcaaccagctgcccccctgcccctcccgcatgcagcctaaaattcagaaggatcccagtgtcttggctgtgagggaaaaccgagagaaggtcgtggaagccctgaccgctgccatcttggacctggtggagctgtactgcaacacattcaacgcagacttccagacggcagtgcccgggagccgcaagcatgacctggtccaggaggcctgccatttcgccaggtccctggccttcactgtctatgccacccaccgcatccccatcatctgggctaccagctatgaagatttctacctctcctgctccctcagccatggcggcaaggagctgtgcagccccctgcagacccgaagagctcacttctccaagtacctcttccacctcatcgtctgggaccagcagatctgcttcccagtgcaggtgaaccggctgcctcgggagacactgctgtgtgccactctctatgctctgcccatccccccaccggggagctcctcagaggccaataagcagcggcgggtgcctgaagccctgggctgggtcactaccccactcttcaacttcaggcaggtcctgacctgtggccggaagcttctgggtttgtggccagcaacacaggaaaatcccagcgcccgttggagtgcacctaatttccaccagccagacagtgtcatcctgcagattgacttccccacctcggcctttgacatcaagttcaccagcccccctggagacaagttcagcccccgctatgagtttggcagcctccgggaagaagaccagcgcaagcttaaagacatcatgcagaaagagtccttgtactggctcactgatgctgacaagaagcgcctgtgggagaagcgatattactgccactcggaggtgagctcgctccccctggtgctcgccagcgcccccagctgggagtgggcttgcctgcctgacatctatgttctcctgaagcagtggacccacatgaaccaccaggatgccctggggctcctgcatgccaccttcccggaccaggaggtgcgtcgtatggctgtgcagtggattggctcactctcagatgctgagctgctagactacctgccccagctggtacaggccctgaagtatgaatgctacctggacagcccgttggtgcgcttcctcctgaaacgagctgtgtctgacttgagagtgactcactacttcttctggttactgaaggacggcctcaaggactctcagttcagcatccgctaccagtatctgctggcagccttactgtgctgctgtggcaaggggctgagagaagagtttaaccgccagtgctggcttgtcaatgccctggccaaactggcccagcaggtccgggaggcagccccatctgcaaggcagggaatcctccgcacgggcctggaggaggtgaagcagttctttgccctcaatggctcgtgccgcttgccactcagccccagtctgctggttaagggaattgtgcccagggactgttcctacttcaactccaatgctgtccccctcaaactctccttccaaaatgtggatcccctgggtgagaacatccgtgtcatcttcaagtgtggggacgaccttcgccaggacatgctaacgctgcagatgattcgcatcatgagcaagatctgggtccaggaggggctggacatgcgcatggtcatcttccgctgcttctccaccggccggggcagagggatggtggagatgatccctaatgctgagaccctgcgtaagatccaggtggagcatggggtgaccggctcgttcaaggaccggcccctggcagactggctgcagaaacacaaccctggggaggacgagtatgagaaggctgtggagaactttatctactcctgcgctggctgctgcgtggccacgtacgtcttgggcatctgtgaccgacataatgacaacatcatgctgaagaccactggtcacatgttccacattgattttggccgcttcctgggccatgcccagatgtttggcaacatcaagcgggaccgtgccccctttgtcttcacctcggacatggcgtatgtcatcaacgggggtgacaagccttccagccgcttccatgattttgttgacctttgctgccaagcctacaacctcattcgcaagcacacccacctcttcctcaaccttctgggcctgatgttgtcctgtgggatccctgaactctcagacctggaggacctcaagtatgtgtacgatgccctgaggcctcaggatacagaggccaatgccactacctacttcactaggttgattgagtccagcctgggcagtgtagccacaaagctcaattttttcatccataatctggctcagatgaagttcacgggctcagatgaccggctgaccctctcctttgcctcccgaacacacactctcaagagctctggccgaatcagtgatgttttcctctgccgccatgagaagatcttccaccccaacaaaggctatatatatgtggtaaaggtgatgcgagagaacactcacgaggccacctacatccagcggacctttgaggagttccaggaattacacaataagttgcggctgctcttcccttcttcccacttgcccaggtagctgccccctttactatctgcacagagggatgtcggggagggggaaaggatacgggatgggaggtggtcagggctgcaggggcagaaaatacccttttggactaaacatctgcctgctttgcttggcctggtatggagtttgatgacaagtgctccccctgctggccaagctctccttgcacgcaagagctctcactccaggcccactggccagaaaggaaggcatggttgaatctgatgtttcaaaatttctaattttttaaagagttacaccatttttcaaatggataagcaaaatgtcatatgtacatacagtgggatattattc

SEQ ID NO: 281204 - DNA, 289 bp, Homo sapiens
aaccaccaggatgccctggggctcctgcatgccacgtgagttgtaacatctgccttttctgactatgtgttcttgtagaagccagggcacgacactgcccatcagtgatctgagccagccctggggaaaatggtaaagtgggtgtggatattcagggattttccatttctcctttttgctttttctttctcattttcccttcaatgttatattgtcatttttcaaacatacaacaaaattgaaaattgtacagtgaatacccatgtgcctaccacctagattctattgt

SEQ ID NO: 281205 - DNA, 290 bp, Homo sapiens
ctcactctgtccatcatacagatctggtacaaaccattactctctcctctctggggattctcagctactcacatttcagcccattctggtccagatgagcgcagctgtgaaaagcccttcttccagctgtgacgaaaaaggctatggccctgaagctcccctccctcttctttttcccaacaggatcccagtgtcttggctgtgagggaaaaccgaggtaagggaactgctctccatcttcatccagtcgggctgccgaaaactgcagtctctgccccgattcctttttc

SEQ ID NO: 281206 - DNA, 300 bp, Homo sapiens
tgggtgtcctgacctgctccctttcttttatagctatgaagatttctacctctcctgctccctcagccatggcggcaaggagctgtgcagccccctgcagacccgaagagctcacttctccaagtacctcttccacctcatcgtctgggaccagcagtaagcccttcccccaggcttcagtgcccaggccactgtagacctgctcagcctctgaaatatccctggggccagataactagtccaggactaatgataaaaccaggctccttgttaaccctaactggacaagtcattcaacct

SEQ ID NO: 281207 - DNA, 183 bp, Homo sapiens
cttcccggaccaggaggtgcgtcgtatggctgtgcagtggattggctcactctcagatgctgagctgctagactacctgccccagctggtacaggtgggtggattggtcctccctccagttttgctggtcccatccccagtatcccaagtgagtctgcattctgccccttagaaaccagagat

SEQ ID NO: 281208 - DNA, 436 bp, Homo sapiens
ctctccagccacatctttctctctttctctcatactagatggcgtcctttgcagcaaaccgtaagttataaggatgagggaagaagagtagagggccaaaaggattccattttgaggaaaaactacagtttgccttgccaggtagaagaatcaggtatgagttctttttgtctcaggtaataaactaagcaaagcccagatagtagtaatgatggagcccttcaactattgacgtctccctaagagccctcattttttgaaagcagagtgtttgtcccattcctgactcgccatgctgtgtgtctcccagagagtgaaagaaattgctgtgactgcgagcaccagtagagtggatttaattctcaccaagaaaagggaggtggtttgcaaatgggttgttttgggatcctgggagaggaacattgtagccagagat

SEQ ID NO: 281209 - DNA, 352 bp, Homo sapiens
gatccctggagtgccctgactcctgactccctctgccttgcaggttactgaaggacggcctcaaggactctcagttcagcatccgctaccagtatctgctggcagccttactgtgctgctgtggcaaggggctgagagaagagtttaaccgccagtgctggcttgtcaatgccctggccaaactggcccagcaggtccgggaggcagccccatctgcaaggcaggttagtggggtgaggctgcccctacccatttctcatccagggctttggcagccagtttcttcttaggaatcctgaacaacaagattccacgtgacgatttttgattttggagcggggagcagctgact

SEQ ID NO: 281210 - DNA, 662 bp, Homo sapiens
tacgtaaaaataaggattatgtttaacattgtataactgtcattttatgaaaagctcatgacatgcttctgcttttttctcattttaccgcagatgggtgaactttgtcacagctattagagactgactagcatttggggaccactgtcttaggccatcccattctagccaatgccatggcaacaaggtagggcttgtggaggcctcatgactttcccttctgaccccttcccttcccagagaaggtcgtggaagccctgaccgctgccatcttggacctggtggagctgtactgcaacacattcaacgcagacttccagacggcagtgcccgggagccgcaagcatgacctggtccaggaggcctgccatttcgccaggtccctggccttcactgtctatgccacccaccgcatccccatcatctgggctaccagctatgaagatttctacctctcctgctccctcagccatggcggcaaggagctgtgcagccccctgcagacccgaagagctcacttctccaagtacctcttccacctcatcgtctgggaccagcagtaagcccttcccccaggcttcagtgcccaggccactgtagacctgctcagcctctgaaatatccctggggccagataactagtccaggactaatgataaaac

SEQ ID NO: 281211 - DNA, 8304 bp, Homo sapiens
  misc_feature (8260)..(8260): n is a, c, g, or t
ccacctcggcctcccaaagtgttgggattacgggcatgggccacctctcccagcttgttcttgcattttgtaagatcacatagagtatcaaaactggaaaggacctgggccatcacttccctgagaaaaagtgactttctcaaggtcatgcagttagtagcaatgctggaactgaacgcctaccccgcagatcacaacatgacccgtgaaaggacctatcctgcaacactttggagtttcgtgccgacccaattagtggctttgtctttgggaaatttacttccccaaaacactgggacattgggatggaattcactcaccccaaatcatcaccctggttaaggagactaaagaatcagaagacatttgtgctttggggagcagaggccctcagggtatagagaaggaagaagagagaggttcactgtagtcctgaagcagaaataagacctgtggctgaaggaagccttagcaattcactccttcctcttcctgagaactctctgtaggaagtctcacctagcagaggcttcacagtatttcagagaagccaaagattgtttgcctctttggaaactgttatccttccatcatgactgtgtcactcctgccactgttccaccatagagatggcgtcctttgcagcaaaccgtaagttataaggatgagggaagaagagtagagggccaaaaggattccattttgaggaaaaactacagtttgccttgccaggtagaagaatcaggcgcccagacaccatgtcacaaccctccagaactgacgttggcaggaagtagagactttgttgcctgtgtcccccatcctcaccatgtcttcgactcagggcaatggggaacactggaagtccctggagtcagtgggcatcagccgcaaagagctagcgatggccgaagccctgcagatggagtatgatgccctgtcccggctccggcatgacaaggaggagaacagagccaagcagaacgcagacccctctctcatcagctgggatgagcctggggtagacttttacagcaagccagcaggaaggcggaccgacctcaagctgttacgcggtctctctggctctgatcctacccttaactacaactcactatccccacaggaagggccgcccaaccactctacctcccaagggccacagcctggctcagatccctggcccaaaggctccctgtctggagactatctctacatttttgatggttcagatgggggagtctcttcgtccccaggaccaggggacatagagggctcttgcaagaaactatccccacctcctctgcctccccgagcttctatctgggatacccctcccctgcctcccagaaaggggtccccctcatcctccaagatctcccagcccagtgacatcaacactttctctttggtcgaacaattgccaggcaaactgctagagcatcggatcctagaagaggaagaggtgctgggaggtgggggtcaggggcgcctactggggtctgtggactatgatggtatcaatgatgcaattactaggctcaacttgaaatcgacctatgatgcggagatgttgcgggatgccaccaggggctggaaggagggccgagggccgctggacttcagcaaagacacctctggaaaacccgtggccaggagcaagactatgccccctcaggtgcccccccgcacctatgcctcccgctatggcaaccgaaagaatgcgacgcctggcaagaaccgccggatttctgcagccccggtgggctcccggccccacactgttgccaatggccatgagttgtttgaggtctcagaagagagagatgaggaggttgctgcattttgccacatgctggatatccttcgatctggctctgacatccaagactacttcctcactggctatgtctggagtgctgtcacccctagcccagagcacctcggggatgaggtcaacctgaaggtgactgtgttgtgtgacaggcttcaagaggcactcactttcacctgcaactgttcctccactgtagacttgcttatctaccagaccctgtgctacacccatgatgacctgaggaatgtggacgtgggtgactttgtgctaaagccctgcgggctggaggagttcctgcagaacaagcatgccttgggcagtcatgagtacatccaatactgccgcaagtttgacattgacattcggctacagctgatggagcagaaggttgtgcgcagtgacctggcccggacggtgaatgatgaccagagcccctccaccttgaactacctcgtccatctccaagagaggcctgtcaagcagaccatcagcaggcaggccctgagtcttctgttcgacacttaccacaatgaggtggatgccttcctgctggctgatggagacttcccactgaaggctgacagggtggtccagtccgtcaaggccatctgcaacgccctggccgccgtggaaacccctgagatcaccagtgctctcaaccagctgcccccctgcccctcccgcatgcagcctaaaattcagaaggatcccagtgtcttggctgtgagggaaaaccgagagaaggtcgtggaagccctgaccgctgccatcttggacctggtggagctgtactgcaacacattcaacgcagacttccagacggcagtgcccgggagccgcaagcatgacctggtccaggaggcctgccatttcgccaggtccctggccttcactgtctatgccacccaccgcatccccatcatctgggctaccagctatgaagatttctacctctcctgctccctcagccatggcggcaaggagctgtgcagccccctgcagacccgaagagctcacttctccaagtacctcttccacctcatcgtctgggaccagcagatctgcttcccagtgcaggtgaaccggctgcctcgggagacactgctgtgtgccactctctatgctctgcccatccccccaccggggagctcctcagaggccaataagcagcggcgggtgcctgaagccctgggctgggtcactaccccactcttcaacttcaggcaggtcctgacctgtggccggaagcttctgggtttgtggccagcaacacaggaaaatcccagcgcccgttggagtgcacctaatttccaccagccagacagtgtcatcctgcagattgacttccccacctcggcctttgacatcaagttcaccagcccccctggagacaagttcagcccccgctatgagtttggcagcctccgggaagaagaccagcgcaagcttaaagacatcatgcagaaagagtccttgtactggctcactgatgctgacaagaagcgcctgtgggagaagcgatattactgccactcggaggtgagctcgctccccctggtgctcgccagcgcccccagctgggagtgggcttgcctgcctgacatctatgttctcctgaagcagtggacccacatgaaccaccaggatgccctggggctcctgcatgccaccttcccggaccaggaggtgcgtcgtatggctgtgcagtggattggctcactctcagatgctgagctgctagactacctgccccagctggtacaggccctgaagtatgaatgctacctggacagcccgttggtgcgcttcctcctgaaacgagctgtgtctgacttgagagtgactcactacttcttctggttactgaaggacggcctcaaggactctcagttcagcatccgctaccagtatctgctggcagccttactgtgctgctgtggcaaggggctgagagaagagtttaaccgccagtgctggcttgtcaatgccctggccaaactggcccagcaggtccgggaggcagccccatctgcaaggcagggaatcctccgcacgggcctggaggaggtgaagcagttctttgccctcaatggctcgtgccgcttgccactcagccccagtctgctggttaagggaattgtgcccagggactgttcctacttcaactccaatgctgtccccctcaaactctccttccaaaatgtggatcccctgggtgagaacatccgtgtcatcttcaagtgtggggacgaccttcgccaggacatgctaacgctgcagatgattcgcatcatgagcaagatctgggtccaggaggggctggacatgcgcatggtcatcttccgctgcttctccaccggccggggcagagggatggtggagatgatccctaatgctgagaccctgcgtaagatccaggtggagcatggggtgaccggctcgttcaaggaccggcccctggcagactggctgcagaaacacaaccctggggaggacgagtatgagaaggctgtggagaactttatctactcctgcgctggctgctgcgtggccacgtacgtcttgggcatctgtgaccgacataatgacaacatcatgctgaagaccactggtcacatgttccacattgattttggccgcttcctgggccatgcccagatgtttggcaacatcaagcgggaccgtgccccctttgtcttcacctcggacatggcgtatgtcatcaacgggggtgacaagccttccagccgcttccatgattttgttgacctttgctgccaagcctacaacctcattcgcaagcacacccacctcttcctcaaccttctgggcctgatgttgtcctgtgggatccctgaactctcagacctggaggacctcaagtatgtgtacgatgccctgaggcctcaggatacagaggccaatgccactacctacttcactaggttgattgagtccagcctgggcagtgtagccacaaagctcaattttttcatccataatctggctcagatgaagttcacgggctcagatgaccggctgaccctctcctttgcctcccgaacacacactctcaagagctctggccgaatcagtgatgttttcctctgccgccatgagaagatcttccaccccaacaaaggctatatatatgtggtaaaggtgatgcgagagaacactcacgaggccacctacatccagcggacctttgaggagttccaggaattacacaataagttgcggctgctcttcccttcttcccacttgcccagcttccctagtcgcttcgtgatcggccgctcccggggagaggcggtggccgagcggcggagggaggagctaaacggttacatctggcacttgatccacgcaccccctgaggtggccgagtgtgatttggtgtacaccttcttccacccactgccccgggatgagaaggctatgggcaccagcccagctcctaagtcctcagatggcacatgggcccggcccgtcggaaaggtgggaggggaggtgaagctgtccatctcctacaaaaacaataaactcttcatcatggtgatgcatattcggggcttgcaactgctccaggatggaaatgaccctgacccctatgtgaaaatttacctccttcctgaccctcagaaaaccactaagaggaaaaccaaagtggcccggaaaacctgcaatcctacctacaatgagatgttggtatatgatgggatccccaagggtgacctgcagcagcgggagctccagctgagcgtgctgagtgagcagggattctgggagaacgtcctcctcggtgaggtgaacatccgcctgcgagagctggacctggctcaggagaagaccggctggttcgccctgggatctcgaagtcatggcaccttgtgagcccagcagagccaccacccagcatcccaggctggtggcaggagctgggggagaggactctcccctgtgagactcctccttgtgaagggccagggccctgggcaggcctccagctcggtccaggtgattctggcctctgtggtaggaggcagggagagtaagacatgctctgctgtctcttcctctggagactgaacttgggttggttgtgatgagcagccccttggaggctgtgaggttgcagcaaagttttaagtttaccttgtgtcaagggagcaatgcttggtttggggagtgtgtggggtgggctgtatgaagtagcattttgggggtgggtgggtggatatcttaatttttatttttaaaaaatgaaatagtgatgttgtcctaactgggacaggaagccttgcgagaagggacgtacctatgccccagaaggcaagagaggaagactatttggactttttgtatgattaaggttcttattggacttttccctaggttttttttttttgttattgttgttgttgtttcgttttctagctataggaactatctggggaggggcccagtgggtcctcggccagagccctctctaaggacaggttggggagggttggggagggctgcctgtgctggactgaggcttgtgccactgggcctttctgattttgcctccaaaggagagcgctgtgatacctacatgtgtaaggaagggccttccgtattggggttctgccaaggacccgtattcagggacccatgctcttttggggggacttttcctcttgtcttccctactttattaggacttgccctgaataccattttctaccccttgcccctccattctcctggcccttctgggggtcagctggtctctatgaatatgctgggggtgcttccccataggtctctcccttcatttgtctctggtgggacaaaatactgactcagtccttagatgtagtttcacccaagagcatcttggccctgggaagaggtccctaggctgcagatgctactgactgcttgctaggtagcctctggaaagcattccccatccatcactccccacttctttctgctgtgctgcttccctcccaaactccatttctgtcaccctttttataagacttttcctcattctgtggggccataaacctatttagtctggagccaaagggatgccctatctgaaggaaaggggcatggggtgggggattccatcaaaactgttgttttttgccccatgatttttctttggtcagtaggaggctggattggagtggtgattattcccctggagctaagctcaggagcccgaagggagagactgagactgactcccttatctcttcatattctttattccctaccagatggatttttttttttttttttggagacggagtctcgccctgtcgccaggctggagtgtagtggcatgatctcgactcactgcaaaatctgcctcccgggttcaagcgattctcctacctcagcctcccgagtagctgggattacaggcatgtgccaccacgccaagctaatttttgtatttttagtagagacggggtttcaccatgttggccaggatggtctcgatctcttgacctcgtgatctgcctgccttggcctcccaaagtgctgggattacaggcgtgagccaccatgccccgccccagatggattttacatttgctcttttgtgtttcgctccaaagggttgtcttcctcgccaaaaggagggagggactttgaatttgatatgaatctttaaaaccagaattggctggatatttcccatgattgggaaaagagtgaaatgaggacattctgtaaactgtccctccctaattccaaggatcagaaactccccgttttgctgactcattccataactggagaaagaagctccattgaccgaagccacagggcagcatggaagtttaaattttctctaaaattaaaatgccaaggataaagctggctgcttccaggagggggaagaggagtggggagtgggcggtgaaacttttccagatgaacggaccataaatgtgttactggctttgtgcctgtagctcattttattatgacctatatgctcctgatttaaagagatctgtgtactgtttacttcccacttcccagaatcccttgtatctcctttctcgggaattgtattttctaataaatgacatttgagaaaaaaaggcagaagccctattactttgcaaggggcccttcagaagtcgctgggctcagaaggctcttagtcgtgcttgagagtgagcctttcgaagagatactcgcccgagcccgagctccgggccacccagcctgtggaggttggtcaggtggtcacccatcttcttgataagcttcacttcctcatctaggaagtgagtctccaggaagtcacagagatgggggtccgtgcgggcagaacccagggcatgaagatccaaaagggcctggttcagctttttctccagggccatggcagctttcatggcgtcntgggttttaccccactcgatcttcagctggcttcttgatgtcct

SEQ ID NO: 281212 - DNA, 4032 bp, Homo sapiens
ccgggcgggcgtgacagatcgggaaacagcttctagtcatgctggttgaggcaattgtgcgcaggactgttcctacttcaactccaatgctgtccccctcaaactctccttccaaaatgtggatcccctgggtgagaacatccgtgtcatcttcaagtgtggggacgaccttcgccaggacatgctaacgctgcagatgattcgcatcatgagcaagatctgggtccaggaggggctggacatgcgcatggtcatcttccgctgcttctccaccggccggggcagagggatggtggagatgatccctaatgctgagaccctgcgtaagatccaggtggagcatggggtgaccggctcgttcaaggaccggcccctggcagactggctgcagaaacacaaccctggggaggacgagtatgagaaggctgtggagaactttatctactcctgcgctggctgctgcgtggccacgtacgtcttgggcatctgtgaccgacataatgacaacatcatgctgaagaccactggtcacatgttccacattgattttggccgcttcctgggccatgcccagatgtttggcaacatcaagcgggaccgtgccccctttgtcttcacctcggacatggcgtatgtcatcaacgggggtgacaagccttccagccgcttccatgattttgttgacctttgctgccaagcctacaacctcattcgcaagcacacccacctcttcctcaaccttctgggcctgatgttgtcctgtgggatccctgaactctcagacctggaggacctcaagtatgtgtacgatgccctgaggcctcaggatacagaggccaatgccactacctacttcactaggttgattgagtccagcctgggcagtgtagccacaaagctcaattttttcatccataatctggctcagatgaagttcacgggctcagatgaccggctgaccctctcctttgcctcccgaacacacactctcaagagctctggccgaatcagtgatgttttcctctgccgccatgagaagatcttccaccccaacaaaggctatatatatgtggtaaaggtgatgcgagagaacactcacgaggccacctacatccagcggacctttgaggagttccaggaattacacaataagttgcggctgctcttcccttcttcccacttgcccagcttccctagtcgcttcgtgatcggccgctcccggggagaggcggtggccgagcggcggagggaggagctaaacggttacatctggcacttgatccacgcaccccctgaggtggccgagtgtgatttggtgtacaccttcttccacccactgccccgggatgagaaggctatgggcaccagcccagctcctaagtcctcagatggcacatgggcccggcccgtcggaaaggtgggaggggaggtgaagctgtccatctcctacaaaaacaataaactcttcatcatggtgatgcatattcggggcttgcaactgctccaggatggaaatgaccctgacccctatgtgaaaatttacctccttcctgaccctcagaaaaccactaagaggaaaaccaaagtggcccggaaaacctgcaatcctacctacaatgagatgttggtatatgatgggatccccaagggtgacctgcagcagcgggagctccagctgagcgtgctgagtgagcagggattctgggagaacgtcctcctcggtgaggtgaacatccgcctgcgagagctggacctggctcaggagaagaccggctggttcgccctgggatctcgaagtcatggcaccttgtgagcccagcagagccaccacccagcatcccaggctggtggcaggagctgggggagaggactctcccctgtgagactcctccttgtgaagggccagggccctgggcaggcctccagctcggtccaggtgattctggcctctgtggtaggaggcagggagagtaagacatgctctgctgtctcttcctctggagactgaacttgggttggttgtgatgagcagccccttggaggctgtgaggttgcagcaaagttttaagtttaccttgtgtcaagggagcaatgcttggtttggggagtgtgtggggtgggctgtatgaagtagcattttgggggtgggtgggtggatatcttaatttttatttttaaaaaatgaaatagtgatgttgtcctaactgggacaggaagccttgcgagaagggacgtacctatgccccagaaggcaagagaggaagactatttggactttttgtatgattaaggttcttattggacttttccctaggttttttttttttgttattgttgttgttgtttcgttttctagctataggaactatctggggaggggcccagtgggtcctcggccagagccctctctaaggacaggttggggagggttggggagggctgcctgtgctggactgaggcttgtgccactgggcctttctgattttgcctccaaaggagagcgctgtgatacctacatgtgtaaggaagggccttccgtattggggttctgccaaggacccgtattcagggacccatgctcttttggggggacttttcctcttgtcttccctactttattaggacttgccctgaataccattttctaccccttgcccctccattctcctggcccttctgggggtcagctggtctctatgaatatgctgggggtgcttccccataggtctctcccttcatttgtctctggtgggacaaaatactgactcagtccttagatgtagtttcacccaagagcatcttggccctgggaagaggtccctaggctgcagatgctactgactgcttgctaggtagcctctggaaagcattccccatccatcactccccacttctttctgctgtgctgcttccctcccaaactccatttctgtcaccctttttataagacttttcctcattctgtggggccataaacctatttagtctggagccaaagggatgccctatctgaaggaaaggggcatggggtgggggattccatcaaaactgttgttttttgccccatgatttttctttggtcagtaggaggctggattggagtggtgattattcccctggagctaagctcaggagcccgaagggagagactgagactgactcccttatctcttcatattctttattccctaccagatggatttttttttttttttttggagacggagtctcgccctgtcgccaggctggagtgtagtggcatgatctcgactcactgcaaaatctgcctcccgggttcaagcgattctcctacctcagcctcccgagtagctgggattacaggcatgtgccaccacgccaagctaatttttgtatttttagtagagacggggtttcaccatgttggccaggatggtctcgatctcttgacctcgtgatctgcctgccttggcctcccaaagtgctgggattacaggcgtgagccaccatgccccgccccagatggattttacatttgctcttttgtgtttcgctccaaagggttgtcttcctcgccaaaaggagggagggactttgaatttgatatgaatctttaaaaccagaattggctggatatttcccatgattgggaaaagagtgaaatgaggacattctgtaaactgtccctccctaattccaaggatcagaaactccccgttttgctgactcattccataactggagaaagaagctccattgaccgaagccacagggcagcatggaagtttaaattttctctaaaattaaaatgccaaggataaagctggctgcttccaggagggggaagaggagtggggagtgggcggtgaaacttttccagatgaacggaccataaatgtgttactggctttgtgcctgtagctcattttattatgacctatatgctcctgatttaaagagatctgtgtactgtttacttcccacttcccagaatcccttgtatctcctttctcgggaattgtattttctaataaatgacatttgagaaaaaaa

SEQ ID NO: 281213 - DNA, 325 bp, Homo sapiens
cggccatctttgacctggtgtgagctgagtgagcaggtcaggggtgtgaggctggggaactccctgtcactgttagtttagggccaaggttgagcacttgggagacctgagagctggggaggtagtggagattagatctggtcactttctccctccatccagtgtggggacgaccttcgccaggacatgctaacgctgcagatgattcgcatcatgagcaagatctgggtccaggaggggctggacatgcgcatggtcatcttccgctgcttctccaccggccggggcagaggtcagttgggagtaggggtgagggtggaggagg

SEQ ID NO: 281214 - DNA, 5021 bp, Homo sapiens
gaggaggattcgcagttcaacatcaaggtccctgtgcgttttattgcgacctgccggtgggaactttgtctccgagtcggagcagcatggagcggcggagcgagagcccgtgtctgcgggacagccccgaccggcggagcggcagcccggacgtcaaggggcctcccccagtgaaggtggcccggctggagcagaacggcagccccatgggagcccgcgggaggcccaacggcgccgtggccaaggccgtgggaggtttgatgattcctgtcttttgtgtcgtggagcagttggacggctctcttgaatatgacaacagagaagaacacgccgagtttgtcctggtgcggaaagatgtgctttttagccagctggtggagactgcgctcctggccctggggtattctcacagctctgcggcccaggcccaaggaataatcaagctgggaaggtggaaccctctccccctcagttatgtgacagatgcacccgacgcgacagtggccgacatgctacaagatgtctatcatgttgtgacgttgaaaatccaattacaaagttgttcaaagttggaagaattgcctgcggaggtggaaccatgccacagtccgcaatgccttaaaggaactgctcaaagagatgaaccagagcacattagccaaagaatgccctctctcccagagtatgatttcatccattgtaaatagcacatattatgccaatgtgtcagcaaccaagtgccaggagtttgggagatggtataaaaagtacaagaagattaaagtggaaagagtggaacgagaaaacctttcagactattgtgttctgggccagcgtccaatgcatttaccaaatatgaaccagctggcatccctggggaaaaccaacgaacagtctcctcacagccaaattcaccacagtactccaatccgaaaccaagtgcccgcattacagcccatcatgagccctggtcttctttctccccagcttagtccacaacttgtaaggcaacaaatagccatggcccatctgataaaccaacagattgccgttagccggctcctggctcaccagcatcctcaagccatcaaccagcagttcctgaaccatccacccatccccagagcagttaagccagagccaaccaactcttccgtggaagtctctccagatatctaccagcaagtcagagatgagctgaagagggccagtgtgtcccaagctgtctttgcaagagtggcattcaaccgcacacagggattgttgtctgagattctgcgtaaggaagaagaccctcggacagcctctcagtctcttctagtaaacctgagggccatgcagaatttcctcaatctgccagaagtggagcgagatcgcatctaccaggatgagagggagcggagcatgaatcccaatgtgagcatggtctcctcggcctccagcagtcccagctcctcccgaacccctcaggccaaaacctcgacaccgacaacagacctccctattaaggtggacggcgccaacatcaacatcacagctgccatttatgacgagatccaacaggagatgaaaagggccaaggtgtctcaagccctgtttgccaaagtggctgcaaataaaagtcagggctggctgtgtgaactgctccgctggaaggagaacccaagcccagaaaaccgcaccctctgggaaaacctctgtaccatccgtcgcttcctgaaccttccccagcatgagagggatgtcatctatgaggaggagtcaaggcatcaccacagcgaacgcatgcaacacgtggtccagcttccccctgagccggtgcaggtacttcatagacagcagtctcagccagccaaggagagttcccctcccagagaagaagcgcctcccccacctcctccgactgaagacagttgtgccaaaaagccccggtctcgcacaaagatctccttagaagccctggggatcctccaaagctttattcatgatgtaggcctgtacccagaccaggaagccatccacactctttcggctcagctggatctccccaaacacaccatcatcaagttcttccagaaccagcggtaccacgtgaagcaccacgggaagctgaaagagcacctgggctccgcggtggacgtggctgaatataaggacgaggagctgctgaccgagtcagaggagaacgacagcgaggaaggctccgaggagatgtacaaagtggaggctgaggaggaaaatgctgacaaaagcaaggcagcacctgccgaaattgaccagagataatgtgaacttctactaggcaaagcaatacatcggtccaaggattttctgctttcatttctttaaaagttttttgttagtttgttttttgtttttgtttttgggtttttttggctttatttttgtctttttatgtctgttttgtttttcttacccttttggacatttctttgttgcacaggatacacctatagactgaataagttcagtatttccgaatcagacatcgccttggcaaagacactaaagcgttacactttatcccgtctctatgactggatcatagtcattataatcacaggagactctgccttcattatccttgcacttaacggaagttacatcaggcaagttccaggatgaaaagaactatgaaataaatgaaggaagctacaagtgtgtgtgtatatgtatatgtatatatctctatatttacatatatatattaaaattgcatgggacagagactttgcaatccgaaagaatagactgtgaaatgagttcttaaagaaaagacttgtttatgtattaaaaaaaccacttcacagtgagtcgctttggctttttgataaactgcggcctgctctcagggtggggtgactatttttgaattcctatttattttttgtgtttgtccctgattttttttttttaattctatggcttcctatctggcagcttaatgggtaatttttgaggtatgtatttaacaaaataaacgacactgccgaaaaaaaaaaaagtgaagtgaaaacaatcagggcacattaaaatgatacaagtcaaataaatcttaaagacacaatgcacacttaaaatgactcaataaaatgacttgctacgttccgttattcaatttgtcattactgtagtgaacagatgcatttctgtggaattccaaataagtaaaactgaaattcagtgcagagaaaactttgtccactagtgcaagtcttgatcaaatgacattttgacattggacatatggaattcatagtatgagccacattttgttgtgaaatttatttacctgcttgtggcttcaaatctgaaaattaataagcctgctcgtttaaaagttgtttgttgttgctgtttttttgtctttttgttttttactagaaaatagttcagtgtaatattaagttagaaaagaagttgctgcccagttaaaggggctccctctcaaataaatctccatccttccctctcccaaaagacatttctgatttctgcttcactttgggcttcctcttcttcgtacacattccatctacctaatcaaacattttcagtccctgatctctcctgtcccttttcctgggatgacagccctaacaagaactgtttttgaatcgttgtgcagctccaggcaatagagtatgtgaagcgatttcagtagaatcacttactcatcctaaaagaaaacattatcccagttacctacatcgcaattaccttatgtaaagcagaactaatgctgactggatgtttaatgggatgagcattaaagctgcaatctactatagtactccagatctctttcggcttcctatgagaaacaccagaagcattactttccacttctacttacagtaattgcaagaggagacctcacattcaggactggcctagtgaacgtaatccatgctttaaactggccattaaacagtcccacatggttggatttttttttttttttttgagttgtgctttcacaaaaccttgtcaaagacctcatgcaatatcactttgaaagttattttctgtttactacacaaacattgtaatataactgttaatactatttatatatttgaaaggtataaaaggtaggagttaaaaaaaaaacctctatgtgtagatattaactcagaacttacaatatacagggagaagacatgttgcaatacaagctaattctagctgctcagtaacctctggagtttttaaagggacattttcctgtactttttcaaataatgatgtttaaaaattatcttgacataagcgtcatatacctttgcaaaaggatggttgtttgcagttagccctggccccatccttcctatttctgtagtatgctgcagctttaatcagaaagtccatggttgctgcttcctgatctccgagttactctttccaaattgtcttcttacactgttgctgaaggtcactctgtacacgtaatggaaactgattttgccaagctcttacaaggtggttcatctatcgatggcatccgcatttggtatcttttacacttcaaccaaaaatttattaggtatttttcaatgctaagtcttgccttttattttttaatttcactgccaagtttgcagtggttctaagtgaatctgtgggcattttagcctgtggtcttgccagatctttgcgaattacaatgcatatatgtctatttattcaatatctgtcatataatatctatttggaagaagaaactttctcttgtagtgcctcttgacaaagcacaatttcccgcctttttttttttttttgtgaaatgaaaaaaacaaattgtgttttattgcggtatcaacaatgtgaataaggattaacatattgtaaatgttcttttttccatgtaaatcaactatctttgttatcactaagtgataattaatttttaacttatgtgcattgttaggctgttagaattttttggttgttaaaataaacgcattcaataaataaaactttgtttgtcagttatttta

SEQ ID NO: 281215 - DNA, 5214 bp, Homo sapiens
gggtgtccctttggaggagtcctttccctctcctcctcctccccctcctccctccccccatcatcatcataacaaccatctccgcaccagaagaagacaccctgacccaggaccttaaacattaggacctggggaagagggaaggggaaggagtaaagaggaagactaggagaacactgcaaagccaagcaccagaaactttccaccctggattctctacttttgctccatggacagagccccagtcagccaagtttcagacagaccgtgagcagtccctgtgcgttttattgcgacctgccggtgggaactttgtctccgagtcggagcagcatggagcggcggagcgagagcccgtgtctgcgggacagccccgaccggcggagcggcagcccggacgtcaaggggcctcccccagtgaaggtggcccggctggagcagaacggcagccccatgggagcccgcgggaggcccaacggcgccgtggccaaggccgtgggaggtttgatgattcctgtcttttgtgtcgtggagcagttggacggctctcttgaatatgacaacagagaagaacacgccgagtttgtcctggtgcggaaagatgtgctttttagccagctggtggagactgcgctcctggccctggggtattctcacagctctgcggcccaggcccaaggaataatcaagctgggaaggtggaaccctctccccctcagttatgtgacagatgcacccgacgcgacagtggccgacatgctacaagatgtctatcatgttgtgacgttgaaaatccaattacaaagttgttcaaagttggaagaattgcctgcggaggtggaaccatgccacagtccgcaatgccttaaaggaactgctcaaagagatgaaccagagcacattagccaaagaatgccctctctcccagagtatgatttcatccattgtaaatagcacatattatgccaatgtgtcagcaaccaagtgccaggagtttgggagatggtataaaaagtacaagaagattaaagtggaaagagtggaacgagaaaacctttcagactattgtgttctgggccagcgtccaatgcatttaccaaatatgaaccagctggcatccctggggaaaaccaacgaacagtctcctcacagccaaattcaccacagtactccaatccgaaaccaagtgcccgcattacagcccatcatgagccctggtcttctttctccccagcttagtccacaacttgtaaggcaacaaatagccatggcccatctgataaaccaacagattgccgttagccggctcctggctcaccagcatcctcaagccatcaaccagcagttcctgaaccatccacccatccccagagcagttaagccagagccaaccaactcttccgtggaagtctctccagatatctaccagcaagtcagagatgagctgaagagggccagtgtgtcccaagctgtctttgcaagagtggcattcaaccgcacacagggattgttgtctgagattctgcgtaaggaagaagaccctcggacagcctctcagtctcttctagtaaacctgagggccatgcagaatttcctcaatctgccagaagtggagcgagatcgcatctaccaggatgagagggagcggagcatgaatcccaatgtgagcatggtctcctcggcctccagcagtcccagctcctcccgaacccctcaggccaaaacctcgacaccgacaacagacctccctattaaggtggacggcgccaacatcaacatcacagctgccatttatgacgagatccaacaggagatgaaaagggccaaggtgtctcaagccctgtttgccaaagtggctgcaaataaaagtcagggctggctgtgtgaactgctccgctggaaggagaacccaagcccagaaaaccgcaccctctgtgtcatctatgaggaggagtcaaggcatcaccacagcgaacgcatgcaacacgtggtccagcttccccctgagccggtgcaggtacttcatagacagcagtctcagccagccaaggagagttcccctcccagagaagaagcgcctcccccacctcctccgactgaagacagttgtgccaaaaagccccggtctcgcacaaagatctccttagaagccctggggatcctccaaagctttattcatgatgtaggcctgtacccagaccaggaagccatccacactctttcggctcagctggatctccccaaacacaccatcatcaagttcttccagaaccagcggtaccacgtgaagcaccacgggaagctgaaagagcacctgggctccgcggtggacgtggctgaatataaggacgaggagctgctgaccgagtcagaggagaacgacagcgaggaaggctccgaggagatgtacaaagtggaggctgaggaggaaaatgctgacaaaagcaaggcagcacctgccgaaattgaccagagataatgtgaacttctactaggcaaagcaatacatcggtccaaggattttctgctttcatttctttaaaagttttttgttagtttgttttttgtttttgtttttgggtttttttggctttatttttgtctttttatgtctgttttgtttttcttacccttttggacatttctttgttgcacaggatacacctatagactgaataagttcagtatttccgaatcagacatcgccttggcaaagacactaaagcgttacactttatcccgtctctatgactggatcatagtcattataatcacaggagactctgccttcattatccttgcacttaacggaagttacatcaggcaagttccaggatgaaaagaactatgaaataaatgaaggaagctacaagtgtgtgtgtatatgtatatgtatatatctctatatttacatatatatattaaaattgcatgggacagagactttgcaatccgaaagaatagactgtgaaatgagttcttaaagaaaagacttgtttatgtattaaaaaaaccacttcacagtgagtcgctttggctttttgataaactgcggcctgctctcagggtggggtgactatttttgaattcctatttattttttgtgtttgtccctgattttttttttttaattctatggcttcctatctggcagcttaatgggtaatttttgaggtatgtatttaacaaaataaacgacactgccgaaaaaaaaaaaagtgaagtgaaaacaatcagggcacattaaaatgatacaagtcaaataaatcttaaagacacaatgcacacttaaaatgactcaataaaatgacttgctacgttccgttattcaatttgtcattactgtagtgaacagatgcatttctgtggaattccaaataagtaaaactgaaattcagtgcagagaaaactttgtccactagtgcaagtcttgatcaaatgacattttgacattggacatatggaattcatagtatgagccacattttgttgtgaaatttatttacctgcttgtggcttcaaatctgaaaattaataagcctgctcgtttaaaagttgtttgttgttgctgtttttttgtctttttgttttttactagaaaatagttcagtgtaatattaagttagaaaagaagttgctgcccagttaaaggggctccctctcaaataaatctccatccttccctctcccaaaagacatttctgatttctgcttcactttgggcttcctcttcttcgtacacattccatctacctaatcaaacattttcagtccctgatctctcctgtcccttttcctgggatgacagccctaacaagaactgtttttgaatcgttgtgcagctccaggcaatagagtatgtgaagcgatttcagtagaatcacttactcatcctaaaagaaaacattatcccagttacctacatcgcaattaccttatgtaaagcagaactaatgctgactggatgtttaatgggatgagcattaaagctgcaatctactatagtactccagatctctttcggcttcctatgagaaacaccagaagcattactttccacttctacttacagtaattgcaagaggagacctcacattcaggactggcctagtgaacgtaatccatgctttaaactggccattaaacagtcccacatggttggatttttttttttttttttgagttgtgctttcacaaaaccttgtcaaagacctcatgcaatatcactttgaaagttattttctgtttactacacaaacattgtaatataactgttaatactatttatatatttgaaaggtataaaaggtaggagttaaaaaaaaaacctctatgtgtagatattaactcagaacttacaatatacagggagaagacatgttgcaatacaagctaattctagctgctcagtaacctctggagtttttaaagggacattttcctgtactttttcaaataatgatgtttaaaaattatcttgacataagcgtcatatacctttgcaaaaggatggttgtttgcagttagccctggccccatccttcctatttctgtagtatgctgcagctttaatcagaaagtccatggttgctgcttcctgatctccgagttactctttccaaattgtcttcttacactgttgctgaaggtcactctgtacacgtaatggaaactgattttgccaagctcttacaaggtggttcatctatcgatggcatccgcatttggtatcttttacacttcaaccaaaaatttattaggtatttttcaatgctaagtcttgccttttattttttaatttcactgccaagtttgcagtggttctaagtgaatctgtgggcattttagcctgtggtcttgccagatctttgcgaattacaatgcatatatgtctatttattcaatatctgtcatataatatctatttggaagaagaaactttctcttgtagtgcctcttgacaaagcacaatttcccgcctttttttttttttttgtgaaatgaaaaaaacaaattgtgttttattgcggtatcaacaatgtgaataaggattaacatattgtaaatgttcttttttccatgtaaatcaactatctttgttatcactaagtgataattaatttttaacttatgtgcattgttaggctgttagaattttttggttgttaaaataaacgcattcaataaataaaactttgtttgtcagttatttta

SEQ ID NO: 281216 - DNA, 4371 bp, Homo sapiens
agtggatgctccgcgggaaggagaaccctaagcccagaaaaccgcaccctctggaaaacctctgtaccatccgtcgcttcctgaaacttacccagcatgagagggatgtcatctatgaggaggagtcaaggcatcaccacagcgaacgcatgcgacacgtggtccagcttccccctgagccggtgcagtggaaagagtggaacgagaaaacctttcagactattgtgttctgggccagcgtccaatgcatttaccaaatatgaaccagctggcatccctggggaaaaccaacgaacagtctcctcacagccaaattcaccacagtactccaatccgaaaccaagtgcccgcattacagcccatcatgagccctggtcttctttctccccagcttagtccacaacttgtaaggcaacaaatagccatggcccatctgataaaccaacagattgccgttagccggctcctggctcaccagcatcctcaagccatcaaccagcagttcctgaaccatccacccatccccagagcagttaagccagagccaaccaactcttccgtggaagtctctccagatatctaccagcaagtcagagatgagctgaagagggccagtgtgtcccaagctgtctttgcaagagtggcattcaaccgcacacagggattgttgtctgagattctgcgtaaggaagaagaccctcggacagcctctcagtctcttctagtaaacctgagggccatgcagaatttcctcaatctgccagaagtggagcgagatcgcatctaccaggatgagagggagcggagcatgaatcccaatgtgagcatggtctcctcggcctccagcagtcccagctcctcccgaacccctcaggccaaaacctcgacaccgacaacagacctccctattaaggtggacggcgccaacatcaacatcacagctgccatttatgacgagatccaacaggagatgaaaagggccaaggtgtctcaagccctgtttgccaaagtggctgcaaataaaagtcagggctggctgtgtgaactgctccgctggaaggagaacccaagcccagaaaaccgcaccctctgtgtcatctatgaggaggagtcaaggcatcaccacagcgaacgcatgcaacacgtggtccagcttccccctgagccggtgcaggtacttcatagacagcagtctcagccagccaaggagagttcccctcccagagaagaagcgcctcccccacctcctccgactgaagacagttgtgccaaaaagccccggtctcgcacaaagatctccttagaagccctggggatcctccaaagctttattcatgatgtaggcctgtacccagaccaggaagccatccacactctttcggctcagctggatctccccaaacacaccatcatcaagttcttccagaaccagcggtaccacgtgaagcaccacgggaagctgaaagagcacctgggctccgcggtggacgtggctgaatataaggacgaggagctgctgaccgagtcagaggagaacgacagcgaggaaggctccgaggagatgtacaaagtggaggctgaggaggaaaatgctgacaaaagcaaggcagcacctgccgaaattgaccagagataatgtgaacttctactaggcaaagcaatacatcggtccaaggattttctgctttcatttctttaaaagttttttgttagtttgttttttgtttttgtttttgggtttttttggctttatttttgtctttttatgtctgttttgtttttcttacccttttggacatttctttgttgcacaggatacacctatagactgaataagttcagtatttccgaatcagacatcgccttggcaaagacactaaagcgttacactttatcccgtctctatgactggatcatagtcattataatcacaggagactctgccttcattatccttgcacttaacggaagttacatcaggcaagttccaggatgaaaagaactatgaaataaatgaaggaagctacaagtgtgtgtgtatatgtatatgtatatatctctatatttacatatatatattaaaattgcatgggacagagactttgcaatccgaaagaatagactgtgaaatgagttcttaaagaaaagacttgtttatgtattaaaaaaaccacttcacagtgagtcgctttggctttttgataaactgcggcctgctctcagggtggggtgactatttttgaattcctatttattttttgtgtttgtccctgattttttttttttaattctatggcttcctatctggcagcttaatgggtaatttttgaggtatgtatttaacaaaataaacgacactgccgaaaaaaaaaaaagtgaagtgaaaacaatcagggcacattaaaatgatacaagtcaaataaatcttaaagacacaatgcacacttaaaatgactcaataaaatgacttgctacgttccgttattcaatttgtcattactgtagtgaacagatgcatttctgtggaattccaaataagtaaaactgaaattcagtgcagagaaaactttgtccactagtgcaagtcttgatcaaatgacattttgacattggacatatggaattcatagtatgagccacattttgttgtgaaatttatttacctgcttgtggcttcaaatctgaaaattaataagcctgctcgtttaaaagttgtttgttgttgctgtttttttgtctttttgttttttactagaaaatagttcagtgtaatattaagttagaaaagaagttgctgcccagttaaaggggctccctctcaaataaatctccatccttccctctcccaaaagacatttctgatttctgcttcactttgggcttcctcttcttcgtacacattccatctacctaatcaaacattttcagtccctgatctctcctgtcccttttcctgggatgacagccctaacaagaactgtttttgaatcgttgtgcagctccaggcaatagagtatgtgaagcgatttcagtagaatcacttactcatcctaaaagaaaacattatcccagttacctacatcgcaattaccttatgtaaagcagaactaatgctgactggatgtttaatgggatgagcattaaagctgcaatctactatagtactccagatctctttcggcttcctatgagaaacaccagaagcattactttccacttctacttacagtaattgcaagaggagacctcacattcaggactggcctagtgaacgtaatccatgctttaaactggccattaaacagtcccacatggttggatttttttttttttttttgagttgtgctttcacaaaaccttgtcaaagacctcatgcaatatcactttgaaagttattttctgtttactacacaaacattgtaatataactgttaatactatttatatatttgaaaggtataaaaggtaggagttaaaaaaaaaacctctatgtgtagatattaactcagaacttacaatatacagggagaagacatgttgcaatacaagctaattctagctgctcagtaacctctggagtttttaaagggacattttcctgtactttttcaaataatgatgtttaaaaattatcttgacataagcgtcatatacctttgcaaaaggatggttgtttgcagttagccctggccccatccttcctatttctgtagtatgctgcagctttaatcagaaagtccatggttgctgcttcctgatctccgagttactctttccaaattgtcttcttacactgttgctgaaggtcactctgtacacgtaatggaaactgattttgccaagctcttacaaggtggttcatctatcgatggcatccgcatttggtatcttttacacttcaaccaaaaatttattaggtatttttcaatgctaagtcttgccttttattttttaatttcactgccaagtttgcagtggttctaagtgaatctgtgggcattttagcctgtggtcttgccagatctttgcgaattacaatgcatatatgtctatttattcaatatctgtcatataatatctatttggaagaagaaactttctcttgtagtgcctcttgacaaagcacaatttcccgcctttttttttttttttgtgaaatgaaaaaaacaaattgtgttttattgcggtatcaacaatgtgaataaggattaacatattgtaaatgttcttttttccatgtaaatcaactatctttgttatcactaagtgataattaatttttaacttatgtgcattgttaggctgttagaattttttggttgttaaaataaacgcattcaataaataaaactttgtttgtcagttatttta

SEQ ID NO: 281217 - DNA, 2989 bp, Homo sapiens
  misc_feature (1477)..(1477): n is a, c, g, or t
  misc_feature (1540)..(1540): n is a, c, g, or t
  misc_feature (2062)..(2062): n is a, c, g, or t
  misc_feature (2937)..(2937): n is a, c, g, or t
gcaatgccttaaaggaactgctcaaagagatgaaccagagcacattagccaaagaatgccctctctcccagagtatgatttcatccattgtaaatagcacatattatgccaatgtgtcagcaaccaagtgccaggagtttgggagatggtataaaaagtacaagaagattaaaggtttgatgattcctgtcttttgtgtcgtggagcagttggacggctctcttgaatatgacaacagagaagaacacgccgagtttgtcctggtgcggaaagatgtgctttttagccagctggtggagactgcgctcctggccctggggtattctcacagctctgcggcccaggcccaaggaataatcaagctgggaaggtggaaccctctccccctcagttatgtgacagatgcacccgacgcgacagtggccgacatgctacaagatgtctatcatgttgtgacgttgaaaatccaattacaaagttgttcaaagttggaagaattgcctgcggaggtggaaccatgccacagtccgcaatgccttaaaggaactgctcaaagagatgaaccagagcacattagccaaagaatgccctctctcccagagtatgatttcatccattgtaaatagcacatattatgccaatgtgtcagcaaccaagtgccaggagtttgggagatggtataaaaagtacaagaagattaaagtggaaagagtggaacgagaaaacctttcagactattgtgttctgggccagcgtccaatgcatttaccaaatatgaaccagctggcatccctggggaaaaccaacgaacagtctcctcacagccaaattcaccacagtactccaatccgaaaccaagtgcccgcattacagcccatcatgagccctggtcttctttctccccagcttagtccacaacttgtaaggcaacaaatagccatggcccatctgataaaccaacagattgccgttagccggctcctggctcaccagcatcctcaagccatcaaccagcagttcctgaaccatccacccatccccagagcagttaagccagagccaaccaactcttccgtggaagtctctccagatatctaccagcaagtcagagatgagctgaagagggccagtgtgtcccaagctgtctttgcaagagtggcattcaaccgcacacaggtacaattagcattaaacactgtaattaacagtaatactggggacagaattgagataggttataattatttttatctctttaaaaagctttatggatctcaggacatagaattagattaattaataatccttagttaatgaaacgctattaccattgatccatgcatgaccatgattaattaactaattgattaattttgatgaggtaatggacatctttgaacccaacatgcaactcaggaccccaaatgttactaatgacttgggtatgtactctctcatcctctccatttactgtttncagatgtaaccctgatcttgaattttgtgattatcagtctcttgccattttttaaaacaaatnataaaactatgcatgcccagacaatctatttttttcccttggttttgaacgttataaaagaaataaaattatgttttataattttataagtaaagttttatttaaaaatttataaaaatccttcaaaacataaaagttagatttaagatattgataaaatgataatggatagtttacttttatttttaatgtttgagagaattatatgccaattataacactaaatgttgaaaatgtaaacagttaattcacacgtcttatttttattgagggtgcttatatgtaagacattcttttctgctagtagttcttaaactggagtgtgcatcagaatcacctggagggctgtgaaacacagactgctgggcctcatcccatagtttctgattgagtaagtctgaggttggactcagaaatggacatttctaacaagatcccaggtgattatgatggtactgatccggggccgcatgttgagaaaaacttacctagcccttatatgagtaagaacaaagcagatgngcataatctcggggagctaacgatctagtggtgaaaaccaggtaaccagataattagagtaaaatgtgaagtgttatgagtaatgttggagagtgtaagcaatagttgtggtggaggttcatggtgagctggaggtgaggaatacttccaggagaatgaatatggtaagccttcaagaaaacagtagattaaaatttcagcaccctcgtaaatgcaaggcaggaagctaagctctatgtgggtgcaaagaggaaaaagataatgggcaagcacatatgtaaacaacagagtattaggttgtcaatgggttagaccttgaaggattaataaagtacagcaggcaaagatgatgaagaagaagattattattttaaggtaaagacattcataggaaagatgttgagttaaaaaatgcaggaataatttgaagacataaaacaactgatttctgagaaaaaccctgtgaacgtacagaatgtaggaatgctttcatttatctgatacctgttcagagacacatgataacacacgctgtagatggaccttacaaatgaaagaaagcatgctggattgaaacctcaataatttggaaaatacaggaatgtttccaaatttaatgattacttcagaagttaaggggctgggcacagtggctcatgtctgtagtcctagcactttgggaggccaaggtgggcggatcacttgaggtcaggagttcaagaccagcctgggcaagatggtaaaacaccatctctactaaaacagaacaaaacaaaaaaattagctgggcgtggtgatgcgtgcctgtagtctcagctactcaggaggctgaggcagaagaatcccttgaacccaggaggcggaggctgcagtgngccgagatcatgccactgcactccagcctgagtgagagtgaaactccatctc

SEQ ID NO: 281218 - DNA, 4886 bp, Homo sapiens
gcaatgccttaaaggaactgctcaaagagatgaaccagagcacattagccaaagaatgccctctctcccagagtatgatttcatccattgtaaatagcacatattatgccaatgtgtcagcaaccaagtgccaggagtttgggagatggtataaaaagtacaagaagattaaaggtttgatgattcctgtcttttgtgtcgtggagcagttggacggctctcttgaatatgacaacagagaagaacacgccgagtttgtcctggtgcggaaagatgtgctttttagccagctggtggagactgcgctcctggccctggggtattctcacagctctgcggcccaggcccaaggaataatcaagctgggaaggtggaaccctctccccctcagttatgtgacagatgcacccgacgcgacagtggccgacatgctacaagatgtctatcatgttgtgacgttgaaaatccaattacaaagttgttcaaagttggaagaattgcctgcggaggtggaaccatgccacagtccgcaatgccttaaaggaactgctcaaagagatgaaccagagcacattagccaaagaatgccctctctcccagagtatgatttcatccattgtaaatagcacatattatgccaatgtgtcagcaaccaagtgccaggagtttgggagatggtataaaaagtacaagaagattaaagtggaaagagtggaacgagaaaacctttcagactattgtgttctgggccagcgtccaatgcatttaccaaatatgaaccagctggcatccctggggaaaaccaacgaacagtctcctcacagccaaattcaccacagtactccaatccgaaaccaagtgcccgcattacagcccatcatgagccctggtcttctttctccccagcttagtccacaacttgtaaggcaacaaatagccatggcccatctgataaaccaacagattgccgttagccggctcctggctcaccagcatcctcaagccatcaaccagcagttcctgaaccatccacccatccccagagcagttaagccagagccaaccaactcttccgtggaagtctctccagatatctaccagcaagtcagagatgagctgaagagggccagtgtgtcccaagctgtctttgcaagagtggcattcaaccgcacacagggattgttgtctgagattctgcgtaaggaagaagaccctcggacagcctctcagtctcttctagtaaacctgagggccatgcagaatttcctcaatctgccagaagtggagcgagatcgcatctaccaggatgagagggagcggagcatgaatcccaatgtgagcatggtctcctcggcctccagcagtcccagctcctcccgaacccctcaggccaaaacctcgacaccgacaacagacctccctattaaggtggacggcgccaacatcaacatcacagctgccatttatgacgagatccaacaggagatgaaaagggccaaggtgtctcaagccctgtttgccaaagtggctgcaaataaaagtcagggctggctgtgtgaactgctccgctggaaggagaacccaagcccagaaaaccgcaccctctgtgtcatctatgaggaggagtcaaggcatcaccacagcgaacgcatgcaacacgtggtccagcttccccctgagccggtgcaggtacttcatagacagcagtctcagccagccaaggagagttcccctcccagagaagaagcgcctcccccacctcctccgactgaagacagttgtgccaaaaagccccggtctcgcacaaagatctccttagaagccctggggatcctccaaagctttattcatgatgtaggcctgtacccagaccaggaagccatccacactctttcggctcagctggatctccccaaacacaccatcatcaagttcttccagaaccagcggtaccacgtgaagcaccacgggaagctgaaagagcacctgggctccgcggtggacgtggctgaatataaggacgaggagctgctgaccgagtcagaggagaacgacagcgaggaaggctccgaggagatgtacaaagtggaggctgaggaggaaaatgctgacaaaagcaaggcagcacctgccgaaattgaccagagataatgtgaacttctactaggcaaagcaatacatcggtccaaggattttctgctttcatttctttaaaagttttttgttagtttgttttttgtttttgtttttgggtttttttggctttatttttgtctttttatgtctgttttgtttttcttacccttttggacatttctttgttgcacaggatacacctatagactgaataagttcagtatttccgaatcagacatcgccttggcaaagacactaaagcgttacactttatcccgtctctatgactggatcatagtcattataatcacaggagactctgccttcattatccttgcacttaacggaagttacatcaggcaagttccaggatgaaaagaactatgaaataaatgaaggaagctacaagtgtgtgtgtatatgtatatgtatatatctctatatttacatatatatattaaaattgcatgggacagagactttgcaatccgaaagaatagactgtgaaatgagttcttaaagaaaagacttgtttatgtattaaaaaaaccacttcacagtgagtcgctttggctttttgataaactgcggcctgctctcagggtggggtgactatttttgaattcctatttattttttgtgtttgtccctgattttttttttttaattctatggcttcctatctggcagcttaatgggtaatttttgaggtatgtatttaacaaaataaacgacactgccgaaaaaaaaaaaagtgaagtgaaaacaatcagggcacattaaaatgatacaagtcaaataaatcttaaagacacaatgcacacttaaaatgactcaataaaatgacttgctacgttccgttattcaatttgtcattactgtagtgaacagatgcatttctgtggaattccaaataagtaaaactgaaattcagtgcagagaaaactttgtccactagtgcaagtcttgatcaaatgacattttgacattggacatatggaattcatagtatgagccacattttgttgtgaaatttatttacctgcttgtggcttcaaatctgaaaattaataagcctgctcgtttaaaagttgtttgttgttgctgtttttttgtctttttgttttttactagaaaatagttcagtgtaatattaagttagaaaagaagttgctgcccagttaaaggggctccctctcaaataaatctccatccttccctctcccaaaagacatttctgatttctgcttcactttgggcttcctcttcttcgtacacattccatctacctaatcaaacattttcagtccctgatctctcctgtcccttttcctgggatgacagccctaacaagaactgtttttgaatcgttgtgcagctccaggcaatagagtatgtgaagcgatttcagtagaatcacttactcatcctaaaagaaaacattatcccagttacctacatcgcaattaccttatgtaaagcagaactaatgctgactggatgtttaatgggatgagcattaaagctgcaatctactatagtactccagatctctttcggcttcctatgagaaacaccagaagcattactttccacttctacttacagtaattgcaagaggagacctcacattcaggactggcctagtgaacgtaatccatgctttaaactggccattaaacagtcccacatggttggatttttttttttttttttgagttgtgctttcacaaaaccttgtcaaagacctcatgcaatatcactttgaaagttattttctgtttactacacaaacattgtaatataactgttaatactatttatatatttgaaaggtataaaaggtaggagttaaaaaaaaaacctctatgtgtagatattaactcagaacttacaatatacagggagaagacatgttgcaatacaagctaattctagctgctcagtaacctctggagtttttaaagggacattttcctgtactttttcaaataatgatgtttaaaaattatcttgacataagcgtcatatacctttgcaaaaggatggttgtttgcagttagccctggccccatccttcctatttctgtagtatgctgcagctttaatcagaaagtccatggttgctgcttcctgatctccgagttactctttccaaattgtcttcttacactgttgctgaaggtcactctgtacacgtaatggaaactgattttgccaagctcttacaaggtggttcatctatcgatggcatccgcatttggtatcttttacacttcaaccaaaaatttattaggtatttttcaatgctaagtcttgccttttattttttaatttcactgccaagtttgcagtggttctaagtgaatctgtgggcattttagcctgtggtcttgccagatctttgcgaattacaatgcatatatgtctatttattcaatatctgtcatataatatctatttggaagaagaaactttctcttgtagtgcctcttgacaaagcacaatttcccgcctttttttttttttttgtgaaatgaaaaaaacaaattgtgttttattgcggtatcaacaatgtgaataaggattaacatattgtaaatgttcttttttccatgtaaatcaactatctttgttatcactaagtgataattaatttttaacttatgtgcattgttaggctgttagaattttttggttgttaaaataaacgcattcaataaataaaactttgtttgtcagttatttta

SEQ ID NO: 281219 - DNA, 4522 bp, Homo sapiens
tccattgttgacattgccccagggttggctttttggagaaagcactatcattgtataaattaaagggatggtaaattcaggtaatcgtgtttgatgttaatagttcagtttacaggagagtgactgttttaagtttaaaagaaaaaagaggttagtgcaggttataaagtgctctttcttgtccctaaaaagaagtagtcatattttgaaaaaataactataattttttttttcagagtatgatttcatccattgtaaatagcacatattatgccaatgtgtcagcaaccaagtgccaggagtttgggagatggtataaaaagtacaagaagattaaagtggaaagagtggaacgagaaaacctttcagactattgtgttctgggccagcgtccaatgcatttaccaaatatgaaccagctggcatccctggggaaaaccaacgaacagtctcctcacagccaaattcaccacagtactccaatccgaaaccaagtgcccgcattacagcccatcatgagccctggtcttctttctccccagcttagtccacaacttgtaaggcaacaaatagccatggcccatctgataaaccaacagattgccgttagccggctcctggctcaccagcatcctcaagccatcaaccagcagttcctgaaccatccacccatccccagagcagttaagccagagccaaccaactcttccgtggaagtctctccagatatctaccagcaagtcagagatgagctgaagagggccagtgtgtcccaagctgtctttgcaagagtggcattcaaccgcacacagggattgttgtctgagattctgcgtaaggaagaagaccctcggacagcctctcagtctcttctagtaaacctgagggccatgcagaatttcctcaatctgccagaagtggagcgagatcgcatctaccaggatgagagggagcggagcatgaatcccaatgtgagcatggtctcctcggcctccagcagtcccagctcctcccgaacccctcaggccaaaacctcgacaccgacaacagacctccctattaaggtggacggcgccaacatcaacatcacagctgccatttatgacgagatccaacaggagatgaaaagggccaaggtgtctcaagccctgtttgccaaagtggctgcaaataaaagtcagggctggctgtgtgaactgctccgctggaaggagaacccaagcccagaaaaccgcaccctctgtgtcatctatgaggaggagtcaaggcatcaccacagcgaacgcatgcaacacgtggtccagcttccccctgagccggtgcaggtacttcatagacagcagtctcagccagccaaggagagttcccctcccagagaagaagcgcctcccccacctcctccgactgaagacagttgtgccaaaaagccccggtctcgcacaaagatctccttagaagccctggggatcctccaaagctttattcatgatgtaggcctgtacccagaccaggaagccatccacactctttcggctcagctggatctccccaaacacaccatcatcaagttcttccagaaccagcggtaccacgtgaagcaccacgggaagctgaaagagcacctgggctccgcggtggacgtggctgaatataaggacgaggagctgctgaccgagtcagaggagaacgacagcgaggaaggctccgaggagatgtacaaagtggaggctgaggaggaaaatgctgacaaaagcaaggcagcacctgccgaaattgaccagagataatgtgaacttctactaggcaaagcaatacatcggtccaaggattttctgctttcatttctttaaaagttttttgttagtttgttttttgtttttgtttttgggtttttttggctttatttttgtctttttatgtctgttttgtttttcttacccttttggacatttctttgttgcacaggatacacctatagactgaataagttcagtatttccgaatcagacatcgccttggcaaagacactaaagcgttacactttatcccgtctctatgactggatcatagtcattataatcacaggagactctgccttcattatccttgcacttaacggaagttacatcaggcaagttccaggatgaaaagaactatgaaataaatgaaggaagctacaagtgtgtgtgtatatgtatatgtatatatctctatatttacatatatatattaaaattgcatgggacagagactttgcaatccgaaagaatagactgtgaaatgagttcttaaagaaaagacttgtttatgtattaaaaaaaccacttcacagtgagtcgctttggctttttgataaactgcggcctgctctcagggtggggtgactatttttgaattcctatttattttttgtgtttgtccctgattttttttttttaattctatggcttcctatctggcagcttaatgggtaatttttgaggtatgtatttaacaaaataaacgacactgccgaaaaaaaaaaaagtgaagtgaaaacaatcagggcacattaaaatgatacaagtcaaataaatcttaaagacacaatgcacacttaaaatgactcaataaaatgacttgctacgttccgttattcaatttgtcattactgtagtgaacagatgcatttctgtggaattccaaataagtaaaactgaaattcagtgcagagaaaactttgtccactagtgcaagtcttgatcaaatgacattttgacattggacatatggaattcatagtatgagccacattttgttgtgaaatttatttacctgcttgtggcttcaaatctgaaaattaataagcctgctcgtttaaaagttgtttgttgttgctgtttttttgtctttttgttttttactagaaaatagttcagtgtaatattaagttagaaaagaagttgctgcccagttaaaggggctccctctcaaataaatctccatccttccctctcccaaaagacatttctgatttctgcttcactttgggcttcctcttcttcgtacacattccatctacctaatcaaacattttcagtccctgatctctcctgtcccttttcctgggatgacagccctaacaagaactgtttttgaatcgttgtgcagctccaggcaatagagtatgtgaagcgatttcagtagaatcacttactcatcctaaaagaaaacattatcccagttacctacatcgcaattaccttatgtaaagcagaactaatgctgactggatgtttaatgggatgagcattaaagctgcaatctactatagtactccagatctctttcggcttcctatgagaaacaccagaagcattactttccacttctacttacagtaattgcaagaggagacctcacattcaggactggcctagtgaacgtaatccatgctttaaactggccattaaacagtcccacatggttggatttttttttttttttttgagttgtgctttcacaaaaccttgtcaaagacctcatgcaatatcactttgaaagttattttctgtttactacacaaacattgtaatataactgttaatactatttatatatttgaaaggtataaaaggtaggagttaaaaaaaaaacctctatgtgtagatattaactcagaacttacaatatacagggagaagacatgttgcaatacaagctaattctagctgctcagtaacctctggagtttttaaagggacattttcctgtactttttcaaataatgatgtttaaaaattatcttgacataagcgtcatatacctttgcaaaaggatggttgtttgcagttagccctggccccatccttcctatttctgtagtatgctgcagctttaatcagaaagtccatggttgctgcttcctgatctccgagttactctttccaaattgtcttcttacactgttgctgaaggtcactctgtacacgtaatggaaactgattttgccaagctcttacaaggtggttcatctatcgatggcatccgcatttggtatcttttacacttcaaccaaaaatttattaggtatttttcaatgctaagtcttgccttttattttttaatttcactgccaagtttgcagtggttctaagtgaatctgtgggcattttagcctgtggtcttgccagatctttgcgaattacaatgcatatatgtctatttattcaatatctgtcatataatatctatttggaagaagaaactttctcttgtagtgcctcttgacaaagcacaatttcccgcctttttttttttttttgtgaaatgaaaaaaacaaattgtgttttattgcggtatcaacaatgtgaataaggattaacatattgtaaatgttcttttttccatgtaaatcaactatctttgttatcactaagtgataattaatttttaacttatgtgcattgttaggctgttagaattttttggttgttaaaataaacgcattcaataaataaaactttgtttgtcagttatttta

SEQ ID NO: 281220 - DNA, 1413 bp, Homo sapiens
gcaatgccttaaaggaactgctcaaagagatgaaccagagcacattagccaaagaatgccctctctcccagagtatgatttcatccattgtaaatagcacatattatgccaatgtgtcagcaaccaagtgccaggagtttgggagatggtataaaaagtacaagaagattaaaggtttgatgattcctgtcttttgtgtcgtggagcagttggacggctctcttgaatatgacaacagagaagaacacgccgagtttgtcctggtgcggaaagatgtgctttttagccagctggtggagactgcgctcctggccctggggtattctcacagctctgcggcccaggcccaaggaataatcaagctgggaaggtggaaccctctccccctcagttatgtgacagatgcacccgacgcgacagtggccgacatgctacaagatgtctatcatgttgtgacgttgaaaatccaattacaaagttgttcaaagttggaagaattgcctgcggaggtggaaccatgccacagtccgcaatgccttaaaggaactgctcaaagagatgaaccagagcacattagccaaagaatgccctctctcccagagtatgatttcatccattgtaaatagcacatattatgccaatgtgtcagcaaccaagtgccaggagtttgggagatggtataaaaagtacaagaagattaaagtggaaagagtggaacgagaaaacctttcagactattgtgttctgggccagcgtccaatgcatttaccaaatatgaaccagctggcatccctggggaaaaccaacgaacagtctcctcacagccaaattcaccacagtactccaatccgaaaccaagtgcccgcattacagcccatcatgagccctggtcttctttctccccagcttagtccacaacttgtaaggcaacaaatagccatggcccatctgataaaccaacagattgccgttagccggctcctggctcaccagcatcctcaagccatcaaccagcagttcctgaaccatccacccatccccagagcagttaagccagagccaaccaactcttccgtggaagtctctccagatatctaccagcaagtcagagatgagctgaagagggccagtgtgtcccaagctgtctttgcaagagtggcattcaaccgcacacagggattgttgtctgagattctgcgtaaggaagaagaccctcggacagcctctcagtctcttctagtaaacctgagggccatgcagaatttcctcaatctgccagaagtggagcgagatcgcatctaccaggatgagagggagcggagcatgaatcccaatgtgagcatggtctcctcggcctccagcagtcccagctcctcccgaacccctcaggcccatcacgctgccatttatgcg

SEQ ID NO: 281221 - DNA, 2624 bp, Homo sapiens
gccggcgtgacgtagtgtctgtgccccgttcttgccccctcagtactagagtctccggcttcgctcacgcgccttgggcataagagtcctctcgttggtcccggaggtggggttgcgctcacaaggggcgaccgtcgccacggtggcggccactgcatcgcgtcccacctccgcggccctgggcgccgtggtgtcgacgggccccgagcctatgacgggccagggccagtcggcgtccgggtcgtcggcgtggagcacggtattccgccacgtccggtatgagaacctgatagcgggcgtgagcggcggcgtcttatccaaccttgcgctgcatccgctcgacctcgtgaagatccgcttcgccgtgagtgatggattggaactgagaccgaaatataatggaattttacattgcttgactaccatttggaaacttgatggactacggggactttatcaaggagtaaccccaaatatatggggtgcaggtttatcctggggactctactttttcttttacaatgccatcaagtcatataaaacagaaggaagagctgaacgtttagaggcaacagaataccttgtctcagctgctgaagctggagccatgaccctctgcattacaaacccattatgggtaacaaaaactcgccttatgttacagtatgatgctgttgttaactccccacaccgacaatataaaggaatgtttgatacacttgtgaaaatatataagtatgaaggtgtgcgtggattatataagggatttgttcctgggctgtttggaacatcgcatggtgcccttcagtttatggcatatgaattgctgaagttgaagtacaaccagcatatcaatagattaccagaagcccagttgagcacagtagaatatatatctgttgcagcactatccaaaatatttgctgtcgcagcaacatacccatatcaagtcgtaagagctcgtcttcaggatcaacacatgttttacagtggtgtaatagatgtaatcacaaagacatggaggaaagaaggcgtcggtggattttacaagggaattgctcctaatttgattagagtgactccagcctgctgtattacctttgtggtatatgaaaacgtctcacattttttacttgaccttagagaaaagagaaagtaagctcaaagaggacaattccagtatatctgcccaaggcagcaacaagctcttttgtgtttaaggcataaaagaagaattctgcatagaaacatggctcatattcgaaattgctctatagtcattagaagccagagaactgctaagtctcctgcaatgtttttctgctttttgccttccccatatatatggaacttggctacctctgcctgaaatggctgccatcaacacaatgttaaaactgacacgaagtatagagtttcacagatttctacgttttattggtggaagctgatttgcaacatttgctaaatggattagatgaatgtacttctttttgtgagcttacttgcctggattgctttaaaattaacctttgtgcaataccaagaaaatagctctttaaaagaatgtctttgtatgtctcaaggtaaattaaggatttactgaataaggtgttgaccaaatccagaccattttattttatttttttatttatttattttttgagatggagtcttgctttgtcgcccaggctggagtgcagtggcgtgatctcagctcactgcaacctccacctcccgggttcacgccattctcctgcctcagcctcctgagtagctgggactacaggcacctgccaccacgcctggctaacttttttttatattttgagtagaaatggggtttcaccatgttagccaggatggtctcaatctcctgaccttgtgatccgcctgccttggcctcccaaagtgctgggattacaggcgtgagccactgcgcctggccagaccattttagaattgggaaattttagtgagaaaaaatgcactgtaaatatgctttagttttaattcagttgggatgcactacctagcgaaaattgagaaactatatacttctcagagaaatatctgacatctattgtcattccattgctattttttttccccagagacttccataatttaaaataaaatcctagatccagttcttgtttttggcataaatacttaatctattttaaatttataaaatctgagcttctaggatccagctgtgtcaacctttatttagcatatataactataaatcacttattacagatgctaaatagatcaccttttacagatgctgaaatgtttgggatatgtttgttgacaaggtaaatggaaatgagaaactttatacttcagttttcagatatatggatctagatcccaaataaatgattaatcttcattggtttctcaaattcaggttgaaatacaaattaatagcctttattgattttacttttatgagtcattgtagacatctataaatataaaagggcctgtacccaaaggatgccagaatactagtatttttatttatcgtaaacatccacgagtgctgttgcactaccatctatttgttgtaaataaaagtgttgttttcaaagccatctttaaatagttcttta

SEQ ID NO: 281222 - DNA, 3701 bp, Homo sapiens
  misc_feature (3553)..(3553): n is a, c, g, or t
  misc_feature (3601)..(3601): n is a, c, g, or t
  misc_feature (3624)..(3624): n is a, c, g, or t
  misc_feature (3682)..(3682): n is a, c, g, or t
gccggcgtgacgtagtgtctgtgccccgttcttgccccctcagtactagagtctccggcttcgctcacgcgccttgggcataagagtcctctcgttggtcccggaggtggggttgcgctcacaaggggcgaccgtcgccacggtggcggccactgcatcgcgtcccacctccgcggccctgggcgccgtggtgtcgacgggccccgagcctatgacgggccagggccagtcggcgtccgggtcgtcggcgtggagcacggtattccgccacgtccggtatgagaacctgatagcgggcgtgagcggcggcgtcttatccaaccttgcgctgcatccgctcgacctcgtgaagatccgcttcgccggaacaatcctgtgagtttatgatatctgctatacagatgaggataacagaagttgactaacttgcccaagtcacaagtttgtaaagatggatctgggatttaaacccagtgagtgatggattggaactgagaccgaaatataatggaattttacattgcttgactaccatttggaaacttgatggactacggggactttatcaaggagtaaccccaaatatatggggtgcaggtttatcctggggactctactttttcttttacaatgccatcaagtcatataaaacagaaggaagagctgaacgtttagaggcaacagaataccttgtctcagctgctgaagctggagccatgaccctctgcattacaaacccattatgggtaacaaaaactcgccttatgttacagtatgatgctgttgttaactccccacaccgacaatataaaggaatgtttgatacacttgtgaaaatatataagtatgaaggtgtgcgtggattatataagggatttgttcctgggctgtttggaacatcgcatggtgcccttcagtttatggcatatgaattgctgaagttgaagtacaaccagcatatcaatagattaccagaagcccagttgagcacagtagaatatatatctgttgcagcactatccaaaatatttgctgtcgcagcaacatacccatatcaagtcgtaagagctcgtcttcaggatcaacacatgttttacagtggtgtaatagatgtaatcacaaagacatggaggaaagaaggcgtcggtggattttacaagggaattgctcctaatttgattagagtgactccagcctgctgtattacctttgtggtatatgaaaacgtctcacattttttacttgaccttagagaaaagagaaagtaagctcaaagaggacaattccagtatatctgcccaaggcagcaacaagctcttttgtgtttaaggcataaaagaagaattctgcatagaaacatggctcatattcgaaattgctctatagtcattagaagccagagaactgctaagtctcctgcaatgtttttctgctttttgccttccccatatatatggaacttggctacctctgcctgaaatggctgccatcaacacaatgttaaaactgacacgaagtatagagtttcacagatttctacgttttattggtggaagctgatttgcaacatttgctaaatggattagatgaatgtacttctttttgtgagcttacttgcctggattgctttaaaattaacctttgtgcaataccaagaaaatagctctttaaaagaatgtctttgtatgtctcaaggtaaattaaggatttactgaataaggtgttgaccaaatccagaccattttattttatttttttatttatttattttttgagatggagtcttgctttgtcgcccaggctggagtgcagtggcgtgatctcagctcactgcaacctccacctcccgggttcacgccattctcctgcctcagcctcctgagtagctgggactacaggcacctgccaccacgcctggctaacttttttttatattttgagtagaaatggggtttcaccatgttagccaggatggtctcaatctcctgaccttgtgatccgcctgccttggcctcccaaagtgctgggattacaggcgtgagccactgcgcctggccagaccattttagaattgggaaattttagtgagaaaaaatgcactgtaaatatgctttagttttaattcagttgggatgcactacctagcgaaaattgagaaactatatacttctcagagaaatatctgacatctattgtcattccattgctattttttttccccagagacttccataatttaaaataaaatcctagatccagttcttgtttttggcataaatacttaatctattttaaatttataaaatctgagcttctaggatccagctgtgtcaacctttatttagcatatataactataaatcacttattacagatgctaaatagatcaccttttacagatgctgaaatgtttgggatatgtttgttgacaaggtaaatggaaatgagaaactttatacttcagttttcagatatatggatctagatcccaaataaatgattaatcttcattggtttctcaaattcaggttgaaatacaaattaatagcctttattgattttacttttatgagtcattgtagacatctataaatataaaagggcctgtacccaaaggatgccagaatactagtatttttatttatcgtaaacatccacgagtgctgttgcactaccatctatttgttgtaaataaaagtgttgttttcaaagccatctttaaatagttctttaaaaataggtcttttttttatattttggaaaaggcattgtttttaaagtaaagataaaatggtaagtacctaattgtatttactgtaatatcttataacatgcagatgaatgctttataagttaaatatgatgtattttttcatacttctggattatactataattcatatgaaatcttgatattagtccccacacggaaaaagtgaactgcagttgatatttggtgtttaagatagcaccattgtttaaataccgcctatgtactcccaaatgaataaaacataattcttgtcctctgagagcatacaagcttgtgtgatagataaatatgcattaaataattacagctatagattaagaactcgtaaggaatatctcacaaaacctggtaagagttctgacagaagagaactcaatttcagtcattcaacaacaaatagtcactcaactcctgctctttggcaggtacgtcaccaagcactgaggatatagcaataaataagccagacaatattcctgccctcagggaattttcatcttggtgtaagtgacagaaaaggaaatatatgcataatgtaatttcaggtatttaatgctataaataaaactacagcagaacgggggaatagtgttgctatcttaggtagtatggttggggtcaggaaaggtctctgagatagtatttggaacattttgaaagaagtgaggaagcgaaccgcagttgaaagacgctgcgtctttcaactgcggttggcttttgaatgaggatgacaatggaagagatgaagaatgaagctgagaccacatccatggtttctangcccctctatgcagtcatgtatcctgtgtttaatgagctagaacgagnaaatctgtctgcagcccagacantgagagccgctttcatcaaggctgaaaaagaaaatccagtctcacacaagacatcatnatgaaattttagagaaaaa

SEQ ID NO: 281223 - DNA, 3441 bp, Homo sapiens
  misc_feature (3293)..(3293): n is a, c, g, or t
  misc_feature (3341)..(3341): n is a, c, g, or t
  misc_feature (3364)..(3364): n is a, c, g, or t
  misc_feature (3422)..(3422): n is a, c, g, or t
gccggcgtgacgtagtgtctgtgccccgttcttgccccctcagtactagagtctccggcttcgctcacgcgccttgggcataagagtcctctcgttggtcccggaggtggggttgcgctcacaaggggcgaccgtcgccacggtggcggccactgcatcgcgtcccacctccgcggccctgggcgccgtggtgtcgacgggccccgagcctatgacgggccagggccagtcggcgtccgggtcgtcggcgtggagcacggtattccgccacgtccggtatgagaacctgatagcgggcgtgagcggcggcgtcttatccaaccttgcgctgcatccgctcgacctcgtgaagatccgcttcgccgttacaatgccatcaagtcatataaaacagaaggaagagctgaacgtttagaggcaacagaataccttgtctcagctgctgaagctggagccatgaccctctgcattacaaacccattatgggtaacaaaaactcgccttatgttacagtatgatgctgttgttaactccccacaccgacaatataaaggaatgtttgatacacttgtgaaaatatataagtatgaaggtgtgcgtggattatataagggatttgttcctgggctgtttggaacatcgcatggtgcccttcagtttatggcatatgaattgctgaagttgaagtacaaccagcatatcaatagattaccagaagcccagttgagcacagtagaatatatatctgttgcagcactatccaaaatatttgctgtcgcagcaacatacccatatcaagtcgtaagagctcgtcttcaggatcaacacatgttttacagtggtgtaatagatgtaatcacaaagacatggaggaaagaaggcgtcggtggattttacaagggaattgctcctaatttgattagagtgactccagcctgctgtattacctttgtggtatatgaaaacgtctcacattttttacttgaccttagagaaaagagaaagtaagctcaaagaggacaattccagtatatctgcccaaggcagcaacaagctcttttgtgtttaaggcataaaagaagaattctgcatagaaacatggctcatattcgaaattgctctatagtcattagaagccagagaactgctaagtctcctgcaatgtttttctgctttttgccttccccatatatatggaacttggctacctctgcctgaaatggctgccatcaacacaatgttaaaactgacacgaagtatagagtttcacagatttctacgttttattggtggaagctgatttgcaacatttgctaaatggattagatgaatgtacttctttttgtgagcttacttgcctggattgctttaaaattaacctttgtgcaataccaagaaaatagctctttaaaagaatgtctttgtatgtctcaaggtaaattaaggatttactgaataaggtgttgaccaaatccagaccattttattttatttttttatttatttattttttgagatggagtcttgctttgtcgcccaggctggagtgcagtggcgtgatctcagctcactgcaacctccacctcccgggttcacgccattctcctgcctcagcctcctgagtagctgggactacaggcacctgccaccacgcctggctaacttttttttatattttgagtagaaatggggtttcaccatgttagccaggatggtctcaatctcctgaccttgtgatccgcctgccttggcctcccaaagtgctgggattacaggcgtgagccactgcgcctggccagaccattttagaattgggaaattttagtgagaaaaaatgcactgtaaatatgctttagttttaattcagttgggatgcactacctagcgaaaattgagaaactatatacttctcagagaaatatctgacatctattgtcattccattgctattttttttccccagagacttccataatttaaaataaaatcctagatccagttcttgtttttggcataaatacttaatctattttaaatttataaaatctgagcttctaggatccagctgtgtcaacctttatttagcatatataactataaatcacttattacagatgctaaatagatcaccttttacagatgctgaaatgtttgggatatgtttgttgacaaggtaaatggaaatgagaaactttatacttcagttttcagatatatggatctagatcccaaataaatgattaatcttcattggtttctcaaattcaggttgaaatacaaattaatagcctttattgattttacttttatgagtcattgtagacatctataaatataaaagggcctgtacccaaaggatgccagaatactagtatttttatttatcgtaaacatccacgagtgctgttgcactaccatctatttgttgtaaataaaagtgttgttttcaaagccatctttaaatagttctttaaaaataggtcttttttttatattttggaaaaggcattgtttttaaagtaaagataaaatggtaagtacctaattgtatttactgtaatatcttataacatgcagatgaatgctttataagttaaatatgatgtattttttcatacttctggattatactataattcatatgaaatcttgatattagtccccacacggaaaaagtgaactgcagttgatatttggtgtttaagatagcaccattgtttaaataccgcctatgtactcccaaatgaataaaacataattcttgtcctctgagagcatacaagcttgtgtgatagataaatatgcattaaataattacagctatagattaagaactcgtaaggaatatctcacaaaacctggtaagagttctgacagaagagaactcaatttcagtcattcaacaacaaatagtcactcaactcctgctctttggcaggtacgtcaccaagcactgaggatatagcaataaataagccagacaatattcctgccctcagggaattttcatcttggtgtaagtgacagaaaaggaaatatatgcataatgtaatttcaggtatttaatgctataaataaaactacagcagaacgggggaatagtgttgctatcttaggtagtatggttggggtcaggaaaggtctctgagatagtatttggaacattttgaaagaagtgaggaagcgaaccgcagttgaaagacgctgcgtctttcaactgcggttggcttttgaatgaggatgacaatggaagagatgaagaatgaagctgagaccacatccatggtttctangcccctctatgcagtcatgtatcctgtgtttaatgagctagaacgagnaaatctgtctgcagcccagacantgagagccgctttcatcaaggctgaaaaagaaaatccagtctcacacaagacatcatnatgaaattttagagaaaaa

SEQ ID NO: 281224 - DNA, 3446 bp, Homo sapiens
  misc_feature (3298)..(3298): n is a, c, g, or t
  misc_feature (3346)..(3346): n is a, c, g, or t
  misc_feature (3369)..(3369): n is a, c, g, or t
  misc_feature (3427)..(3427): n is a, c, g, or t
gccggcgtgacgtagtgtctgtgccccgttcttgccccctcagtactagagtctccggcttcgctcacgcgccttgggcataagagtcctctcgttggtcccggaggtggggttgcgctcacaaggggcgaccgtcgccacggtggcggccactgcatcgcgtcccacctccgcggccctgggcgccgtggtgtcgacgggccccgagcctatgacgggccagggccagtcggcgtccgggtcgtcggcgtggagcacggtattccgccacgtccggtatgagaacctgatagcgggcgtgagcggcggcgtcttatccaaccttgcgctgcatccgctcgacctcgtgaagatccgcttcgccgtgagtgatggattggaactgagaccgaaatataatggaattttacattgcttgactaccatttggaaacttgatggactacggggactttatcaaggagtaaccccaaatatatggggtgcaggtttatcctggggactctactttttcttttacaatgccatcaagtcatataaaacagaaggaagagctgaacgtttagaggcaacagaataccttgtctcagctgctgaagctggagccatgaccctctgcattacaaacccattatgggtaacaaaaactcgccttatgttacagtatgatgctgttgttaactccccacaccgacaatataaaggaatgtttgatacacttgtgaaaatatataagtatgaaggtgtgcgtggattatataagggatttgttcctgggctgtttggaacatcgcatggtgcccttcagtttatggcatatgaattgctgaagttgaagtacaaccagcatatcaatagattaccagaagcccagttggaaagaaggcgtcggtggattttacaagggaattgctcctaatttgattagagtgactccagcctgctgtattacctttgtggtatatgaaaacgtctcacattttttacttgaccttagagaaaagagaaagtaagctcaaagaggacaattccagtatatctgcccaaggcagcaacaagctcttttgtgtttaaggcataaaagaagaattctgcatagaaacatggctcatattcgaaattgctctatagtcattagaagccagagaactgctaagtctcctgcaatgtttttctgctttttgccttccccatatatatggaacttggctacctctgcctgaaatggctgccatcaacacaatgttaaaactgacacgaagtatagagtttcacagatttctacgttttattggtggaagctgatttgcaacatttgctaaatggattagatgaatgtacttctttttgtgagcttacttgcctggattgctttaaaattaacctttgtgcaataccaagaaaatagctctttaaaagaatgtctttgtatgtctcaaggtaaattaaggatttactgaataaggtgttgaccaaatccagaccattttattttatttttttatttatttattttttgagatggagtcttgctttgtcgcccaggctggagtgcagtggcgtgatctcagctcactgcaacctccacctcccgggttcacgccattctcctgcctcagcctcctgagtagctgggactacaggcacctgccaccacgcctggctaacttttttttatattttgagtagaaatggggtttcaccatgttagccaggatggtctcaatctcctgaccttgtgatccgcctgccttggcctcccaaagtgctgggattacaggcgtgagccactgcgcctggccagaccattttagaattgggaaattttagtgagaaaaaatgcactgtaaatatgctttagttttaattcagttgggatgcactacctagcgaaaattgagaaactatatacttctcagagaaatatctgacatctattgtcattccattgctattttttttccccagagacttccataatttaaaataaaatcctagatccagttcttgtttttggcataaatacttaatctattttaaatttataaaatctgagcttctaggatccagctgtgtcaacctttatttagcatatataactataaatcacttattacagatgctaaatagatcaccttttacagatgctgaaatgtttgggatatgtttgttgacaaggtaaatggaaatgagaaactttatacttcagttttcagatatatggatctagatcccaaataaatgattaatcttcattggtttctcaaattcaggttgaaatacaaattaatagcctttattgattttacttttatgagtcattgtagacatctataaatataaaagggcctgtacccaaaggatgccagaatactagtatttttatttatcgtaaacatccacgagtgctgttgcactaccatctatttgttgtaaataaaagtgttgttttcaaagccatctttaaatagttctttaaaaataggtcttttttttatattttggaaaaggcattgtttttaaagtaaagataaaatggtaagtacctaattgtatttactgtaatatcttataacatgcagatgaatgctttataagttaaatatgatgtattttttcatacttctggattatactataattcatatgaaatcttgatattagtccccacacggaaaaagtgaactgcagttgatatttggtgtttaagatagcaccattgtttaaataccgcctatgtactcccaaatgaataaaacataattcttgtcctctgagagcatacaagcttgtgtgatagataaatatgcattaaataattacagctatagattaagaactcgtaaggaatatctcacaaaacctggtaagagttctgacagaagagaactcaatttcagtcattcaacaacaaatagtcactcaactcctgctctttggcaggtacgtcaccaagcactgaggatatagcaataaataagccagacaatattcctgccctcagggaattttcatcttggtgtaagtgacagaaaaggaaatatatgcataatgtaatttcaggtatttaatgctataaataaaactacagcagaacgggggaatagtgttgctatcttaggtagtatggttggggtcaggaaaggtctctgagatagtatttggaacattttgaaagaagtgaggaagcgaaccgcagttgaaagacgctgcgtctttcaactgcggttggcttttgaatgaggatgacaatggaagagatgaagaatgaagctgagaccacatccatggtttctangcccctctatgcagtcatgtatcctgtgtttaatgagctagaacgagnaaatctgtctgcagcccagacantgagagccgctttcatcaaggctgaaaaagaaaatccagtctcacacaagacatcatnatgaaattttagagaaaaa

SEQ ID NO: 281225 - DNA, 2102 bp, Homo sapiens
  misc_feature (1954)..(1954): n is a, c, g, or t
  misc_feature (2002)..(2002): n is a, c, g, or t
  misc_feature (2025)..(2025): n is a, c, g, or t
  misc_feature (2083)..(2083): n is a, c, g, or t
cttatttttgtatttttagtagagatgaggtttcaccatgttggccaggctggtctcaaaatcctgacctcaggtgatccatgtgtcttggccttccaaagtgctgggattacaggcttgagccactgcacctggcccagtgttttgatatatttttttatttatttattttttgagatggagtcttgctttgtcgcccaggctggagtgcagtggcgtgatctcagctcactgcaacctccacctcccgggttcacgccattctcctgcctcagcctcctgagtagctgggactacaggcacctgccaccacgcctggctaacttttttttatattttgagtagaaatggggtttcaccatgttagccaggatggtctcaatctcctgaccttgtgatccgcctgccttggcctcccaaagtgctgggattacaggcgtgagccactgcgcctggccagaccattttagaattgggaaattttagtgagaaaaaatgcactgtaaatatgctttagttttaattcagttgggatgcactacctagcgaaaattgagaaactatatacttctcagagaaatatctgacatctattgtcattccattgctattttttttccccagagacttccataatttaaaataaaatcctagatccagttcttgtttttggcataaatacttaatctattttaaatttataaaatctgagcttctaggatccagctgtgtcaacctttatttagcatatataactataaatcacttattacagatgctaaatagatcaccttttacagatgctgaaatgtttgggatatgtttgttgacaaggtaaatggaaatgagaaactttatacttcagttttcagatatatggatctagatcccaaataaatgattaatcttcattggtttctcaaattcaggttgaaatacaaattaatagcctttattgattttacttttatgagtcattgtagacatctataaatataaaagggcctgtacccaaaggatgccagaatactagtatttttatttatcgtaaacatccacgagtgctgttgcactaccatctatttgttgtaaataaaagtgttgttttcaaagccatctttaaatagttctttaaaaataggtcttttttttatattttggaaaaggcattgtttttaaagtaaagataaaatggtaagtacctaattgtatttactgtaatatcttataacatgcagatgaatgctttataagttaaatatgatgtattttttcatacttctggattatactataattcatatgaaatcttgatattagtccccacacggaaaaagtgaactgcagttgatatttggtgtttaagatagcaccattgtttaaataccgcctatgtactcccaaatgaataaaacataattcttgtcctctgagagcatacaagcttgtgtgatagataaatatgcattaaataattacagctatagattaagaactcgtaaggaatatctcacaaaacctggtaagagttctgacagaagagaactcaatttcagtcattcaacaacaaatagtcactcaactcctgctctttggcaggtacgtcaccaagcactgaggatatagcaataaataagccagacaatattcctgccctcagggaattttcatcttggtgtaagtgacagaaaaggaaatatatgcataatgtaatttcaggtatttaatgctataaataaaactacagcagaacgggggaatagtgttgctatcttaggtagtatggttggggtcaggaaaggtctctgagatagtatttggaacattttgaaagaagtgaggaagcgaaccgcagttgaaagacgctgcgtctttcaactgcggttggcttttgaatgaggatgacaatggaagagatgaagaatgaagctgagaccacatccatggtttctangcccctctatgcagtcatgtatcctgtgtttaatgagctagaacgagnaaatctgtctgcagcccagacantgagagccgctttcatcaaggctgaaaaagaaaatccagtctcacacaagacatcatnatgaaattttagagaaaaa

SEQ ID NO: 281226 - DNA, 1805 bp, Homo sapiens
  misc_feature (1657)..(1657): n is a, c, g, or t
  misc_feature (1705)..(1705): n is a, c, g, or t
  misc_feature (1728)..(1728): n is a, c, g, or t
  misc_feature (1786)..(1786): n is a, c, g, or t
gggccaggcgcggtggctcttgcctgtaatcccagcactttgggaggccgaggcaggcggatcacgaggtcagagatggtctcaatctcctgaccttgtgatccgcctgccttggcctcccaaagtgctgggattacaggcgtgagccactgcgcctggccagaccattttagaattgggaaattttagtgagaaaaaatgcactgtaaatatgctttagttttaattcagttgggatgcactacctagcgaaaattgagaaactatatacttctcagagaaatatctgacatctattgtcattccattgctattttttttccccagagacttccataatttaaaataaaatcctagatccagttcttgtttttggcataaatacttaatctattttaaatttataaaatctgagcttctaggatccagctgtgtcaacctttatttagcatatataactataaatcacttattacagatgctaaatagatcaccttttacagatgctgaaatgtttgggatatgtttgttgacaaggtaaatggaaatgagaaactttatacttcagttttcagatatatggatctagatcccaaataaatgattaatcttcattggtttctcaaattcaggttgaaatacaaattaatagcctttattgattttacttttatgagtcattgtagacatctataaatataaaagggcctgtacccaaaggatgccagaatactagtatttttatttatcgtaaacatccacgagtgctgttgcactaccatctatttgttgtaaataaaagtgttgttttcaaagccatctttaaatagttctttaaaaataggtcttttttttatattttggaaaaggcattgtttttaaagtaaagataaaatggtaagtacctaattgtatttactgtaatatcttataacatgcagatgaatgctttataagttaaatatgatgtattttttcatacttctggattatactataattcatatgaaatcttgatattagtccccacacggaaaaagtgaactgcagttgatatttggtgtttaagatagcaccattgtttaaataccgcctatgtactcccaaatgaataaaacataattcttgtcctctgagagcatacaagcttgtgtgatagataaatatgcattaaataattacagctatagattaagaactcgtaaggaatatctcacaaaacctggtaagagttctgacagaagagaactcaatttcagtcattcaacaacaaatagtcactcaactcctgctctttggcaggtacgtcaccaagcactgaggatatagcaataaataagccagacaatattcctgccctcagggaattttcatcttggtgtaagtgacagaaaaggaaatatatgcataatgtaatttcaggtatttaatgctataaataaaactacagcagaacgggggaatagtgttgctatcttaggtagtatggttggggtcaggaaaggtctctgagatagtatttggaacattttgaaagaagtgaggaagcgaaccgcagttgaaagacgctgcgtctttcaactgcggttggcttttgaatgaggatgacaatggaagagatgaagaatgaagctgagaccacatccatggtttctangcccctctatgcagtcatgtatcctgtgtttaatgagctagaacgagnaaatctgtctgcagcccagacantgagagccgctttcatcaaggctgaaaaagaaaatccagtctcacacaagacatcatnatgaaattttagagaaaaa

SEQ ID NO: 281227 - DNA, 1812 bp, Homo sapiens
  misc_feature (1664)..(1664): n is a, c, g, or t
  misc_feature (1712)..(1712): n is a, c, g, or t
  misc_feature (1735)..(1735): n is a, c, g, or t
  misc_feature (1793)..(1793): n is a, c, g, or t
cccacaaaaaaaaattattaatatagtgtagtctcagtgtagtggtagcacgtgattgttactgtatggatgcgtgttgtagatcttatgaaagtgtggtcttcgaatagtagtggtcccgttttgtgcctctcatggtgcgatgaccgctagtgtggggggatacaccgtgcgggccgctcccattgaggtgggactttttgtgagacaatgccccgaaataggcttagtgtattccgttggtatccttacctagcgaaaattgagaaactatatacttctcagagaaatatctgacatctattgtcattccattgctattttttttccccagagacttccataatttaaaataaaatcctagatccagttcttgtttttggcataaatacttaatctattttaaatttataaaatctgagcttctaggatccagctgtgtcaacctttatttagcatatataactataaatcacttattacagatgctaaatagatcaccttttacagatgctgaaatgtttgggatatgtttgttgacaaggtaaatggaaatgagaaactttatacttcagttttcagatatatggatctagatcccaaataaatgattaatcttcattggtttctcaaattcaggttgaaatacaaattaatagcctttattgattttacttttatgagtcattgtagacatctataaatataaaagggcctgtacccaaaggatgccagaatactagtatttttatttatcgtaaacatccacgagtgctgttgcactaccatctatttgttgtaaataaaagtgttgttttcaaagccatctttaaatagttctttaaaaataggtcttttttttatattttggaaaaggcattgtttttaaagtaaagataaaatggtaagtacctaattgtatttactgtaatatcttataacatgcagatgaatgctttataagttaaatatgatgtattttttcatacttctggattatactataattcatatgaaatcttgatattagtccccacacggaaaaagtgaactgcagttgatatttggtgtttaagatagcaccattgtttaaataccgcctatgtactcccaaatgaataaaacataattcttgtcctctgagagcatacaagcttgtgtgatagataaatatgcattaaataattacagctatagattaagaactcgtaaggaatatctcacaaaacctggtaagagttctgacagaagagaactcaatttcagtcattcaacaacaaatagtcactcaactcctgctctttggcaggtacgtcaccaagcactgaggatatagcaataaataagccagacaatattcctgccctcagggaattttcatcttggtgtaagtgacagaaaaggaaatatatgcataatgtaatttcaggtatttaatgctataaataaaactacagcagaacgggggaatagtgttgctatcttaggtagtatggttggggtcaggaaaggtctctgagatagtatttggaacattttgaaagaagtgaggaagcgaaccgcagttgaaagacgctgcgtctttcaactgcggttggcttttgaatgaggatgacaatggaagagatgaagaatgaagctgagaccacatccatggtttctangcccctctatgcagtcatgtatcctgtgtttaatgagctagaacgagnaaatctgtctgcagcccagacantgagagccgctttcatcaaggctgaaaaagaaaatccagtctcacacaagacatcatnatgaaattttagagaaaaa

SEQ ID NO: 281228 - DNA, 1005 bp, Homo sapiens
  misc_feature (857)..(857): n is a, c, g, or t
  misc_feature (905)..(905): n is a, c, g, or t
  misc_feature (928)..(928): n is a, c, g, or t
  misc_feature (986)..(986): n is a, c, g, or t
gctgccgctactactactaaattggcggccgtcagacaaaataggtcttttttttatattttggaaaaggcattgtttttaaagtaaagataaaatggtaagtacctaattgtatttactgtaatatcttataacatgcagatgaatgctttataagttaaatatgatgtattttttcatacttctggattatactataattcatatgaaatcttgatattagtccccacacggaaaaagtgaactgcagttgatatttggtgtttaagatagcaccattgtttaaataccgcctatgtactcccaaatgaataaaacataattcttgtcctctgagagcatacaagcttgtgtgatagataaatatgcattaaataattacagctatagattaagaactcgtaaggaatatctcacaaaacctggtaagagttctgacagaagagaactcaatttcagtcattcaacaacaaatagtcactcaactcctgctctttggcaggtacgtcaccaagcactgaggatatagcaataaataagccagacaatattcctgccctcagggaattttcatcttggtgtaagtgacagaaaaggaaatatatgcataatgtaatttcaggtatttaatgctataaataaaactacagcagaacgggggaatagtgttgctatcttaggtagtatggttggggtcaggaaaggtctctgagatagtatttggaacattttgaaagaagtgaggaagcgaaccgcagttgaaagacgctgcgtctttcaactgcggttggcttttgaatgaggatgacaatggaagagatgaagaatgaagctgagaccacatccatggtttctangcccctctatgcagtcatgtatcctgtgtttaatgagctagaacgagnaaatctgtctgcagcccagacantgagagccgctttcatcaaggctgaaaaagaaaatccagtctcacacaagacatcatnatgaaattttagagaaaaa

SEQ ID NO: 281229 - DNA, 510 bp, Homo sapiens
ttatttttatgttttttcgtcactttctgccttattctttcagaatacctatgctcagttcattgatttaccattacctttagtttcttaactttccagaatttagtttcccactcacacctcaagtcttgacagtgtgggtcttctttatatgtatactgtttaaagaaaaactaatatgtgaacatccaaacctttaaaaataaagtagaagagaatactacccatgtctttatattacaagtttttaaccccatattttaaaaatgtgatttgtgcaaaattaaatgaatttgcttaaagtgctgtaatgagagagaagagaaagtattttacttaaatatattgttcttcaaacgtatgttgttttgctttttaaaaatcattcccttgtagggatttgttcctgggctgtttggaacatcgcatggtgcccttcagtttatggcatatgaattgctgaagttgaagtacaaccagcatatcaatagattaccagaagcccagttg

SEQ ID NO: 281230 - DNA, 412 bp, Homo sapiens
atataatgtcatgaagttttatgatgcatgcacaaataattatgttattgacaagtaatctttatcgagtatttactaggagcaaggcagtgaactatgctttagatgcattatctcatttattatcctgtaaatctattcacaggaacaatcctgtgagtttatgatatctgctatacagatgaggataacagaagttgactaacttgcccaagtcacaagtttgtaaagatggatctgggatttaaacccaggtaatctaactctggaaccctctggcacttaacccctcaccgtattacctctataagtacctgttatacaatggtttgaacattggaagaattttagacttgcctgcaggtgcaggcctgtatgacttgctgtctgtcttcagtagcattttatctag

SEQ ID NO: 281231 - DNA, 3592 bp, Homo sapiens
  misc_feature (3444)..(3444): n is a, c, g, or t
  misc_feature (3492)..(3492): n is a, c, g, or t
  misc_feature (3515)..(3515): n is a, c, g, or t
  misc_feature (3573)..(3573): n is a, c, g, or t
gccggcgtgacgtagtgtctgtgccccgttcttgccccctcagtactagagtctccggcttcgctcacgcgccttgggcataagagtcctctcgttggtcccggaggtggggttgcgctcacaaggggcgaccgtcgccacggtggcggccactgcatcgcgtcccacctccgcggccctgggcgccgtggtgtcgacgggccccgagcctatgacgggccagggccagtcggcgtccgggtcgtcggcgtggagcacggtattccgccacgtccggtatgagaacctgatagcgggcgtgagcggcggcgtcttatccaaccttgcgctgcatccgctcgacctcgtgaagatccgcttcgccgtgagtgatggattggaactgagaccgaaatataatggaattttacattgcttgactaccatttggaaacttgatggactacggggactttatcaaggagtaaccccaaatatatggggtgcaggtttatcctggggactctactttttcttttacaatgccatcaagtcatataaaacagaaggaagagctgaacgtttagaggcaacagaataccttgtctcagctgctgaagctggagccatgaccctctgcattacaaacccattatgggtaacaaaaactcgccttatgttacagtatgatgctgttgttaactccccacaccgacaatataaaggaatgtttgatacacttgtgaaaatatataagtatgaaggtgtgcgtggattatataagggatttgttcctgggctgtttggaacatcgcatggtgcccttcagtttatggcatatgaattgctgaagttgaagtacaaccagcatatcaatagattaccagaagcccagttgagcacagtagaatatatatctgttgcagcactatccaaaatatttgctgtcgcagcaacatacccatatcaagtcgtaagagctcgtcttcaggatcaacacatgttttacagtggtgtaatagatgtaatcacaaagacatggaggaaagaaggcgtcggtggattttacaagggaattgctcctaatttgattagagtgactccagcctgctgtattacctttgtggtatatgaaaacgtctcacattttttacttgaccttagagaaaagagaaagtaagctcaaagaggacaattccagtatatctgcccaaggcagcaacaagctcttttgtgtttaaggcataaaagaagaattctgcatagaaacatggctcatattcgaaattgctctatagtcattagaagccagagaactgctaagtctcctgcaatgtttttctgctttttgccttccccatatatatggaacttggctacctctgcctgaaatggctgccatcaacacaatgttaaaactgacacgaagtatagagtttcacagatttctacgttttattggtggaagctgatttgcaacatttgctaaatggattagatgaatgtacttctttttgtgagcttacttgcctggattgctttaaaattaacctttgtgcaataccaagaaaatagctctttaaaagaatgtctttgtatgtctcaaggtaaattaaggatttactgaataaggtgttgaccaaatccagaccattttattttatttttttatttatttattttttgagatggagtcttgctttgtcgcccaggctggagtgcagtggcgtgatctcagctcactgcaacctccacctcccgggttcacgccattctcctgcctcagcctcctgagtagctgggactacaggcacctgccaccacgcctggctaacttttttttatattttgagtagaaatggggtttcaccatgttagccaggatggtctcaatctcctgaccttgtgatccgcctgccttggcctcccaaagtgctgggattacaggcgtgagccactgcgcctggccagaccattttagaattgggaaattttagtgagaaaaaatgcactgtaaatatgctttagttttaattcagttgggatgcactacctagcgaaaattgagaaactatatacttctcagagaaatatctgacatctattgtcattccattgctattttttttccccagagacttccataatttaaaataaaatcctagatccagttcttgtttttggcataaatacttaatctattttaaatttataaaatctgagcttctaggatccagctgtgtcaacctttatttagcatatataactataaatcacttattacagatgctaaatagatcaccttttacagatgctgaaatgtttgggatatgtttgttgacaaggtaaatggaaatgagaaactttatacttcagttttcagatatatggatctagatcccaaataaatgattaatcttcattggtttctcaaattcaggttgaaatacaaattaatagcctttattgattttacttttatgagtcattgtagacatctataaatataaaagggcctgtacccaaaggatgccagaatactagtatttttatttatcgtaaacatccacgagtgctgttgcactaccatctatttgttgtaaataaaagtgttgttttcaaagccatctttaaatagttctttaaaaataggtcttttttttatattttggaaaaggcattgtttttaaagtaaagataaaatggtaagtacctaattgtatttactgtaatatcttataacatgcagatgaatgctttataagttaaatatgatgtattttttcatacttctggattatactataattcatatgaaatcttgatattagtccccacacggaaaaagtgaactgcagttgatatttggtgtttaagatagcaccattgtttaaataccgcctatgtactcccaaatgaataaaacataattcttgtcctctgagagcatacaagcttgtgtgatagataaatatgcattaaataattacagctatagattaagaactcgtaaggaatatctcacaaaacctggtaagagttctgacagaagagaactcaatttcagtcattcaacaacaaatagtcactcaactcctgctctttggcaggtacgtcaccaagcactgaggatatagcaataaataagccagacaatattcctgccctcagggaattttcatcttggtgtaagtgacagaaaaggaaatatatgcataatgtaatttcaggtatttaatgctataaataaaactacagcagaacgggggaatagtgttgctatcttaggtagtatggttggggtcaggaaaggtctctgagatagtatttggaacattttgaaagaagtgaggaagcgaaccgcagttgaaagacgctgcgtctttcaactgcggttggcttttgaatgaggatgacaatggaagagatgaagaatgaagctgagaccacatccatggtttctangcccctctatgcagtcatgtatcctgtgtttaatgagctagaacgagnaaatctgtctgcagcccagacantgagagccgctttcatcaaggctgaaaaagaaaatccagtctcacacaagacatcatnatgaaattttagagaaaaa

SEQ ID NO: 281232 - DNA, 3287 bp, Homo sapiens
  misc_feature (3139)..(3139): n is a, c, g, or t
  misc_feature (3187)..(3187): n is a, c, g, or t
  misc_feature (3210)..(3210): n is a, c, g, or t
  misc_feature (3268)..(3268): n is a, c, g, or t
ggacgcgtgggtccggacgcgtgggtcgacgctcgacctcggtgaagatccgcttcgccgtgagtgatggattggaactgagaccgaaatataatggaattttacattgcttgactaccatttggaaacttgatggactacggggactttatcaaggagtaaccccaaatatatggggtgcaggtttatcctggggactctactttttcttttacaatgccatcaagtcatataaaacagaaggaagagctgaacgtttagaggcaacagaataccttgtctcagctgctgaagctggagccatgaccctctgcattacaaacccattatgggtaacaaaaactcgccttatgttacagtatgatgctgttgttaactccccacaccgacaatataaaggaatgtttgatacacttgtgaaaatatataagtatgaaggtgtgcgtggattatataagggatttgttcctgggctgtttggaacatcgcatggtgcccttcagtttatggcatatgaattgctgaagttgaagtacaaccagcatatcaatagattaccagaagcccagttgagcacagtagaatatatatctgttgcagcactatccaaaatatttgctgtcgcagcaacatacccatatcaagtcgtaagagctcgtcttcaggatcaacacatgttttacagtggtgtaatagatgtaatcacaaagacatggaggaaagaaggcgtcggtggattttacaagggaattgctcctaatttgattagagtgactccagcctgctgtattacctttgtggtatatgaaaacgtctcacattttttacttgaccttagagaaaagagaaagtaagctcaaagaggacaattccagtatatctgcccaaggcagcaacaagctcttttgtgtttaaggcataaaagaagaattctgcatagaaacatggctcatattcgaaattgctctatagtcattagaagccagagaactgctaagtctcctgcaatgtttttctgctttttgccttccccatatatatggaacttggctacctctgcctgaaatggctgccatcaacacaatgttaaaactgacacgaagtatagagtttcacagatttctacgttttattggtggaagctgatttgcaacatttgctaaatggattagatgaatgtacttctttttgtgagcttacttgcctggattgctttaaaattaacctttgtgcaataccaagaaaatagctctttaaaagaatgtctttgtatgtctcaaggtaaattaaggatttactgaataaggtgttgaccaaatccagaccattttattttatttttttatttatttattttttgagatggagtcttgctttgtcgcccaggctggagtgcagtggcgtgatctcagctcactgcaacctccacctcccgggttcacgccattctcctgcctcagcctcctgagtagctgggactacaggcacctgccaccacgcctggctaacttttttttatattttgagtagaaatggggtttcaccatgttagccaggatggtctcaatctcctgaccttgtgatccgcctgccttggcctcccaaagtgctgggattacaggcgtgagccactgcgcctggccagaccattttagaattgggaaattttagtgagaaaaaatgcactgtaaatatgctttagttttaattcagttgggatgcactacctagcgaaaattgagaaactatatacttctcagagaaatatctgacatctattgtcattccattgctattttttttccccagagacttccataatttaaaataaaatcctagatccagttcttgtttttggcataaatacttaatctattttaaatttataaaatctgagcttctaggatccagctgtgtcaacctttatttagcatatataactataaatcacttattacagatgctaaatagatcaccttttacagatgctgaaatgtttgggatatgtttgttgacaaggtaaatggaaatgagaaactttatacttcagttttcagatatatggatctagatcccaaataaatgattaatcttcattggtttctcaaattcaggttgaaatacaaattaatagcctttattgattttacttttatgagtcattgtagacatctataaatataaaagggcctgtacccaaaggatgccagaatactagtatttttatttatcgtaaacatccacgagtgctgttgcactaccatctatttgttgtaaataaaagtgttgttttcaaagccatctttaaatagttctttaaaaataggtcttttttttatattttggaaaaggcattgtttttaaagtaaagataaaatggtaagtacctaattgtatttactgtaatatcttataacatgcagatgaatgctttataagttaaatatgatgtattttttcatacttctggattatactataattcatatgaaatcttgatattagtccccacacggaaaaagtgaactgcagttgatatttggtgtttaagatagcaccattgtttaaataccgcctatgtactcccaaatgaataaaacataattcttgtcctctgagagcatacaagcttgtgtgatagataaatatgcattaaataattacagctatagattaagaactcgtaaggaatatctcacaaaacctggtaagagttctgacagaagagaactcaatttcagtcattcaacaacaaatagtcactcaactcctgctctttggcaggtacgtcaccaagcactgaggatatagcaataaataagccagacaatattcctgccctcagggaattttcatcttggtgtaagtgacagaaaaggaaatatatgcataatgtaatttcaggtatttaatgctataaataaaactacagcagaacgggggaatagtgttgctatcttaggtagtatggttggggtcaggaaaggtctctgagatagtatttggaacattttgaaagaagtgaggaagcgaaccgcagttgaaagacgctgcgtctttcaactgcggttggcttttgaatgaggatgacaatggaagagatgaagaatgaagctgagaccacatccatggtttctangcccctctatgcagtcatgtatcctgtgtttaatgagctagaacgagnaaatctgtctgcagcccagacantgagagccgctttcatcaaggctgaaaaagaaaatccagtctcacacaagacatcatnatgaaattttagagaaaaa

SEQ ID NO: 281233 - DNA, 3538 bp, Homo sapiens
  misc_feature (3390)..(3390): n is a, c, g, or t
  misc_feature (3438)..(3438): n is a, c, g, or t
  misc_feature (3461)..(3461): n is a, c, g, or t
  misc_feature (3519)..(3519): n is a, c, g, or t
gccggcgtgacgtagtgtctgtgccccgttcttgccccctcagtactagagtctccggcttcgctcacgcgccttgggcataagagtcctctcgttggtcccggaggtggggttgcgctcacaaggggcgaccgtcgccacggtggcggccactgcatcgcgtcccacctccgcggccctgggcgccgtggtgtcgacgggccccgagcctatgacgggccagggccagtcggcgtccgggtcgtcggcgtggagcacggtattccgccacgtccggtatgagaacctgatagcgggcgtgagcggcggcgtcttatccaaccttgcgctgcatccgctcgacctcgtgaagatccgcttcgccgtgagtgatggattggaactgagaccgaaatataatggaattttacattgcttgactaccatttggaaacttgatggactacggggactttatcaaggagtaaccccaaatatatggggtgcaggtttatcctggggactctactttttcttttacaatgccatcaagtcatataaaacagaaggaagagctgaacgtttagaggcaacagaataccttgtctcagctgctgaagctggagccatgaccctctgcattacaaacccattatgggtaacaaaaactcgccttatgttacagtatgatgctgttgttaactccccacaccgacaatataaaggaatgtttgatacacttgtgaaaatatataagtatgaaggtgtgcgtggattatataagggatttgttcctgggctgtttggaacatcgcatggtgcccttcagtttatggcatatgaattgctgaagttgaagtacaaccagcatatcaatagattaccagaagcccagttgagcacagtagaatatatatctgttgcagcactatccaaaatatttgctgtcgcagcaacatacccatatcaagtcgtaagagctcgtcttcaggatcaacacatgttttacagtggtgtaatagatgtaatcacaaagacatggaggaaagaaggcgtcggtggattttacaagggaattgctcctaatttgattagagtgactccagcctgctgtattacctttgtggtatatgaaaacgtctcacattttttacttgaccttagagaaaagagaaagtaagctcaaagaggacaattccagtatatctgcccaaggcagcaacaagctcttttgtgtttaaggcataaaagaagaattctgcatagaaacatggctcatattcgaaattgctctatagtcattagaagccagagaactgctaagtctcctgcaatgtttttctgctttttgccttccccatatatatggaacttggctacctctgcctgaaatggctgccatcaacacaatgttaaaactgacacgaagtatagagtttcacagatttctacgttttattggtggaagctgatttgcaacatttgctaaatggattagatgaatgtacttctttttgtgagcttacttgcctggattgctttaaaattaacctttgtgcaataccaagaaaatagctctttttgaccaaatccagaccattttattttatttttttatttatttattttttgagatggagtcttgctttgtcgcccaggctggagtgcagtggcgtgatctcagctcactgcaacctccacctcccgggttcacgccattctcctgcctcagcctcctgagtagctgggactacaggcacctgccaccacgcctggctaacttttttttatattttgagtagaaatggggtttcaccatgttagccaggatggtctcaatctcctgaccttgtgatccgcctgccttggcctcccaaagtgctgggattacaggcgtgagccactgcgcctggccagaccattttagaattgggaaattttagtgagaaaaaatgcactgtaaatatgctttagttttaattcagttgggatgcactacctagcgaaaattgagaaactatatacttctcagagaaatatctgacatctattgtcattccattgctattttttttccccagagacttccataatttaaaataaaatcctagatccagttcttgtttttggcataaatacttaatctattttaaatttataaaatctgagcttctaggatccagctgtgtcaacctttatttagcatatataactataaatcacttattacagatgctaaatagatcaccttttacagatgctgaaatgtttgggatatgtttgttgacaaggtaaatggaaatgagaaactttatacttcagttttcagatatatggatctagatcccaaataaatgattaatcttcattggtttctcaaattcaggttgaaatacaaattaatagcctttattgattttacttttatgagtcattgtagacatctataaatataaaagggcctgtacccaaaggatgccagaatactagtatttttatttatcgtaaacatccacgagtgctgttgcactaccatctatttgttgtaaataaaagtgttgttttcaaagccatctttaaatagttctttaaaaataggtcttttttttatattttggaaaaggcattgtttttaaagtaaagataaaatggtaagtacctaattgtatttactgtaatatcttataacatgcagatgaatgctttataagttaaatatgatgtattttttcatacttctggattatactataattcatatgaaatcttgatattagtccccacacggaaaaagtgaactgcagttgatatttggtgtttaagatagcaccattgtttaaataccgcctatgtactcccaaatgaataaaacataattcttgtcctctgagagcatacaagcttgtgtgatagataaatatgcattaaataattacagctatagattaagaactcgtaaggaatatctcacaaaacctggtaagagttctgacagaagagaactcaatttcagtcattcaacaacaaatagtcactcaactcctgctctttggcaggtacgtcaccaagcactgaggatatagcaataaataagccagacaatattcctgccctcagggaattttcatcttggtgtaagtgacagaaaaggaaatatatgcataatgtaatttcaggtatttaatgctataaataaaactacagcagaacgggggaatagtgttgctatcttaggtagtatggttggggtcaggaaaggtctctgagatagtatttggaacattttgaaagaagtgaggaagcgaaccgcagttgaaagacgctgcgtctttcaactgcggttggcttttgaatgaggatgacaatggaagagatgaagaatgaagctgagaccacatccatggtttctangcccctctatgcagtcatgtatcctgtgtttaatgagctagaacgagnaaatctgtctgcagcccagacantgagagccgctttcatcaaggctgaaaaagaaaatccagtctcacacaagacatcatnatgaaattttagagaaaaa

SEQ ID NO: 281234 - DNA, 1079 bp, Homo sapiens
gcggccgcggaggaggtgcggccccaaggggaggaggtgcccgctcaccgcagaccgcccgcggcagaggccgccccggtcgcgccgcggcgggagcggccggtggaggctgcgcggccgagggggagggccgggggagcggacgtcgcctctgctggtctcccacctcccgccgccccccgcccgcaggctcccaagccttagtcggcgccgagcatcccgctgccccggaccctcccgcgggcgcgcaccaggctcaactcaggctcaggactgcaggtagacatctccactgcccaggaatcactgagcgtgcagacagcacagcctcctctgaaggccggccataccagagtcctgcctcggcatgggcctcaccattgaggcagctccactgtctgtgctggtctgagggtgctgcctgtcatgggggcagccatctcccagggggccctcatcgccatcgtctgcaacggtctcgtgggcttcttgctgctgctgctctgggtcatcctctgctgggcctgccattctcgctctgccgacgttgactctctctctgaatccagtcccaactccagccctggcccctgtcctgagaaggccccaccaccccagaagcccagccatgaaggcagctacctgctgcagccctgaaggcccctggcctagcctggagcccaggacctaagtccacctcacctagagcctggaattaggatcccagagttcagccagcctggggtccagaactcaagagtccgcctgcttggagctggacccagcggcccagagtctagccagcttggctccaataggagctcagtggccctaaggagatgggcctggggtgggggcttatgagttggtgctagagccagggccatctggactatgctccatcccaagggccaagggtcaggggccgggtccactctttccctaggctgagcacctctaggccctctaggttggggaagcaaactggaacccatggcaataataggagggtgtccaggctgggcccctcccctggtcctcccagtgtttgctggataataaatggaactatggctcta

SEQ ID NO: 281235 - DNA, 418 bp, Homo sapiens
ggtgcccgctcaccgcagaccgcccgcggcagaggccgccccggtcgcgccgcggcgggagcggccggtggaggctgcgcggccgagggggagggccgggggagcggacgtcgcctctgctggtctcccacctcccgccgccccccgcccgcaggctcccaagccttagtcggcgccgagcatcccgctgccccggaccctcccgcgggcgcgcaccaggctcaactcaggtaagaagggcctcccgccacgggcacgggggccaagaacacgcgacccgaagatggagataaagagacagagacacactgccgcggagagagacgaacacaaagacagagacacaggaaccaccgaaaagaccccacggagaaggggatagggacacgtccatgggaacagagggggatacagcctg

SEQ ID NO: 281236 - DNA, 897 bp, Homo sapiens
gcggccgcggaggaggtgcggccccaaggggaggaggtgcccgctcaccgcagaccgcccgcggcagaggccgccccggtcgcgccgcggcgggagcggccggtggaggctgcgcggccgagggggagggccgggggagcggacgtcgcctctgctggtctcccacctcccgccgccccccgcccgcaggctcccaagccttagtcggcgccgagcatcccgctgccccggaccctcccgcgggcgcgcaccaggctcaactcaggctcaggactgcaggtagacatctccactgcccaggaatcactgagcgtgcagacagcacagcctcctctgaaggccggccataccagagtcctgcctcggcatgggcctcaccattgaggcagctccactgtctgtgctggtctgagggtgctgcctgtcatgggggcagccatctcccagggggccctcatcgccatcgtctgcaacggtctcgtgggcttcttgctgctgctgctctgggtcatcctctgctgggcctgccattctcgctctgccgacgttgactctctctctgaatccaaactcaagagtccgcctgcttggagctggacccagcggcccagagtctagccagcttggctccaataggagctcagtggccctaaggagatgggcctggggtgggggcttatgagttggtgctagagccagggccatctggactatgctccatcccaagggccaagggtcaggggccgggtccactctttccctaggctgagcacctctaggccctctaggttggggaagcaaactggaacccatggcaataataggagggtgtccaggctgggcccctcccctggtcctcccagtgtttgctggataataaatggaactatggctcta

SEQ ID NO: 281237 - DNA, 690 bp, Homo sapiens
catgccatcccgttgtgtgcagctgcagcggattcctctgagcgctgtctatcgcatctgcctgggcaagttcaccttccctgggatgtccctggacaagagacaaggagaaggccttaggatctactgggggagtccggaggagcagtctcttctgtcccgctggaacccatggtccactgaagttccttatgctactttcactgagcatcctatgaaatacaccagtgagaaattccttgaaatttgcaagttgtctgggttcatgtctaagcttgttccagctatccagaatgcccacaagaattcaactggatctggaagaggaaagaaactgatggtgttaactgaacccattttgattgagacctacacagggctgatgtcattcattggaaaccgcaacaaacttggctattcccttgcccgtgggagtattggtttttgagagtctttttggtaccataagcatatcatccacagatacgtcactttgaaaattccagtttgacccacgctatttttggactgaaacaattaattatttttaaatgacgctttatgatttagaaatttagtatttccgaaaatttaaaagcttgattggactgatagatacacactttagacctcatacaagaataatcaaattttcttaaaactagaaaataaatgctgctgagcctatca

SEQ ID NO: 281238 - DNA, 742 bp, Homo sapiens
catgccatcccgttgtgtgcagctgcagcggattcctctgagcgctgtctatcgcatctgcctgggcaagttcaccttccctgggatgtccctggacaagagacaaggagaaggccttaggatctactgggggagtccggaggagcagtctcttctgtcccgctggaacccatggtccactgaagttccttatgctactttcactgagcatcctatgaaatacaccagtgagaaattccttgaaatttgcaagttgtctgggttcatgtctaagcttgttccagctatccagaatgcccacaagaattcaactggatctggaagaggaaagaaactgatggtgttaactgaacccattttgattgagacctacacagggctgatgtcattcattggaaaccgcaacaaacttggctattcccttgcccgtgggagtattggtttttgagagtctttttggtaccataagcatatcatccacagatacgtcactttgaaaattccagtttgacccacgctatttttggactgaaacaattaattatttttaaatgacgctttatgatttagaaatttagtatttccgaaaatttaaaagcttgattggactgatagatacacactttagacctcatacaagaataatcaaattttcttaaaactagaaaataaatgctgctgagcctatcacgatgcggctgtcctttttttcatatctcccaccgacccatatatctagaat

SEQ ID NO: 281239 - DNA, 749 bp, Homo sapiens
catgccatcccgttgtgtgcagctgcagcggattcctctgagcgctgtctatcgcatctgcctgggcaagttcaccttccctgggatgtccctggacaagagacaaggagaaggccttaggatctactgggggagtccggaggagcagtctcttctgtcccgctggaacccatggtccactgaagttccttatgctactttcactgagcatcctatgaaatacaccagtgagaaattccttgaaatttgcaagttgtctgggttcatgtctaagcttgttccagctatccagaatgcccacaagaattcaactggatctggaagaggaaagaaactgatggtgttaactgaacccattttgattgagacctacacagggctgatgtcattcattggaaaccgcaacaaacttggctattcccttgcccgtgggagtattggtttttgagagtctttttggtaccataagcatatcatccacagatacgtcactttgaaaattccagtttgacccacgctatttttggactgaaacaattaattatttttaaatgacgctttatgatttagaaatttagtatttccgaaaatttaaaagcttgattggactgatagatacacactttagacctcatacaagaataatcaaattttcttaaaactagaaaataaatgctgctgagcctatcatccccgatgcggccgaacactctctaacataaatctttttaaaaattctgccaatcacc

SEQ ID NO: 281240 - DNA, 749 bp, Homo sapiens
catgccatcccgttgtgtgcagctgcagcggattcctctgagcgctgtctatcgcatctgcctgggcaagttcaccttccctgggatgtccctggacaagagacaaggagaaggccttaggatctactgggggagtccggaggagcagtctcttctgtcccgctggaacccatggtccactgaagttccttatgctactttcactgagcatcctatgaaatacaccagtgagaaattccttgaaatttgcaagttgtctgggttcatgtctaagcttgttccagctatccagaatgcccacaagaattcaactggatctggaagaggaaagaaactgatggtgttaactgaacccattttgattgagacctacacagggctgatgtcattcattggaaaccgcaacaaacttggctattcccttgcccgtgggagtattggtttttgagagtctttttggtaccataagcatatcatccacagatacgtcactttgaaaattccagtttgacccacgctatttttggactgaaacaattaattatttttaaatgacgctttatgatttagaaatttagtatttccgaaaatttaaaagcttgattggactgatagatacacactttagacctcatacaagaataatcaaattttcttaaaactagaaaataaatgctgctgagcctatcaacgggcagcgtcaaatttttccttttttctttaatctttttatagtgatagaggggggg

SEQ ID NO: 281241 - DNA, 118 bp, Homo sapiens
agaaattccttgaaatttgcaaggtaggaggcatcttgggtattactctcagattagctttgttgctggagctatgtgcttctagggacgtgtactcctaaacaaaacaaaataaaat

SEQ ID NO: 281242 - DNA, 736 bp, Homo sapiens
  misc_feature (716)..(717): n is a, c, g, or t
catgccatcccgttgtgtgcagctgcagcggattcctctgagcgctgtctatcgcatctgcctgggcaagttcaccttccctgggatgtccctggacaagagacaaggagaaggccttaggatctactgggggagtccggaggagcagtctcttctgtcccgctggaacccatggtccactgaagttccttatgctactttcactgagcatcctatgaaatacaccagtgagaaattccttgaaatttgcaagttgtctgggttcatgtctaagcttgttccagctatccagaatgcccacaagaattcaactggatctggaagaggaaagaaactgatggtgttaactgaacccattttgattgagacctacacagggctgatgtcattcattggaaaccgcaacaaacttggctattcccttgcccgtgggagtattggtttttgagagtctttttggtaccataagcatatcatccacagatacgtcactttgaaaattccagtttgacccacgctatttttggactgaaacaattaattatttttaaatgacgctttatgatttagaaatttagtatttccgaaaatttaaaagcttgattggactgatagatacacactttagacctcatacaagaataatcaaattttcttaaaactagaaaataaatgctgctgagcctatcaaaaaaaaaagggaaaaaaagaaaaanngatggcctcgttggcctca

SEQ ID NO: 281243 - DNA, 718 bp, Homo sapiens
catgccatcccgttgtgtgcagctgcagcggattcctctgagcgctgtctatcgcatctgcctgggcaagttcaccttccctgggatgtccctggacaagagacaaggagaaggccttaggatctactgggggagtccggaggagcagtctcttctgtcccgctggaacccatggtccactgaagttccttatgctactttcactgagcatcctatgaaatacaccagtgagaaattccttgaaatttgcaagttgtctgggttcatgtctaagcttgttccagctatccagaatgcccacaagaattcaactggatctggaagaggaaagaaactgatggtgttaactgaacccattttgattgagacctacacagggctgatgtcattcattggaaaccgcaacaaacttggctattcccttgcccgtgggagtattggtttttgagagtctttttggtaccataagcatatcatccacagatacgtcactttgaaaattccagtttgacccacgctatttttggactgaaacaattaattatttttaaatgacgctttatgatttagaaatttagtatttccgaaaatttaaaagcttgattggactgatagatacacactttagacctcatacaagaataatcaaattttcttaaaactagaaaataaatgctgctgagcctatcaagtcggccgaaagtcccctctcgtccat

SEQ ID NO: 281244 - DNA, 871 bp, Homo sapiens
catgccatcccgttgtgtgcagctgcagcggattcctctgagcgctgtctatcgcatctgcctgggcaagttcaccttccctgggatgtccctggacaagagacaaggagaaggccttaggatctactgggggagtccggaggagcagtctcttctgtcccgctggaacccatggtccactgaagttccttatgctactttcactgagcatcctatgaaatacaccagtgagaaattccttgaaatttgcaagcaatagtctggcactttcatttgccaagctatttcttattcaaaggccacccaaagtcccagctctctaggaaaacaaatgatctccatctggaatgtgagaggatgagtactttgatccagttgtctgggttcatgtctaagcttgttccagctatccagaatgcccacaagaattcaactggatctggaagaggaaagaaactgatggtgttaactgaacccattttgattgagacctacacagggctgatgtcattcattggaaaccgcaacaaacttggctattcccttgcccgtgggagtattggtttttgagagtctttttggtaccataagcatatcatccacagatacgtcactttgaaaattccagtttgacccacgctatttttggactgaaacaattaattatttttaaatgacgctttatgatttagaaatttagtatttccgaaaatttaaaagcttgattggactgatagatacacactttagacctcatacaagaataatcaaattttcttaaaactagaaaataaatgctgctgagcctatcaacgggcagcgtcaaatttttccttttttctttaatctttttatagtgatagaggggggg

SEQ ID NO: 281245 - DNA, 827 bp, Homo sapiens
cggccgcccccactgcatgaccttctgggatttgtagtagtcagggccacgcggctgggcgcgccctctagcagcagccctgagtgaccgcagcgcacgagcgcgggaaaatgaggctgcgcgggctgaagagcgcaccgagaggagccgcccccgcggtaccgcgcagcctcgcgtcccgtcagtggggaacaaggtcttggagttaggtcaacaggagaagagtcaagtgaggtcacagatgagttgaattactaggaacaagtcaagaagcctcaaaagaatcaaggcgtaaaataccaagaatggccttcattggttgcaataggaagcgaaagaggagacctgaaatcaaatgaaaaagcgtaagcatcctggggagaagcccactggatctcagttctgccctgctcaggaaagttcagtatccaggtgactgagaacagaaccggctggcaccaaagacatgattttgagggggccggagccctttccctttgcctccatacataacaggagcaggaccacacactcagtccctgacaagaaaaggagggtggattttctaaactatgatattcaccattaaaattaacaagttaacagaagtaatattttttgaaaacaggttttctaattgtactacacatgatcatgacttcttaaatggaacacatgtacatgaagactgggaaccaaacaaatgttaacttatgagtatcaactgctccttataccctcacacagtgacagcagtgggagttatttagcaggatagggctttttgctcccagcctatagtgttccagctcgtgtggttttccgct

SEQ ID NO: 281246 - DNA, 480 bp, Homo sapiens
cggccgcccccactgcatgaccttctgggatttgtagtagtcagggccacgcggctgggcgcgccctctagcagcagccctgagtgaccgcagcgcacgagcgcgggaaaatgaggctgcgcgggctgaagagcgcaccgagaggagccgcccccgcggtaccgcgcagcctcgcgtcccgtcagtggggaacaaggtgaggggaaaacttattttacgggattcaaaggattaggatatgctccttccccgaaggggtttatagcctagctgatgaggtcggccagacgcagagaacagagaggcaaaattcggttataaagggctcgaggcggccgggcggggaggctagtcagggaggctcgaggctgaactgcaggcttcacgttaaagttacaagtgagttggacccagaaggcagaattacagccagaacgtagctgtgcatcatgtcttgaaaataaacgagcacatgtaata

SEQ ID NO: 281247 - DNA, 302 bp, Homo sapiens
gtcctttccctttggtgactaaatcatgccgtgccattcatggtctcttttttagctagtctaaaacgtgtagtaagtggaaagtaatcaagcttcaagttccacatataatctttccttcttcttcattatactaatgctttcatatttactattcctagatccatatctgatttctttcttccttctcagataaatgtgcagtctagccattagaagaccaaaaggaccaaaatttccacaggggggaaaaaaaagaaacaaggcttgcaataaaattgtttaagtcttcatcagaaatg

SEQ ID NO: 281248 - DNA, 556 bp, Homo sapiens
tggctactattaaatcctaccatctcaaaaggatataacagacaagaaggccatcaaccccatttcccaccatggaagagaaggacagaagagaacaccagtcacttttcctaagaacgtttaaccacagcaactctacacactaaaatctgaacaattagacctccagctgacctcagcttctacactccgaaatccatggccacatatgcagcaaggataaatatctcatggcttttctccacattaactggaagtagcagaaataagaagaccagctcattcccgaggggcatgggactccaatgagggacaactctgacttgacgactatccaaggtcttggagttaggtcaacaggagaagagtcaagtgaggtcacagatgagttgaattactaggaacaagtcaagaagcctcaaaagaatcaaggcgtaaaataccaaataaatgtgcagtctagccattagaagaccaaaaggaccaaaatttccacaggggggaaaaaaaagaaacaaggcttgcaataaaattgtttaagtcttcatcagaaatg

SEQ ID NO: 281249 - DNA, 1381 bp, Homo sapiens
taaggtaaataccctctttagctgagtccaagactttggatattagattactgtacctaaaaagagtaaaatggtggccaggcggtggctcacgcctgcaatcccagcactttgggaggccaaggagggtggatcatctgaggtaagatatagtcagggaaattaggattcatgcttgaagagtaatagaaaaacctaagtgaaacaggttattggaattttctttatgaagaataaaagtggaagaactgatagtctggaaaggtgaagtaatctggagtaggcagctacaaaaggtataaaatttgtggagaaggcaaaaattggggcagaaaatataaataacaagggagtactgcagtcctctggtgggaggtagatcataaagaatctgtagaaccatttacttttcctcacagtcaactgctcttacacccagagcagtagctgtcaagtcaattttattgaaaatacactggacttggacatcctgagtcaaactgccatcacctaaagggcctggatttaaaaggaattttcaagattattgttaacttctgggttaagtgtttagggaaaaaaatgttaaatctacttttcttatacatgattggtgtgcttagttttttatcaatttgacactacagtccaaatttgcttctgatcacactagaatagttttaccaatgttcattatttttcaacttcctttattaagaattaaggctggttgggcgcagtggctcacgcctgtaatcccagcactttgggaagccgaggtgggcagatcatttgcggtcaggattccaataccagcctggccaatacggtgaaaccccatttctactaaaaatacaaaaattagccaggcgtggtagcgtactcctgtaatcccagctactcaggaggctgaggcagaattgcttgaacccttgaggcagaggttgcagtgagccgagattgcgccactacactccagcctgggccacagagcgagactgtgtctcaaaaaaataaaaatagaagactgcactaatgccaccaacgtgcatattgatttgaaggcatcttgcagcaacttttaaaaattattgtacatatatatttaaaagcatactttattaatgtgcttattaaaaagtttagggaaaactttaagtgttcaaaatgtcaagtttgttaggcatcagtttgttagtgtttgggagtattgcctcagatatctgggcaaaattttttcctcccataatattaaattattggctgacagttaatgaattttgccaataagtaaaataatcaagaagttacaaaaaggataagatactcagctatcttggccttcaaaacgccaatggtggattctaactgaaattttata

SEQ ID NO: 281250 - DNA, 1853 bp, Homo sapiens
taaggtaaataccctctttagctgagtccaagactttggatattagattactgtacctaaaaagagtaaaatggtggccaggcggtggctcacgcctgcaatcccagcactttgggaggccaaggagggtggatcatctgaggtcaggagttcgagaccagcctggccaacgtggtgaaaccccatctctactaaaaatacaaaaattagccgggcgtggtggtgcacgcttgtggtcccagctactcaggaggctgaggcaggagaatcgcttgaacctaggaggtggaggttgcagtgagccaagatggcaccactgcattcctgcctgggcaacaagaaagagtaaaatggtaactatgcacaaaggatgggggaaaggtggctcacagggcttaaacatcagaggaatggagaggacaggacagtgagggaattatctggaaggtaggtaactggattgagaaccacaaaaagcatgtagatttaagcagattacgagtcattttaaacagctgtttcaaagtaagagtaaaaacaggctggagaaaatcttgggtaatattagagtaacatagtctaggataggaatccatcagttatggagatcagaggtaagatatagtcagggaaattaggattcatgcttgaagagtaatagaaaaacctaagtgaaacaggttattggaattttctttatgaagaataaaagtggaagaactgatagtctggaaaggtgaagtaatctggagtaggcagctacaaaaggtataaaatttgtggagaaggcaaaaattggggcagaaaatataaataacaagggagtactgcagtcctctggtgggaggtagatcataaagaatctgtagaaccatttacttttcctcacagtcaactgctcttacacccagagcagtagctgtcaagtcaattttattgaaaatacactggacttggacatcctgagtcaaactgccatcacctaaagggcctggatttaaaaggaattttcaagattattgttaacttctgggttaagtgtttagggaaaaaaatgttaaatctacttttcttatacatgattggtgtgcttagttttttatcaatttgacactacagtccaaatttgcttctgatcacactagaatagttttaccaatgttcattatttttcaacttcctttattaagaattaaggctggttgggcgcagtggctcacgcctgtaatcccagcactttgggaagccgaggtgggcagatcatttgcggtcaggattccaataccagcctggccaatacggtgaaaccccatttctactaaaaatacaaaaattagccaggcgtggtagcgtactcctgtaatcccagctactcaggaggctgaggcagaattgcttgaacccttgaggcagaggttgcagtgagccgagattgcgccactacactccagcctgggccacagagcgagactgtgtctcaaaaaaataaaaatagaagactgcactaatgccaccaacgtgcatattgatttgaaggcatcttgcagcaacttttaaaaattattgtacatatatatttaaaagcatactttattaatgtgcttattaaaaagtttagggaaaactttaagtgttcaaaatgtcaagtttgttaggcatcagtttgttagtgtttgggagtattgcctcagatatctgggcaaaattttttcctcccataatattaaattattggctgacagttaatgaattttgccaataagtaaaataatcaagaagttacaaaaaggataagatactcagctatcttggccttcaaaacgccaatggtggattctaactgaaattttata

SEQ ID NO: 281251 - DNA, 1765 bp, Homo sapiens
tgagacagagtctcattctgtcacccaggctggagtgcagtgacgtgatcttggctcactggaacctccgcctcccaggttcaagtgattctcttgcctcagcctcccgagtagctgggattacaggcgtctgccaccacacagggctaattttttgtatttttagctgaggcaggagaatcgcttgaacctaggaggtggaggttgcagtgagccaagatggcaccactgcattcctgcctgggcaacaagaaagagtaaaatggtaactatgcacaaaggatgggggaaaggtggctcacagggcttaaacatcagaggaatggagaggacaggacagtgagggaattatctggaaggtaggtaactggattgagaaccacaaaaagcatgtagatttaagcagattacgagtcattttaaacagctgtttcaaagtaagagtaaaaacaggctggagaaaatcttgggtaatattagagtaacatagtctaggataggaatccatcagttatggagatcagaggtaagatatagtcagggaaattaggattcatgcttgaagagtaatagaaaaacctaagtgaaacaggttattggaattttctttatgaagaataaaagtggaagaactgatagtctggaaaggtgaagtaatctggagtaggcagctacaaaaggtataaaatttgtggagaaggcaaaaattggggcagaaaatataaataacaagggagtactgcagtcctctggtgggaggtagatcataaagaatctgtagaaccatttacttttcctcacagtcaactgctcttacacccagagcagtagctgtcaagtcaattttattgaaaatacactggacttggacatcctgagtcaaactgccatcacctaaagggcctggatttaaaaggaattttcaagattattgttaacttctgggttaagtgtttagggaaaaaaatgttaaatctacttttcttatacatgattggtgtgcttagttttttatcaatttgacactacagtccaaatttgcttctgatcacactagaatagttttaccaatgttcattatttttcaacttcctttattaagaattaaggctggttgggcgcagtggctcacgcctgtaatcccagcactttgggaagccgaggtgggcagatcatttgcggtcaggattccaataccagcctggccaatacggtgaaaccccatttctactaaaaatacaaaaattagccaggcgtggtagcgtactcctgtaatcccagctactcaggaggctgaggcagaattgcttgaacccttgaggcagaggttgcagtgagccgagattgcgccactacactccagcctgggccacagagcgagactgtgtctcaaaaaaataaaaatagaagactgcactaatgccaccaacgtgcatattgatttgaaggcatcttgcagcaacttttaaaaattattgtacatatatatttaaaagcatactttattaatgtgcttattaaaaagtttagggaaaactttaagtgttcaaaatgtcaagtttgttaggcatcagtttgttagtgtttgggagtattgcctcagatatctgggcaaaattttttcctcccataatattaaattattggctgacagttaatgaattttgccaataagtaaaataatcaagaagttacaaaaaggataagatactcagctatcttggccttcaaaacgccaatggtggattctaactgaaattttata

SEQ ID NO: 281252 - DNA, 2373 bp, Homo sapiens
aattggtcaccccaatgcaggggatacagacttgttttaatataaaaaagaagtggccttaaccgtgcagggcttgcaggcctttgtaggcatgggagcatgctgtgatccctggttctgtgctaaacactcaaaagggctctctgactcaagtggaggtgataaaccttttcaatagtaacaggagagagtgtgatatcaaagtgccagaagtcctcacggaccaacatttagcacagacattcaaactgctgaaagaaccaaacagaactcaactgaaaaaaacagaccttttaagaaaagcaatagatcttaatttggtggcaagatccctggtttaccttttgaagtcaaaatgttcaatacatcacccgagcttgacttttgagcacttggcaagattgttttttgccacttgacacaagtatgatgtccagctatgcaaaatgactgtttgatctgccttttcagtgtatttgtgtggcgatgtctgtaaaatgccagaagcctcttatgttattgctgctgctgctaccagccagcaactgcagaggccatgctgaggtgcctccttgccaccagccgttgggaaatgcctaccatgctgccccggatgcacaagctcaaaacgctgcagaagttacacaactgctcccataatctggactctccaaaaccgtgatgccacgaaggaaggtcaagttttaaaatgttaaagactgcttgcctctgttcctgagactaaacagtatacatactaactacattgacaaagaaatcctatctgataatgtagcccgctgacgaattttgaagcctcggttaccctaaccaatatgtagcttttaatttgcatcaaaacttttacaaagatgttttgctattgtttctatatacttcaagaatgttcatttttacaaataagttgaacaagacagcctaagttagatgcaccgaagtactagaaatatcgctagcctctgttctccagtttagctttcaaaaccaaatgagccatgtataaaggagttgagaaacttaatttttaaatgtttcatttgcagagttttatatccattaagtgcctttgaaagtttccagttgtgtgggctgctgtctcacctcccaccaatttctcctttctccttatggtgctaaaacctcaaagctgaggagggctgcaggacccttagcagattcagtgtgtcacccttgtcctgtgttcaacccaaggcttcctaaatgaaagacatcggttacctgcttatgggaaggtgagcagcaaaggaattgaagttcgggacagggtagaattatgggttttcattgtgtttcatgccaaacccacaaaatccaaaatagaattcaagttaaacaaacttctactacaaaatggaaggggaaaaaggctcaggaaggtctatgagaatgagctgacttatctcgttaaatcttaagataaatgagggtaacccaaggctgcaccttggtgtaccaccctgagtggagttgaggtgacttcatttgattgcttcaggcgaactatataggtcaagtccagattataaaaaaattatctgcagaacaaattgtaaacccaaggaatagctggtaaatcaaaattataaagtgagttagagttccttggagttggttgtatgacggaatatgacttggacaatctttaccagaagccatccgtaagcccctcagtcacactttccatgtagctgaccagtgactacaggatgtggctgacagtgctcactgaaaggagagttggtgcgggactggtggttctgagcacatagacgcctattagtccttctggtcagtgaacgaaaattctagacctacagttactggctacttgcatttgtcagtttagagaaaaggtaaaatgaggcattttcaattgtagaatagactaacatttaccacagaagtgcttcagcattctaaatggattagatcactcattaagctatttttatatgccaatttactaatgccttacatcaatccactaataggttgttgggcccgcagtagagtccctatgcagtccgtactagactcttcatgctgatcggatcttgcattgaaataaccatgtggaagaacaatgaatcgattaatgatgacatgtacaaccatatttaaagagcaatagtgtccgtgtgtcatgaaaaacttatttgtaaacgtttatatggtatgattttgattttatgtatgttcataaatcctgcactgtatgatatatgtgagttaaaacattggtgcatgaatttattttcaaagtataaaacacatcacttaaacattttatgtgtcaaataaaatttgattatgtaaacacaaaaaaaaaat

SEQ ID NO: 281253 - DNA, 2709 bp, Homo sapiens
attgaagttggtgaaaaaaatgctgcttctaacatcctgattgatggtcacatggaaggggagatctggggcctggccactcacccttccaaggacctcttcatctctgccagcaacgatggcacagcccggatctgggacctggctgacaagaagctgttaaacaaggtgagcttgggccatgcggccaggtgtgcagcctacagccctgatggggagatggtggccattggcatgaagaatggagagtttgtcatcttgttggtgaacagcctgaaagtttgggggaaaaaacgagaccggaaatctgctatccaagatatcagaatcagcccagacaaccgattcttagccgttggttcttctgaacacacagttgacttctatgacctcactcagggcacaaatctgaaccgcattggctactgcaaagatatcccaagctttgtcattcagatggatttttctgcggatggcaaatacattcagcgtcctgggagatgaagtcattggaatctggccacgaaatgcagacaaggctgatgtcaactgcgcatgtgtgacccacgctggcctgaacattgtcacaggagatgactttgggctggtgaagctctttgattttccatgcacagaaaaatttgccaaacataagcgatacttcggtcactcggctcacgtgacgaacatccgtttctcttatgatgacaagtatgtggtcagcactggaggagacgactgcagtgtatttgtgtggcgatgtctgtaaaatgccagaagcctcttatgttattgctgctgctgctaccagccagcaactgcagaggccatgctgaggtgcctccttgccaccagccgttgggaaatgcctaccatgctgccccggatgcacaagctcaaaacgctgcagaagttacacaactgctcccataatctggactctccaaaaccgtgatgccacgaaggaaggtcaagttttaaaatgttaaagactgcttgcctctgttcctgagactaaacagtatacatactaactacattgacaaagaaatcctatctgataatgtagcccgctgacgaattttgaagcctcggttaccctaaccaatatgtagcttttaatttgcatcaaaacttttacaaagatgttttgctattgtttctatatacttcaagaatgttcatttttacaaataagttgaacaagacagcctaagttagatgcaccgaagtactagaaatatcgctagcctctgttctccagtttagctttcaaaaccaaatgagccatgtataaaggagttgagaaacttaatttttaaatgtttcatttgcagagttttatatccattaagtgcctttgaaagtttccagttgtgtgggctgctgtctcacctcccaccaatttctcctttctccttatggtgctaaaacctcaaagctgaggagggctgcaggacccttagcagattcagtgtgtcacccttgtcctgtgttcaacccaaggcttcctaaatgaaagacatcggttacctgcttatgggaaggtgagcagcaaaggaattgaagttcgggacagggtagaattatgggttttcattgtgtttcatgccaaacccacaaaatccaaaatagaattcaagttaaacaaacttctactacaaaatggaaggggaaaaaggctcaggaaggtctatgagaatgagctgacttatctcgttaaatcttaagataaatgagggtaacccaaggctgcaccttggtgtaccaccctgagtggagttgaggtgacttcatttgattgcttcaggcgaactatataggtcaagtccagattataaaaaaattatctgcagaacaaattgtaaacccaaggaatagctggtaaatcaaaattataaagtgagttagagttccttggagttggttgtatgacggaatatgacttggacaatctttaccagaagccatccgtaagcccctcagtcacactttccatgtagctgaccagtgactacaggatgtggctgacagtgctcactgaaaggagagttggtgcgggactggtggttctgagcacatagacgcctattagtccttctggtcagtgaacgaaaattctagacctacagttactggctacttgcatttgtcagtttagagaaaaggtaaaatgaggcattttcaattgtagaatagactaacatttaccacagaagtgcttcagcattctaaatggattagatcactcattaagctatttttatatgccaatttactaatgccttacatcaatccactaataggttgttgggcccgcagtagagtccctatgcagtcccaattctgttttctgtaaccatgtgactggtgatgcagagtgataaccatgtctgcctatcttgtactagactcttcatgctgatcggatcttgcattgaaataaccatgtggaagaacaatgaatcgattaatgatgacatgtacaaccatatttaaagagcaatagtgtccgtgtgtcatgaaaaacttatttgtaaacgtttatatggtatgattttgattttatgtatgttcataaatcctgcactgtatgatatatgtgagttaaaacattggtgcatgaatttattttcaaagtataaaacacatcacttaaacattttatgtgtcaaataaaatttgattatgtaaacacaaaaaaaaaat

SEQ ID NO: 281254 - DNA, 1852 bp, Homo sapiens
attgaagttggtgaaaaaaatgctgcttctaacatcctgattgatggtcacatggaaggggagatctggggcctggccactcacccttccaaggacctcttcatctctgccagcaacgatggcacagcccggatctgggacctggctgacaagaagctgttaaacaaggtgagcttgggccatgcggccaggtgtgcagcctacagccctgatggggagatggtggccattggcatgaagaatggagagtttgtcatcttgttggtgaacagcctgaaagtttgggggaaaaaacgagaccggaaatctgctatccaagatatcagaatcagcccagacaaccgattcttagccgttggttcttctgaacacacagttgacttctatgacctcactcagggcacaaatctgaaccgcattggctactgcaaagatatcccaagctttgtcattcagatggatttttctgcggatggcaaatacattcagcgtcctgggagatgaagtcattggaatctggccacgaaatgcagacaaggctgatgtcaactgcgcatgtgtgacccacgctggcctgaacattgtcacaggagatgactttgggctggtgaagctctttgattttccatgcacagaaaaatttgccaaacataagcgatacttcggtcactcggctcacgtgacgaacatccgtttctcttatgatgacaagtatgtggtcagcactggaggagacgactgcagtgtatttgtgtggcgatgtctgtaaaatgccagaagcctcttatgttattgctgctgctgctaccagccagcaactgcagaggccatgctgaggtgcctccttgccaccagccgttgggaaatgcctaccatgctgccccggatgcacaagctcaaaacgctgcagaagttacacaactgctcccataatctggactctccaaaaccgtgatgccacgaaggaaggtcaagttttaaaatgttaaagactgcttgcctctgttcctgagactaaacagtatacatactaactacattgacaaagaaatcctatctgataatgtagcccgctgacgaattttgaagcctcggttaccctaaccaatatgtagcttttaatttgcatcaaaacttttacaaagatgttttgctattgtttctatatacttcaagaatgttcatttttacaaataagttgaacaagacagcctaagttagatgcaccgaagtactagaaatatcgctagcctctgttctccagtttagctttcaaaaccaaatgagccatgtataaaggagttgagaaacttaatttttaaatgtttcatttgcagagttttatatccattaagtgcctttgaaagtttccagttgtgtgggctgctgtctcacctcccaccaatttctcctttctccttatggtgctaaaacctcaaagctgaggagggctgcaggacccttagcagattcagtgtgtcacccttgtcctgtgttcaacccaaggcttcctaaatgaaagacatcggttacctgcttatgggaaggtactagactcttcatgctgatcggatcttgcattgaaataaccatgtggaagaacaatgaatcgattaatgatgacatgtacaaccatatttaaagagcaatagtgtccgtgtgtcatgaaaaacttatttgtaaacgtttatatggtatgattttgattttatgtatgttcataaatcctgcactgtatgatatatgtgagttaaaacattggtgcatgaatttattttcaaagtataaaacacatcacttaaacattttatgtgtcaaataaaatttgattatgtaaacacaaaaaaaaaat

SEQ ID NO: 281255 - DNA, 2293 bp, Homo sapiens
atgaggtccccctggggaagcaggtaactgaagccgtggtcattgagaagatcacctgggcctcctggacaagcgtcctgggagatgaagtcattggaatctggccacgaaatgcagacaaggctgatgtcaactgcgcatgtgtgacccacgctggcctgaacattgtcacaggagatgactttgggctggtgaagctctttgattttccatgcacagaaaaatttgccaaacataagcgatacttcggtcactcggctcacgtgacgaacatccgtttctcttatgatgacaagtatgtggtcagcactggaggagacgactgcagtgtatttgtgtggcgatgtctgtaaaatgccagaagcctcttatgttattgctgctgctgctaccagccagcaactgcagaggccatgctgaggtgcctccttgccaccagccgttgggaaatgcctaccatgctgccccggatgcacaagctcaaaacgctgcagaagttacacaactgctcccataatctggactctccaaaaccgtgatgccacgaaggaaggtcaagttttaaaatgttaaagactgcttgcctctgttcctgagactaaacagtatacatactaactacattgacaaagaaatcctatctgataatgtagcccgctgacgaattttgaagcctcggttaccctaaccaatatgtagcttttaatttgcatcaaaacttttacaaagatgttttgctattgtttctatatacttcaagaatgttcatttttacaaataagttgaacaagacagcctaagttagatgcaccgaagtactagaaatatcgctagcctctgttctccagtttagctttcaaaaccaaatgagccatgtataaaggagttgagaaacttaatttttaaatgtttcatttgcagagttttatatccattaagtgcctttgaaagtttccagttgtgtgggctgctgtctcacctcccaccaatttctcctttctccttatggtgctaaaacctcaaagctgaggagggctgcaggacccttagcagattcagtgtgtcacccttgtcctgtgttcaacccaaggcttcctaaatgaaagacatcggttacctgcttatgggaaggtgagcagcaaaggaattgaagttcgggacagggtagaattatgggttttcattgtgtttcatgccaaacccacaaaatccaaaatagaattcaagttaaacaaacttctactacaaaatggaaggggaaaaaggctcaggaaggtctatgagaatgagctgacttatctcgttaaatcttaagataaatgagggtaacccaaggctgcaccttggtgtaccaccctgagtggagttgaggtgacttcatttgattgcttcaggcgaactatataggtcaagtccagattataaaaaaattatctgcagaacaaattgtaaacccaaggaatagctggtaaatcaaaattataaagtgagttagagttccttggagttggttgtatgacggaatatgacttggacaatctttaccagaagccatccgtaagcccctcagtcacactttccatgtagctgaccagtgactacaggatgtggctgacagtgctcactgaaaggagagttggtgcgggactggtggttctgagcacatagacgcctattagtccttctggtcagtgaacgaaaattctagacctacagttactggctacttgcatttgtcagtttagagaaaaggtaaaatgaggcattttcaattgtagaatagactaacatttaccacagaagtgcttcagcattctaaatggattagatcactcattaagctatttttatatgccaatttactaatgccttacatcaatccactaataggttgttgggcccgcagtagagtccctatgcagtcccaattctgttttctgtaaccatgtgactggtgatgcagagtgataaccatgtctgcctatcttgtactagactcttcatgctgatcggatcttgcattgaaataaccatgtggaagaacaatgaatcgattaatgatgacatgtacaaccatatttaaagagcaatagtgtccgtgtgtcatgaaaaacttatttgtaaacgtttatatggtatgattttgattttatgtatgttcataaatcctgcactgtatgatatatgtgagttaaaacattggtgcatgaatttattttcaaagtataaaacacatcacttaaacattttatgtgtcaaataaaatttgattatgtaaacacaaaaaaaaaat

SEQ ID NO: 281256 - DNA, 941 bp, Homo sapiens
aattagatacatggagataaccaaagaatgatgaaaggcaatcagtccaggatacaggggagagagaaggtgttctaaagaaagcaatggaaaagagaaaacggccctcaaaaggaaaacaatgagaaactgtcttgattgtacttgtaagaaatgattgtgcggttaatattattttttgaaccctgacattcagagtcagtcacctggcacatagtggatgcttaataacaggtgtggaataaattggctgctacttgcccgggcagtgggccagactcataaacatagtggccattcagaatcctgcaacgttcatgttttcgtgtattagcggtggaaaataataggaacaaggcgagacctggacttcagtcccagctctgccactaagtggcttggctgtagagcttaactcttccacagtcttcatctgtgtaatgggaataacgatccgtacctctagcaggtgcgaggcgggttgtaaatggccacgcccgggagccgcaagaaccacggcgccctggaggatctggaacgcgcggtggagctgagcggcggccggggccgcgccgcccgccagagctttgtgcagcgcggactcctggcgcggctgcagggccgagacgacgacgcccgcagggacttcgagagggcggcacggctgggcagccccttcgcgcggcgccagctggtgctgctcaacccctacgccgcgctgtgcaaccgcatgctggccgacatgatggggcagctgcgccgcccccgtgacagccgctgagcgccgcggacccgggcgtccgcgggcgaggggacgggactgggccctgaaccaataaagccgtcgggcctcaccgactccgcctgctcctgcgtcctgcccgcgcccggagagaagggcactcgggggtactcggcgcgggctggggaccagccggggg

SEQ ID NO: 281257 - DNA, 548 bp, Homo sapiens
aattagatacatggagataaccaaagaatgatgaaaggcaatcagtccaggatacaggggagagagaaggtgttctaaagaaagcaatggaaaagagaaaacggccctcaaaaggaaaacaatgagaaactgtcttgattgtacttgtaagaaatgattgtgcggttaatattattttttgaaccctgacattcagagtcagtcacctggcacatagtggatgcttaataacaggtgtggaataaattggctgctacttgcccgggcagtgggccagactcataaacatagtggccattcagaatcctgcaacgttcatgttttcgtgtattagcggtggaaaataataggaacaaggcgagacctggacttcagtcccagctctgccactaagtggcttggctgtagagcttaactcttccacagtcttcatctgtgtaatgggaataacgatccgtacctctagcaggtgcgaggcgggttgtaaatggccacgcccgggagccgcaagaaccacggtgatccgcgcggccgcaggtgggctgggg

SEQ ID NO: 281258 - DNA, 892 bp, Homo sapiens
aattagatacatggagataaccaaagaatgatgaaaggcaatcagtccaggatacaggggagagagaaggtgttctaaagaaagcaatggaaaagagaaaacggccctcaaaaggaaaacaatgagaaactgtcttgattgtacttgtaagaaatgattgtgcggttaatattattttttgaaccctgacattcagagtcagtcacctggcacatagtggatgcttaataacaggtgtggaataaattggctgctacttgcccgggcagtgggccagactcataaacatagtggccattcagaatcctgcaacgttcatgttttcgtgtattagcggtggaaaataataggaacaaggcgagacctggacttcagtcccagctctgccactaagtggcttggctgtagagcttaactcttccacagtcttcatctgtgtaatgggaataacgatccgtacctctagcaggcgccctggaggatctggaacgcgcggtggagctgagcggcggccggggccgcgccgcccgccagagctttgtgcagcgcggactcctggcgcggctgcagggccgagacgacgacgcccgcagggacttcgagagggcggcacggctgggcagccccttcgcgcggcgccagctggtgctgctcaacccctacgccgcgctgtgcaaccgcatgctggccgacatgatggggcagctgcgccgcccccgtgacagccgctgagcgccgcggacccgggcgtccgcgggcgaggggacgggactgggccctgaaccaataaagccgtcgggcctcaccgactccgcctgctcctgcgtcctgcccgcgcccggagagaagggcactcgggggtactcggcgcgggctggggaccagccggggg

SEQ ID NO: 281259 - DNA, 469 bp, Homo sapiens
ctggcctccgctgacccccgccccgcccgtctcgtcggtcccgcaggcgccctggaggatctggaacgcgcggtggagctgagcggcggccggggccgcgccgcccgccagagctttgtgcagcgcggactcctggcgcggctgcagggccgagacgacgacgcccgcagggacttcgagagggcggcacggctgggcagccccttcgcgcggcgccagctggtgctgctcaacccctacgccgcgctgtgcaaccgcatgctggccgacatgatggggcagctgcgccgcccccgtgacagccgctgagcgccgcggacccgggcgtccgcgggcgaggggacgggactgggccctgaaccaataaagccgtcgggcctcaccgactccgcctgctcctgcgtcctgcccgcgcccggagagaagggcactcgggggtactcggcgcgggctggggaccagccggggg

SEQ ID NO: 281260 - DNA, 616 bp, Homo sapiens
ccagatgaagttttccctcaagcacagctggaacagtccaaggccctggagctgcagggggtgatggcagcagaggctggggacctcagcacagccctggagaggtttggccaagccatctgcctgctgcctgagagggcttcagcctacaacaaccgtgcccaggcccggcgactccagggagacgtggcaggcgccctggaggatctggaacgcgcggtggagctgagcggcggccggggccgcgccgcccgccagagctttgtgcagcgcggactcctggcgcggctgcagggccgagacgacgacgcccgcagggacttcgagagggcggcacggctgggcagccccttcgcgcggcgccagctggtgctgctcaacccctacgccgcgctgtgcaaccgcatgctggccgacatgatggggcagctgcgccgcccccgtgacagccgctgagcgccgcggacccgggcgtccgcgggcgaggggacgggactgggccctgaaccaataaagccgtcgggcctcaccgactccgcctgctcctgcgtcctgcccgcgcccggagagaagggcactcgggggtactcggcgcgggctggggaccagccggggg

SEQ ID NO: 281261 - DNA, 402 bp, Homo sapiens
gccagatctttcaagcctaccagaatactgacagcacttcagcttctgagaaacatagtacaggtgactgcatctgcacaggcttccctgggaggacttcatcaacagcacagttacacatcaaagtcctttagctctccccagctggcgcctattttcactttcactttcaatttcacagacagttttacagcactttccatttcattcttgacaatctgagctacctaaggaaaaaaaaaatgtagttaacaaactgcccagtcaaagaatgtttcccaaaccatcccctgagaaagttataaaccagactggagctcttcacccaatggtgcttaaaatgctaaatcagaaaaaataaaaaataaaataaataaatgaataaataaaaagacatctcat

SEQ ID NO: 281262 - DNA, 1100 bp, Homo sapiens
ctcgtgcgctcctccttcctacagaaaaatgtgtttctaggcaacggcgggcggcggcgtcacttcctgccatttaaactcaggtccccacccctcgcagccccttctcctcgtttccacccctcccccctcggtcgtgggcctcattcacgcttccccgggcttggggagggggcggaggcccggcgtgacaagcggcccagactcccgtgggcgccgcacacctgttgtttgcagcagccagcgacccgcactaccgctctcggcgggcggggaagcggccgcagcggagccgacccggcaggtggccgcgggcggggccggcgagcgaaagtgcgcgggggcccgaccaccgcggggccgggacgcgatggcggcggcagagcccgcgagctcgggccagcaggcgccggcagggcaggggcagggccagcggccgccgccgcagcctccgcaggcgcaagccccgcagccgcccccgccgccgcagctcgggggcgcggggggcggcagcagcaggcacgagaagagcctggggctgctcactaccaagttcgtgtcgctgctgcaggaggccaaggacggcgttctggatctcaaagcggtgagctccggaggcggggacgggggcggacttcggaacccgtggcccccggggaagcccagcccctcgccgcgtgggtctagcggcgtggtgtagacgcgccttgcggggacccgggaccgggcaatccgaggaccatgtggcctgcgcccgggtcgtggacgccgggatgggggagggacgagggaccaggatggcaccgagcggacgcgtaaccaatggggcccggcgccacgctgggctctcgacaaagagcccaggacctcgagcgcgcccgcgtggcttctgtctccgggcgcagggacctgagggtaaccgagtgtctgttgctctgcgtccacctgtggcagaggctcacggggtaacgggcgctttgcccggagacaccgtggatatcgattttgctgttaagaatggatggttttaataggcgattccagttggaaccatgttcctgtagtttaaataaaaaggaggaaaaacaaaacccagtctg

SEQ ID NO: 281263 - DNA, 461 bp, Homo sapiens
tagtattggaagtgttgagtgaccgtatgagagtgagagtaagagaaactgagttgcttttttcctgtatccttacagtgaccaaaatctttctaggctacagtgctgtcatcccgcatctatacaagaaacctggatcaaatacttttagtcccttctaacataacaatacgtctctgaatccttcctggaccttcttgtcttaatggaagacccctgatgacagcttccctcgcagtcctcctcttgagtttaacagaggtttttgtttgaattgcagatgtcttcaaagatacaagaattactgaggagaaaaagaatgggtgctcactgacatcccatgtcttgcctctattaatacattcttacatttgagtttagagataagaactgtttcccatactatggtttttaaatgagttctatggttcagtaaaactattaaattgaagcttcacaca

SEQ ID NO: 281264 - DNA, 1834 bp, Homo sapiens
ctcgtgcgctcctccttcctacagaaaaatgtgtttctaggcaacggcgggcggcggcgtcacttcctgccatttaaactcaggtccccacccctcgcagccccttctcctcgtttccacccctcccccctcggtcgtgggcctcattcacgcttccccgggcttggggagggggcggaggcccggcgtgacaagcggcccagactcccgtgggcgccgcacacctgttgtttgcagcagccagcgacccgcactaccgctctcggcgggcggggaagcggccgcagcggagccgacccggcaggtggccgcgggcggggccggcgagcgaaagtgcgcgggggcccgaccaccgcggggccgggacgcgatggcggcggcagagcccgcgagctcgggccagcaggcgccggcagggcaggggcagggccagcggccgccgccgcagcctccgcaggcgcaagccccgcagccgcccccgccgccgcagctcgggggcgcggggggcggcagcagcaggcacgagaagagcctggggctgctcactaccaagttcgtgtcgctgctgcaggaggccaaggacggcgttctggatctcaaagcggctgctgatactttggctgtgaggcaaaaaaggagaatttatgatatcaccaatgtcttagagggaattgacttgattgaaaaaaagtcaaaaaacagtatccagtggaaaggtgtaggtgctggctgtaatactaaagaagtcatagatagattaagatatcttaaagctgaaattgaagatctagaactgaaggaaagagaacttgatcagcagaagttgtggctacagcaaagcatcaaaaatgtgatggacgattccattaataatagattttcctatgtaactcatgaagacatctgtaattgctttaatggtgatacacttttggccattcaggcaccttctggtacacaactggaggtacccattccagaaatgggtcagaatggacaaaagaaataccagatcaatctaaagagtcattcaggacctatccatgtgctgcttataaataaagagtcgagttcatctaagcccgtggtttttcctgttcccccacctgatgacctcacacagccttcctcccagtccttgactccagtgactccacagaaatccagcatggcaactcaaaatctgcctgagcaacatgtctctgaaagaagccaggctctgcagcagacatcagctacagatatatcttcagcaggatctattagtggagatatcattgatgagttaatgtcttctgacgtgtttcctctcttaaggctttctcctaccccggcagatgactacaactttaatttagatgataacgaaggagtttgtgatctgtttgatgtccagatactaaattattagattccatggaaacttgggactgttatctacctctaactgttgaccaaaatctttctaggctacagtgctgtcatcccgcatctatacaagaaacctggatcaaatacttttagtcccttctaacataacaatacgtctctgaatccttcctggaccttcttgtcttaatggaagacccctgatgacagcttccctcgcagtcctcctcttgagtttaacagaggtttttgtttgaattgcagatgtcttcaaagatacaagaattactgaggagaaaaagaatgggtgctcactgacatcccatgtcttgcctctattaatacattcttacatttgagtttagagataagaactgtttcccatactatggtttttaaatgagttctatggttcagtaaaactattaaattgaagcttcacaca

SEQ ID NO: 281265 - DNA, 1565 bp, Homo sapiens
ctcttataggcagcataagttgagtgtttttaaaaatccatttaactactttgcctttttattggagaacttaatccacttacgttcagggttatcattcataggctgctgatactttggctgtgaggcaaaaaaggagaatttatgatatcaccaatgtcttagagggaattgacttgattgaaaaaaagtcaaaaaacagtatccagtggaaaggtgtaggtgctggctgtaatactaaagaagtcatagatagattaagatatcttaaagctgaaattgaagatctagaactgaaggaaagagaacttgatcagcagaagttgtggctacagcaaagcatcaaaaatgtgatggacgattccattaataatagattttcctatgtaactcatgaagacatctgtaattgctttaatggtgatacacttttggccattcaggcaccttctggtacacaactggaggtacccattccagaaatgggtcagaatggacaaaagaaataccagatcaatctaaagagtcattcaggacctatccatgtgctgcttataaataaagagtcgagttcatctaagcccgtggtttttcctgttcccccacctgatgacctcacacagccttcctcccagtccttgactccagtgactccacagaaatccagcatggcaactcaaaatctgcctgagcaacatgtctctgaaagaagccaggctctgcagcagacatcagctacagatatatcttcagcaggatctattagtggagatatcattgatgagttaatgtcttctgacgtgtttcctctcttaaggctttctcctaccccggcagatgactacaactttaatttagatgataacgaaggagtttgtgatctgtttgatgtccagatactaaattattagattccatggaaacttgggactgttatctacctctaactgtgtaacattttagacttcttaataacctaaatatttaaaataatgaatgtaacaccttttttagttcactgattctgaagtgttcttccctaatactttctttacttcacaaaacttcaaccataaaaacaaagggctctgattgctttaggggataagtgatttaatatccacaaacgtccccactcccaaaagtaactatattctggatttcaacttttcttctaattgtgaatccttctgttttttcttcttaaggaggaaagttaaaggacactacaggtcatcaaaaacaagttggccaaggactcattacttgtcttatatttttactgccactaaactgcctgtatttctgtatgtccttctatccaaacagacgttcactgccacttgtaaagtgaaggatgtaaacgaggatatataactgtttcagtgaacagattttgtgaagtgccttctgttttagcactttaagtttatcacattttgttgacttctgacattccactttcctaggttataggaaagatctgtttatgtagtttgtttttaaaatgtgccaatgcctgtacattaacaagatttttaaaaataaaattgtataaaacattc

SEQ ID NO: 281266 - DNA, 1378 bp, Homo sapiens
gctgttctagaggtcccgattgtgaataggtgtaggtgctggctgtaatactaaagaagtcatagatagattaagatatcttaaagctgaaattgaagatctagaactgaaggaaagagaacttgatcagcagaagttgtggctacagcaaagcatcaaaaatgtgatggacgattccattaataatagattttcctatgtaactcatgaagacatctgtaattgctttaatggtgatacacttttggccattcaggcaccttctggtacacaactggaggtacccattccagaaatgggtcagaatggacaaaagaaataccagatcaatctaaagagtcattcaggacctatccatgtgctgcttataaataaagagtcgagttcatctaagcccgtggtttttcctgttcccccacctgatgacctcacacagccttcctcccagtccttgactccagtgactccacagaaatccagcatggcaactcaaaatctgcctgagcaacatgtctctgaaagaagccaggctctgcagcagacatcagctacagatatatcttcagcaggatctattagtggagatatcattgatgagttaatgtcttctgacgtgtttcctctcttaaggctttctcctaccccggcagatgactacaactttaatttagatgataacgaaggagtttgtgatctgtttgatgtccagatactaaattattagattccatggaaacttgggactgttatctacctctaactgtgtaacattttagacttcttaataacctaaatatttaaaataatgaatgtaacaccttttttagttcactgattctgaagtgttcttccctaatactttctttacttcacaaaacttcaaccataaaaacaaagggctctgattgctttaggggataagtgatttaatatccacaaacgtccccactcccaaaagtaactatattctggatttcaacttttcttctaattgtgaatccttctgttttttcttcttaaggaggaaagttaaaggacactacaggtcatcaaaaacaagttggccaaggactcattacttgtcttatatttttactgccactaaactgcctgtatttctgtatgtccttctatccaaacagacgttcactgccacttgtaaagtgaaggatgtaaacgaggatatataactgtttcagtgaacagattttgtgaagtgccttctgttttagcactttaagtttatcacattttgttgacttctgacattccactttcctaggttataggaaagatctgtttatgtagtttgtttttaaaatgtgccaatgcctgtacattaacaagatttttaaaaataaaattgtataaaacattc

SEQ ID NO: 281267 - DNA, 635 bp, Homo sapiens
taagcctaggaagtggcatgtcagaagtcaacaaagatgtgataaacttaaagtgctaaaacagaaggcacttcacaaaatctgttcactgattctgaagtgttcttccctaatactttctttacttcacaaaacttcaaccataaaaacaaagggctctgattgctttaggggataagtgatttaatatccacaaacgtccccactcccaaaagtaactatattctggatttcaacttttcttctaattgtgaatccttctgttttttcttcttaaggaggaaagttaaaggacactacaggtcatcaaaaacaagttggccaaggactcattacttgtcttatatttttactgccactaaactgcctgtatttctgtatgtccttctatccaaacagacgttcactgccacttgtaaagtgaaggatgtaaacgaggatatataactgtttcagtgaacagattttgtgaagtgccttctgttttagcactttaagtttatcacattttgttgacttctgacattccactttcctaggttataggaaagatctgtttatgtagtttgtttttaaaatgtgccaatgcctgtacattaacaagatttttaaaaataaaattgtataaaacattc

SEQ ID NO: 281268 - DNA, 2065 bp, Homo sapiens
ctcgtgcgctcctccttcctacagaaaaatgtgtttctaggcaacggcgggcggcggcgtcacttcctgccatttaaactcaggtccccacccctcgcagccccttctcctcgtttccacccctcccccctcggtcgtgggcctcattcacgcttccccgggcttggggagggggcggaggcccggcgtgacaagcggcccagactcccgtgggcgccgcacacctgttgtttgcagcagccagcgacccgcactaccgctctcggcgggcggggaagcggccgcagcggagccgacccggcaggtggccgcgggcggggccggcgagcgaaagtgcgcgggggcccgaccaccgcggggccgggacgcgatggcggcggcagagcccgcgagctcgggccagcaggcgccggcagggcaggggcagggccagcggccgccgccgcagcctccgcaggcgcaagccccgcagccgcccccgccgccgcagctcgggggcgcggggggcggcagcagcaggcacgagaagagcctggggctgctcactaccaagttcgtgtcgctgctgcaggaggccaaggacggcgttctggatctcaaagcggctgctgatactttggctgtgaggcaaaaaaggagaatttatgatatcaccaatgtcttagagggaattgacttgattgaaaaaaagtcaaaaaacagtatccagtggaaaggtgtaggtgctggctgtaatactaaagaagtcatagatagattaagatatcttaaagctgaaattgaagatctagaactgaaggaaagagaacttgatcagcagaagttgtggctacagcaaagcatcaaaaatgtgatggacgattccattaataatagattttcctatgtaactcatgaagacatctgtaattgctttaatggtgatacacttttggccattcaggcaccttctggtacacaactggaggtacccattccagaaatgggtcagaatggacaaaagaaataccagatcaatctaaagagtcattcaggacctatccatgtgctgcttataaataaagagtcgagttcatctaagcccgtggtttttcctgttcccccacctgatgacctcacacagccttcctcccagtccttgactccagtgactccacagaaatccagcatggcaactcaaaatctgcctgagcaacatgtctctgaaagaagccaggctctgcagcagacatcagctacagatatatcttcagcaggatctattagtggagatatcattgatgagttaatgtcttctgacgtgtttcctctcttaaggctttctcctaccccggcagatgactacaactttaatttagatgataacgaaggagtttgtgatctgtttgatgtccagatactaaattattagattccatggaaacttgggactgttatctacctctaactgtgtaacattttagacttcttaataacctaaatatttaaaataatgaatgtaacaccttttttagttcactgattctgaagtgttcttccctaatactttctttacttcacaaaacttcaaccataaaaacaaagggctctgattgctttaggggataagtgatttaatatccacaaacgtccccactcccaaaagtaactatattctggatttcaacttttcttctaattgtgaatccttctgttttttcttcttaaggaggaaagttaaaggacactacaggtcatcaaaaacaagttggccaaggactcattacttgtcttatatttttactgccactaaactgcctgtatttctgtatgtccttctatccaaacagacgttcactgccacttgtaaagtgaaggatgtaaacgaggatatataactgtttcagtgaacagattttgtgaagtgccttctgttttagcactttaagtttatcacattttgttgacttctgacattccactttcctaggttataggaaagatctgtttatgtagtttgtttttaaaatgtgccaatgcctgtacattaacaagatttttaaaaataaaattgtataaaacattc

SEQ ID NO: 281269 - DNA, 939 bp, Homo sapiens
ctcgtgcgctcctccttcctacagaaaaatgtgtttctaggcaacggcgggcggcggcgtcacttcctgccatttaaactcaggtccccacccctcgcagccccttctcctcgtttccacccctcccccctcggtcgtgggcctcattcacgcttccccgggcttggggagggggcggaggcccggcgtgacaagcggcccagactcccgtgggcgccgcacacctgttgtttgcagcagccagcgacccgcactaccgctctcggcgggcggggaagcggccgcagcggagccgacccggcaggtggccgcgggcggggccggcgagcgaaagtgcgcgggggcccgaccaccgcggggccgggacgcgatggcggcggcagagcccgcgagctcgggccagcaggcgccggcagggcaggggcagggccagcggccgccgccgcagcctccgcaggcgcaagccccgcagccgcccccgccgccgcagctcgggggcgcggggggcggcagcagcaggcacgagaagagcctggggctgctcactaccaagttcgtgtcgctgctgcaggaggccaaggacggcgttctggatctcaaagcggtgagctccggaggcggggacgggggcggacttcggaacccgtggcccccggggaagcccagcccctcgccgcgtgggtctagcggcgtggtgtagacgcgccttgcggggacccgggaccgggcaatccgaggaccatgtggcctgagggtaaccgagtgtctgttgctctgcgtccacctgtggcagaggctcacggggtaacgggcgctttgcccggagacaccgtggatatcgattttgctgttaagaatggatggttttaataggcgattccagttggaaccatgttcctgtagtttaaataaaaaggaggaaaaacaaaacccagtctg

SEQ ID NO: 281270 - DNA, 1833 bp, Homo sapiens
ttagatgagactgtttatgaacagagaaataagataggaggtgacatggataggcaattagtagctcctcctcaggattagtccataaggtgacacaaagtattcttattgtgttcttttatttttgcaggctttgtgtcatgaccttaatttctttttctgttccaacatctgctagcttttaaatggaataatttctttggtatttgcagtgtttgggagatgctttgaacatgctcagctattgtccccaagcaactgagtgggtcaaatttgagattggacttgttgtggatttaataatcaaccctttttggctttaaaatatgacttgccctttatttcactgttctcgttgtctttcctgaacaggctgctgatactttggctgtgaggcaaaaaaggagaatttatgatatcaccaatgtcttagagggaattgacttgattgaaaaaaagtcaaaaaacagtatccagtggaaaggtgtaggtgctggctgtaatactaaagaagtcatagatagattaagatatcttaaagctgaaattgaagatctagaactgaaggaaagagaacttgatcagcagaagttgtggctacagcaaagcatcaaaaatgtgatggacgattccattaataatagattttcctatgtaactcatgaagacatctgtaattgctttaatggtgatacacttttggccattcaggcaccttctggtacacaactggaggtacccattccagaaatgggtcagaatggacaaaagaaataccagatcaatctaaagagtcattcaggacctatccatgtgctgcttataaataaagagtcgagttcatctaagcccgtggtttttcctgttcccccacctgatgacctcacacagccttcctcccagtccttgactccagtgactccacagaaatccagcatggcaactcaaaatctgcctgagcaacatgtctctgaaagaagccaggctctgcagcagacatcagctacagatatatcttcagcaggatctattagtggagatatcattgatgagttaatgtcttctgacgtgtttcctctcttaaggctttctcctaccccggcagatgactacaactttaatttagatgataacgaaggagtttgtgatctgtttgatgtccagatactaaattattagattccatggaaacttgggactgttatctacctctaactgtgtaacattttagacttcttaataacctaaatatttaaaataatgaatgtaacaccttttttagttcactgattctgaagtgttcttccctaatactttctttacttcacaaaacttcaaccataaaaacaaagggctctgattgctttaggggataagtgatttaatatccacaaacgtccccactcccaaaagtaactatattctggatttcaacttttcttctaattgtgaatccttctgttttttcttcttaaggaggaaagttaaaggacactacaggtcatcaaaaacaagttggccaaggactcattacttgtcttatatttttactgccactaaactgcctgtatttctgtatgtccttctatccaaacagacgttcactgccacttgtaaagtgaaggatgtaaacgaggatatataactgtttcagtgaacagattttgtgaagtgccttctgttttagcactttaagtttatcacattttgttgacttctgacattccactttcctaggttataggaaagatctgtttatgtagtttgtttttaaaatgtgccaatgcctgtacattaacaagatttttaaaaataaaattgtataaaacattc

SEQ ID NO: 281271 - DNA, 1685 bp, Homo sapiens
ttaagccctgtgagccacctttcccccatcctttgtgcatagttaccattttactctttctgttgcccaggcaggaatgcagtggtgccatcttggctcactgcaacctccacctcctaggttcaagcgattctcctgcctcagcctcctgagtagctgggaccacaagcgtgcaccaccacgcccggctaatttttgtatttttagtagagatggggtttcaccacgttggccaggctggtctcgaactcctgacctcagatgatccaccctccttggcctcccaaagtgctgggattgcaggcgtgagccaccgcctggccaccattttactctttttaggtacagtaatctaatatccaaagtcttggactcagctaaagagggtatttaccttaaaaaaaaaaaaaaaaagactccatcttttgattcataattgtggtgggggcggggaatcaagacaaccttagtcactttggtattaccataattcttgtcttttcagggttgtcctgttcagctgcataaaacatcatgtattctaggtatttcctaccttcacttacatttttacttgccgatgtgctgccttcataaatgggtatattccgccacacatctagtaagcccccaatgcagtacacaatgtgtatcactgataaaactcgcacttctgccatgtcagtattatattcagttgagtggtctttagcatagtggcagtcctagtcatcctaaccttttagttaaggtaaaattacatatgtttatagaactcatatagacaagctagtttttaaaatcttcttccttttaaccagtttaggatgatctaggatagctaagttacctacatggtgactgttcggtctaattcagaaacagaagtactaaaagaatactaaaaagtttttacccattatctctatccctgttttctttttgcaattctcagctgcagggagcaagaaaatacacagcagataggaaatgtttgtttgcatcctggctttctcaaccgcactttacgtccttgaatattctagatatttactccttcaagaagtcaggagtatatccaggcctacctatcatccttgccatccccattaaccctcatttttcagtatgtgttttacatttatggttatttttcagtctatagtatctgttcactcattgctctatcacatctgagtttctccgtctttctttccactagattgtaagctccttaagggcaaggtcggcatataagcaaagttctgtaaacaccgtgaaggtaccatgagttctatgggtactcaataaatgcttgtgataatgatgcaatttctcagatgaactgattgtagtgactacctctaaaagccttcaatctacagtttttaaatttgtctcattgcatctgagttttagaaagccttcgatagaaagggaagatacttcatagcttgccagatgaatgcccatttccttatttccttttcctcacttttgatattttgcccagtgtctggtctggatatctgacatccataagggtattgaaatggatccttgtgtggttttcagataccagttatatatattatgaagcagaggtaacctaatattgtctaacactattgatacagtttatattttggaaatactgtatggatgatttattgaaataacttata

SEQ ID NO: 281272 - DNA, 1326 bp, Homo sapiens
ttaagccctgtgagccacctttcccccatcctttgtgcatagttaccattttactctttctgttgcccaggcaggaatgcagtggtgccatcttggctcactgcaacctccacctcctaggttcaagcgattctcctgcctcagcctcctgagtagctgggaccacaagcgtgcaccaccacgcccggctaatttttgtatttttagtagagatggggtttcaccacgttggccaggctggtctcgaactcctgacctcagatgatccaccctccttggcctcccaaagtgctgggattgcaggcgtgagccaccgcctggccaccattttactctttttaggtacagtaatctaatatccaaagtcttggactcagctaaagagggtatttaccttaaaaaaaaaaaaaaaaagactccatcttttgattcataattgtggtgggggcggggaatcaagacaaccttagtcactttggtattaccataattcttgtcttttcagggttgtcctgttcagctgcataaaacatcatgtattctaggtatttcctaccttcacttacatttttacttgccgatgtgctgccttcataaatgggtatattccgccacacatctagtaagcccccaatgcagtacacaatgtgtatcactgataaaactcgcacttctgccatgtcagtattatattcagttgagtggtctttagcatagtggcagtcctagtcatcctaaccttttagttaaggtaaaattacatatgtttatagaactcatatagacaagctagtttttaaaatcttcttccttttaaccagtttaggatgatctaggatagctaagttacctacatggtgactgttcggtctaattcagaaacagaagtactaaaagaatactaaaaagtttttacccattatctctatccctgttttctttttgcaattctcagctgcagggagcaagaaaatacacagcagataggaaatgtttgtttgcatcctggctttctcaaccgcactttacgtccttgaatattctagatatttactccttcaagaagtcaggagtatatccaggcctacctatcatccttgccatccccattaaccctcatttttcagtatgtgttttacatttatggttatttttcagtctatagtatctgttcactcattgctctatcacatctgagtttctccgtctttctttccactagattgtaagctccttaagggcaaggtcggcatataagcaaagttctgtaaacaccgtgaaggtaccatgagttctatgggtactcaataaatgcttgtgataatg

SEQ ID NO: 281273 - DNA, 1454 bp, Homo sapiens
agcggacgggcgcgcgcacgccgccttcgccgctggctccgtctgttggggggcgaacacgccgcggtcctcgcgtgagccaccgcctggccaccattttactctttttaggtacagtaatctaatatccaaagtcttggactcagctaaagagggtatttaccttaaaaaaaaaaaaaaaaagactccatcttttgattcataattgtggtgggggcggggaatcaagacaaccttagtcactttggtattaccataattcttgtcttttcagggttgtcctgttcagctgcataaaacatcatgtattctaggtatttcctaccttcacttacatttttacttgccgatgtgctgccttcataaatgggtatattccgccacacatctagtaagcccccaatgcagtacacaatgtgtatcactgataaaactcgcacttctgccatgtcagtattatattcagttgagtggtctttagcatagtggcagtcctagtcatcctaaccttttagttaaggtaaaattacatatgtttatagaactcatatagacaagctagtttttaaaatcttcttccttttaaccagtttaggatgatctaggatagctaagttacctacatggtgactgttcggtctaattcagaaacagaagtactaaaagaatactaaaaagtttttacccattatctctatccctgttttctttttgcaattctcagctgcagggagcaagaaaatacacagcagataggaaatgtttgtttgcatcctggctttctcaaccgcactttacgtccttgaatattctagatatttactccttcaagaagtcaggagtatatccaggcctacctatcatccttgccatccccattaaccctcatttttcagtatgtgttttacatttatggttatttttcagtctatagtatctgttcactcattgctctatcacatctgagtttctccgtctttctttccactagattgtaagctccttaagggcaaggtcggcatataagcaaagttctgtaaacaccgtgaaggtaccatgagttctatgggtactcaataaatgcttgtgataatgatgcaatttctcagatgaactgattgtagtgactacctctaaaagccttcaatctacagtttttaaatttgtctcattgcatctgagttttagaaagccttcgatagaaagggaagatacttcatagcttgccagatgaatgcccatttccttatttccttttcctcacttttgatattttgcccagtgtctggtctggatatctgacatccataagggtattgaaatggatccttgtgtggttttcagataccagttatatatattatgaagcagaggtaacctaatattgtctaacactattgatacagtttatattttggaaatactgtatggatgatttattgaaataacttata

SEQ ID NO: 281274 - DNA, 347 bp, Homo sapiens
ttcgtgggatggtatcttctgaaaaggaaaagtaaacactttatggagtctatggtttagcttaaagcaatattgagggatgcaaataataatatcaacactattacaaagcatgccaggcactattctaagccctttacataaatacccaattaatctaactaatgacccatgaacttggtactatttttatctccactttacagataaggacattgaggcacagagaagctaagtaacttgctcaagatcacacagatactaagtgtcccagctaaaattcaaatccagacagtctggctcctgagtcctcacctttaaccactctgtgacactagttctttatg

SEQ ID NO: 281275 - DNA, 798 bp, Homo sapiens
gactcagatcgcttcttgttggtatgtgtagcggcagtggccgccggcggagcagtctgagcccgacgatgaggccggggacgggagctgagcgtggaggcctcatgatggggcaccctggcatgcattatgccccaatgggaatgcaccctatgggtcagagagcgaatatgcctcctgtacctcatggaatgatgccgcagatgatgccccctatgggagggccaccaatgggacaaatgcctggaatgatgtcgtcagtaatgcctggaatgatgatgtctcatatgtctcaggcttccatgcagcctgccttaccggtaatcatgtgaaaataactattttctgtgaagtaatgttttgattgattgcttttatatatatggaataatatctatgtattttataggcaatcatgttagctgttgaagtgcctctgtagtactgtaataaaatacaagaattaccgtggactttcagtttcagtttcttttcttttctttgtttttttgagacagagtcttgctctgtcacccagtctggaatgcagtgagtgtcatgataacagctcactacagcctcaacctcgtgggctcaagtaatcctccgacctcagccttctgagtagctgagaccacaggcacgtgccaccacgccgagctaatttttaaattttttttgtagagatgaggtctccctgtgttgcctaagctggtgtcaaactcctgagctcaaatgatcctcctgcctcggcctccacagggatgacaggcatgagccactgtgcttgtcctggat

SEQ ID NO: 281276 - DNA, 1287 bp, Homo sapiens
gactcagatcgcttcttgttggtatgtgtagcggcagtggccgccggcggagcagtctgagcccgacgatgaggccggggacgggagctgagcgtggaggcctcatgatggggcaccctggcatgcattatgccccaatgggaatgcaccctatgggtcagagagcgaatatgcctcctgtacctcatggaatgatgccgcagatgatgccccctatgggagggccaccaatgggacaaatgcctggaatgatgtcgtcagtaatgcctggaatgatgatgtctcatatgtctcaggcttccatgcagcctgccttaccgccaggagtaaatagtatggatgtagcagcaggtacagcatctggtgcaaaatcaatgtggactgaacataaatcacctgatggaaggacttactactacaacactgaaaccaaacagtctacctgggagaaaccagatgatcttaaaacacctgctgagcaactcttatctaaatgcccctggaaggaatacaaatcagattctggaaagccttactattataattctcaaacaaaagaatctcgctgggccaaacctaaagaacttgaggatcttgaaggataccagaataccattgttgctggaagtcttattacaaaatcaaacctgcatgcaatgatcaaagctgaagaaagcagtaagcaagaagagtgcaccacaacatcaacagccccagtccctacaacagaaattccgaccacaatgagcaccatggctgctgccgaagcagcagctgctgttgttgcagcagcagcagcggcagcagcagcagcagctgcagccaatgctaatgcttccacttctgcttctaatactgtcagtggaactgttccagttgttcctgagcctgaagttacttccattgttgctactgttgtagataatgagaatacagtaactatttcaactgaggaacaagcacaacttactagtacccctgctattcaggatcaaagtgtggaagtatccagtaatactggagaagaaacatctaagcaagaaactgtagctgattttactcccaaaaaagaagaggaggagagccaaccagcaaagaaaacatacacttggaatacaaaggaagaggcaaagcaagcttttaaagaattattgaaagaaaagcgggtaccatcgaatgcttcatgggagcaggctatgaaaatgattattaatgatccacgatacagtgctttggcaaagttaagtgaaaaaaagcaagcctttaatgcctataaagtccagacag

SEQ ID NO: 281277 - DNA, 1413 bp, Homo sapiens
gactcagatcgcttcttgttggtatgtgtagcggcagtggccgccggcggagcagtctgagcccgacgatgaggccggggacgggagctgagcgtggaggcctcatggtgagtgaaatggagagccatcctccctcgcagggtcctggggacggggagcggagattgtccggctcaagcctctgctccggctcttgggtctctgctgacggcttcctgaggagacggccctcgatggggcaccctggcatgcattatgccccaatgggaatgcaccctatgggtcagagagcgaatatgcctcctgtacctcatggaatgatgccgcagatgatgccccctatgggagggccaccaatgggacaaatgcctggaatgatgtcgtcagtaatgcctggaatgatgatgtctcatatgtctcaggcttccatgcagcctgccttaccgccaggagtaaatagtatggatgtagcagcaggtacagcatctggtgcaaaatcaatgtggactgaacataaatcacctgatggaaggacttactactacaacactgaaaccaaacagtctacctgggagaaaccagatgatcttaaaacacctgctgagcaactcttatctaaatgcccctggaaggaatacaaatcagattctggaaagccttactattataattctcaaacaaaagaatctcgctgggccaaacctaaagaacttgaggatcttgaaggataccagaataccattgttgctggaagtcttattacaaaatcaaacctgcatgcaatgatcaaagctgaagaaagcagtaagcaagaagagtgcaccacaacatcaacagccccagtccctacaacagaaattccgaccacaatgagcaccatggctgctgccgaagcagcagctgctgttgttgcagcagcagcagcggcagcagcagcagcagctgcagccaatgctaatgcttccacttctgcttctaatactgtcagtggaactgttccagttgttcctgagcctgaagttacttccattgttgctactgttgtagataatgagaatacagtaactatttcaactgaggaacaagcacaacttactagtacccctgctattcaggatcaaagtgtggaagtatccagtaatactggagaagaaacatctaagcaagaaactgtagctgattttactcccaaaaaagaagaggaggagagccaaccagcaaagaaaacatacacttggaatacaaaggaagaggcaaagcaagcttttaaagaattattgaaagaaaagcgggtaccatcgaatgcttcatgggagcaggctatgaaaatgattattaatgatccacgatacagtgctttggcaaagttaagtgaaaaaaagcaagcctttaatgcctataaagtccagacag

SEQ ID NO: 281278 - DNA, 763 bp, Homo sapiens
  misc_feature (30)..(30): n is a, c, g, or t
  misc_feature (56)..(56): n is a, c, g, or t
  misc_feature (65)..(65): n is a, c, g, or t
  misc_feature (83)..(83): n is a, c, g, or t
  misc_feature (91)..(91): n is a, c, g, or t
  misc_feature (101)..(101): n is a, c, g, or t
  misc_feature (119)..(119): n is a, c, g, or t
  misc_feature (130)..(130): n is a, c, g, or t
gcctaagctcactataatacttctccatcnaatgcttatcgatgggacactccttnagacattgncgatcttgttggataccnggatgccntcgaggctgncagtcttgttacaagttnaatcccacatncaatgctcaatgctgaggacagcagtaagcaagaagagtgcaccacaacatcaacagccccagtccctacaacagaaattccgaccacaatgagcaccatggctgctgccgaagcagcagctgctgttgttgcagcagcagcagcggcagcagcagcagcagctgcagccaatgctaatgcttccacttctgcttctaatactgtcagtggaactgttccagttgttcctgagcctgaagttacttccattgttgctactgttgtagataatgagaatacagtaactatttcaactgaggaacaagcacaacttactagtacccctgctattcaggatcaaagtgtggaagtatccagtaatactggagaagaaacatctaagcaagaaactgtagctgattttactcccaaaaaagaagaggaggagagccaaccagcaaagaaaacatacacttggaatacaaaggaagaggcaaagcaagcttttaaagaattattgaaagaaaagcgggtaccatcgaatgcttcatgggagcaggctatgaaaatgattattaatgatccacgatacagtgctttggcaaagttaagtgaaaaaaagcaagcctttaatgcctataaagtccagacag

SEQ ID NO: 281279 - DNA, 407 bp, Homo sapiens
  misc_feature (296)..(296): n is a, c, g, or t
gtggaaacttgatgaggtacaaaataaatctgtagttaaatgtagaatttaacttgttgacttaataagtttttgagagactggaagaaggggagaaagactgtattcaataatcaagttggaggccagacgtggtggctcacacctataatccctaccgtttgggaggccaaggcaagcagatggcttgagcccaggagttcaagaccagccttggcaacatggcaaaaccctgtctctaggggaaaaaaaaaaaatacaaaaattagccgagcatggtggcacgtgcctgtagncccacctccttgggaggctgaggtggaaagatcacttgagcctgggaatgtcaaggctgcagtgagccataattgcaccactgcactccagggtgacagcgagaccctgtt

SEQ ID NO: 281280 - DNA, 878 bp, Homo sapiens
gactcagatcgcttcttgttggtatgtgtagcggcagtggccgccggcggagcagtctgagcccgacgatgaggccggggacgggagctgagcgtggaggcctcatgatggggcaccctggcatgcattatgccccaatgggaatgcaccctatgggtcagagagcgaatatgcctcctgtacctcatggaatgatgccgcagatgatgccccctatgggagggccaccaatgggacaaaaagataaaataaaacaatttgctactgccagatgcttctctcttttctggggccttctgtttccattgggccaatcaagatgcctggaatgatgtcgtcagtaatgcctggaatgatgatgtctcatatgtctcaggcttccatgcagcctgccttaccggtaatcatgtgaaaataactattttctgtgaagtaatgttttgattgattgcttttatatatatggaataatatctatgtattttataggcaatcatgttagctgttgaagtgcctctgtagtactgtaataaaatacaagaattaccgtggactttcagtttcagtttcttttcttttctttgtttttttgagacagagtcttgctctgtcacccagtctggaatgcagtgagtgtcatgataacagctcactacagcctcaacctcgtgggctcaagtaatcctccgacctcagccttctgagtagctgagaccacaggcacgtgccaccacgccgagctaatttttaaattttttttgtagagatgaggtctccctgtgttgcctaagctggtgtcaaactcctgagctcaaatgatcctcctgcctcggcctccacagggatgacaggcatgagccactgtgcttgtcctggat

SEQ ID NO: 281281 - DNA, 924 bp, Homo sapiens
gactcagatcgcttcttgttggtatgtgtagcggcagtggccgccggcggagcagtctgagcccgacgatgaggccggggacgggagctgagcgtggaggcctcatggtgagtgaaatggagagccatcctccctcgcagggtcctggggacggggagcggagattgtccggctcaagcctctgctccggctcttgggtctctgctgacggcttcctgaggagacggccctcgatggggcaccctggcatgcattatgccccaatgggaatgcaccctatgggtcagagagcgaatatgcctcctgtacctcatggaatgatgccgcagatgatgccccctatgggagggccaccaatgggacaaatgcctggaatgatgtcgtcagtaatgcctggaatgatgatgtctcatatgtctcaggcttccatgcagcctgccttaccggtaatcatgtgaaaataactattttctgtgaagtaatgttttgattgattgcttttatatatatggaataatatctatgtattttataggcaatcatgttagctgttgaagtgcctctgtagtactgtaataaaatacaagaattaccgtggactttcagtttcagtttcttttcttttctttgtttttttgagacagagtcttgctctgtcacccagtctggaatgcagtgagtgtcatgataacagctcactacagcctcaacctcgtgggctcaagtaatcctccgacctcagccttctgagtagctgagaccacaggcacgtgccaccacgccgagctaatttttaaattttttttgtagagatgaggtctccctgtgttgcctaagctggtgtcaaactcctgagctcaaatgatcctcctgcctcggcctccacagggatgacaggcatgagccactgtgcttgtcctggat

SEQ ID NO: 281282 - DNA, 942 bp, Homo sapiens
gactcagatcgcttcttgttggtatgtgtagcggcagtggccgccggcggagcagtctgagcccgacgatgaggccggggacgggagctgagcgtggaggcctcatgatggggcaccctggcatgcattatgccccaatgggaatgcaccctatgggtcagagagcgaatatgcctcctgtacctcatggaatgatgccgcagatgatgccccctatgggagggccaccaatgggacaaaaagataaaataaaacaatttgctactgccagatgcttctctcttttctggggccttctgtttccattgggccaatcaagttcctgctaccacatgagcccaagtcgtcactctcccatgcctaggttattcaacagtttttgaatgcctggaatgatgtcgtcagtaatgcctggaatgatgatgtctcatatgtctcaggcttccatgcagcctgccttaccggtaatcatgtgaaaataactattttctgtgaagtaatgttttgattgattgcttttatatatatggaataatatctatgtattttataggcaatcatgttagctgttgaagtgcctctgtagtactgtaataaaatacaagaattaccgtggactttcagtttcagtttcttttcttttctttgtttttttgagacagagtcttgctctgtcacccagtctggaatgcagtgagtgtcatgataacagctcactacagcctcaacctcgtgggctcaagtaatcctccgacctcagccttctgagtagctgagaccacaggcacgtgccaccacgccgagctaatttttaaattttttttgtagagatgaggtctccctgtgttgcctaagctggtgtcaaactcctgagctcaaatgatcctcctgcctcggcctccacagggatgacaggcatgagccactgtgcttgtcctggat

SEQ ID NO: 281283 - DNA, 145 bp, Homo sapiens
catggatttgctggtgcagtacaactaggcttaatagggacatgggagcaggctatgaaaatgattattaatgatccacgatacagtgctttggcaaagttaagtgaaaaaaagcaagcctttaatgcctataaagtccagacag

SEQ ID NO: 281284 - DNA, 1359 bp, Homo sapiens
gactcagatcgcttcttgttggtatgtgtagcggcagtggccgccggcggagcagtctgagcccgacgatgaggccggggacgggagctgagcgtggaggcctcatggtgagtgaaatggagagccatcctccctcgcagggtcctggggacggggagcggagattgtccggctcaagcctctgctccggctcttgggtctctgctgacggcttcctgaggagacggccctcgatggggcaccctggcatgcattatgccccaatgggaatgcaccctatgggtcagagagcgaatatgcctcctgtacctcatggaatgatgccgcagatgatgccccctatgggagggccaccaatgggacaaatgcctggaatgatgtcgtcagtaatgcctggaatgatgatgtctcatatgtctcaggcttccatgcagcctgccttaccgccaggagtaaatagtatggatgtagcagcaggtacagcatctggtgcaaaatcaatgtggactgaacataaatcacctgatggaaggacttactactacaacactgaaaccaaacagtctacctgggagaaaccagatgatcttaaaacacctgctgagcaactcttatctaaatgcccctggaaggaatacaaatcagattctggaaagccttactattataattctcaaacaaaagaatctcgctgggccaaacctaaagaacttgaggatcttgaagcaatgatcaaagctgaagaaagcagtaagcaagaagagtgcaccacaacatcaacagccccagtccctacaacagaaattccgaccacaatgagcaccatggctgctgccgaagcagcagctgctgttgttgcagcagcagcagcggcagcagcagcagcagctgcagccaatgctaatgcttccacttctgcttctaatactgtcagtggaactgttccagttgttcctgagcctgaagttacttccattgttgctactgttgtagataatgagaatacagtaactatttcaactgaggaacaagcacaacttactagtacccctgctattcaggatcaaagtgtggaagtatccagtaatactggagaagaaacatctaagcaagaaactgtagctgattttactcccaaaaaagaagaggaggagagccaaccagcaaagaaaacatacacttggaatacaaaggaagaggcaaagcaagcttttaaagaattattgaaagaaaagcgggtaccatcgaatgcttcatgggagcaggctatgaaaatgattattaatgatccacgatacagtgctttggcaaagttaagtgaaaaaaagcaagcctttaatgcctataaagtccagacag

SEQ ID NO: 281285 - DNA, 1330 bp, Homo sapiens
atcgaaccctctcctccgaacccctcctttcgccttccccgcctcctcccctccgcctcgagcaccgcgcgcgcgatctcggtcccagccaccgctaacactacaggctgcttacccccgccccctccaccctacccctggcggcctcagatggggcaccctggcatgcattatgccccaatgggaatgcaccctatgggtcagagagcgaatatgcctcctgtacctcatggaatgatgccgcagatgatgccccctatgggagggccaccaatgggacaaatgcctggaatgatgtcgtcagtaatgcctggaatgatgatgtctcatatgtctcaggcttccatgcagcctgccttaccgccaggagtaaatagtatggatgtagcagcaggtacagcatctggtgcaaaatcaatgtggactgaacataaatcacctgatggaaggacttactactacaacactgaaaccaaacagtctacctgggagaaaccagatgatcttaaaacacctgctgagcaactcttatctaaatgcccctggaaggaatacaaatcagattctggaaagccttactattataattctcaaacaaaagaatctcgctgggccaaacctaaagaacttgaggatcttgaaggataccagaataccattgttgctggaagtcttattacaaaatcaaacctgcatgcaatgatcaaagctgaagaaagcagtaagcaagaagagtgcaccacaacatcaacagccccagtccctacaacagaaattccgaccacaatgagcaccatggctgctgccgaagcagcagctgctgttgttgcagcagcagcagcggcagcagcagcagcagctgcagccaatgctaatgcttccacttctgcttctaatactgtcagtggaactgttccagttgttcctgagcctgaagttacttccattgttgctactgttgtagataatgagaatacagtaactatttcaactgaggaacaagcacaacttactagtacccctgctattcaggatcaaagtgtggaagtatccagtaatactggagaagaaacatctaagcaagaaactgtagctgattttactcccaaaaaagaagaggaggagagccaaccagcaaagaaaacatacacttggaatacaaaggaagaggcaaagcaagcttttaaagaattattgaaagaaaagcgggtaccatcgaatgcttcatgggagcaggctatgaaaatgattattaatgatccacgatacagtgctttggcaaagttaagtgaaaaaaagcaagcctttaatgcctataaagtccagacag

SEQ ID NO: 281286 - DNA, 1195 bp, Homo sapiens
gactcagatcgcttcttgttggtatgtgtagcggcagtggccgccggcggagcagtctgagcccgacgatgaggccggggacgggagctgagcgtggaggcctcatgatggggcaccctggcatgcattatgccccaatgggaatgcaccctatgggtcagagagcgaatatgcctcctgtacctcatggaatgatgccgcagatgatgccccctatgggagggccaccaatgggacaaatgcctggaatgatgtcgtcagtaatgcctggaatgatgatgtctcatatgtctcaggcttccatgcagcctgccttaccgccaggagtaaatagtatggatgtagcagcaggtacagcatctggtgcaaaatcaatgtggactgaacataaatcacctgatggaaggacttactactacaacactgaaaccaaacagtctacctgggagaaaccagatgatcttaaaacacctgctgagcaactcttatctaaatgcccctggaaggagataccagaataccattgttgctggaagtcttattacaaaatcaaacctgcatgcaatgatcaaagctgaagaaagcagtaagcaagaagagtgcaccacaacatcaacagccccagtccctacaacagaaattccgaccacaatgagcaccatggctgctgccgaagcagcagctgctgttgttgcagcagcagcagcggcagcagcagcagcagctgcagccaatgctaatgcttccacttctgcttctaatactgtcagtggaactgttccagttgttcctgagcctgaagttacttccattgttgctactgttgtagataatgagaatacagtaactatttcaactgaggaacaagcacaacttactagtacccctgctattcaggatcaaagtgtggaagtatccagtaatactggagaagaaacatctaagcaagaaactgtagctgattttactcccaaaaaagaagaggaggagagccaaccagcaaagaaaacatacacttggaatacaaaggaagaggcaaagcaagcttttaaagaattattgaaagaaaagcgggtaccatcgaatgcttcatgggagcaggctatgaaaatgattattaatgatccacgatacagtgctttggcaaagttaagtgaaaaaaagcaagcctttaatgcctataaagtccagacag

SEQ ID NO: 281287 - DNA, 273 bp, Homo sapiens
catggatttgctggtgcagtacaactaggcttaatagggacatgggagcaggctatgaaaatgattattaatgatccacgatacagtgctttggcaaagttaagtgaaaaaaagcaagcctttaatgcctataaagtccagacagaaaaagaagaaaaagaagaagcaagatcaaagtacaaagaggctaaggaatcctttcagcgttttcttgaaatctacatgaataaaaggatgtaataaggaaggtaaataagcaatcagaagtatata

SEQ ID NO: 281288 - DNA, 463 bp, Homo sapiens
ggttattcaacagtttttgagttgagttggttttcttgcttcaaggatgcccccctgcccccacaaattttagatttcaatgtgttatctccttgcccaagaatctccagtactttcagtgcctataacatagtatctaaattccacagcttaactttaaagaacctccccatagtacatgtcaaagcaggattcaaggctgcatgtctttacactccctaatttgaacttaggctggtcttttcacggtgtcttgagtgattatattagttcacaacttcaaacttaggctgttcttcttaccctcctgcccccagctcagtatcaccatgaagtttgctttgcttacctatgttgtactatttcaagtcctgccttctccaaaagtttctcaaaaatgacttttgccaacatatacctccccttcagattattaaagaaaatatttgtaatctacccataa

SEQ ID NO: 281289 - DNA, 571 bp, Homo sapiens
aaaccactaatatttgattcttttgcctgtgtttactcttacatggtatttttatattagtgctttggcaaagttaagtgaaaaaaagcaagcctttaatgcctataaagtccagacagaaaaagaagaaaaagaagaagcaagatcaaagtacaaagaggctaaggaatcctttcagcgttttcttgaaaatcatgagaaaatgacttctacaaccagatacaagtaagatgtttagtgttacatggcctatgtttactacattgttgtttgtgtcatacttttctgccatgtgcagtagctgatccagagctcattaaataaaactagatgattatgaatgtggaaacttgatgaggtacaaaataaatctgtagttaaatgtagaatttaacttgttgacttaataagtttttgagagactggaagaaggggagaaagactgtattcaataatcaagttggaggccagacgtggtggctcacacctataatccctaccgtttgggaggccaaggcaagcagatggcttgagcccaggagttcaagaccagccttggcaacatggcaaa

SEQ ID NO: 281290 - DNA, 1606 bp, Homo sapiens
  misc_feature (497)..(497): n is a, c, g, or t
  misc_feature (631)..(631): n is a, c, g, or t
gactcagatcgcttcttgttggtatgtgtagcggcagtggccgccggcggagcagtctgagcccgacgatgaggccggggacgggagctgagcgtggaggcctcatgatggggcaccctggcatgcattatgccccaatgggaatgcaccctatgggtcagagagcgaatatgcctcctgtacctcatggaatgatgccgcagatgatgccccctatgggagggccaccaatgggacaaatgcctggaatgatgtcgtcagtaatgcctggaatgatgatgtctcatatgtctcaggcttccatgcagcctgccttaccgctaaactaaacggatattcactctgaagtgggataaatgaagatgtggagtttcatgttcatgtagggcaggttttgccactatagtgagttttggtaccatacttgaaaaaagttggctttcagagggttttggtttccagaattgtgggtaaaggattgaggaccttgtgtacanttggtgaccatataacatttaaactactcccgtagtctcggttgctgatctcttttacaatttatagcaagctcggggaactgagaccactaaaagttttgctaagaatatgagtcagaggcttgaggattatncatagcagccaggagtaaatagtatggatgtagcagcaggtacagcatctggtgcaaaatcaatgtggactgaacataaatcacctgatggaaggacttactactacaacactgaaaccaaacagtctacctgggagaaaccagatgatcttaaaacacctgctgagcaactcttatctaaatgcccctggaaggaatacaaatcagattctggaaagccttactattataattctcaaacaaaagaatctcgctgggccaaacctaaagaacttgaggatcttgaaggataccagaataccattgttgctggaagtcttattacaaaatcaaacctgcatgcaatgatcaaagctgaagaaagcagtaagcaagaagagtgcaccacaacatcaacagccccagtccctacaacagaaattccgaccacaatgagcaccatggctgctgccgaagcagcagctgctgttgttgcagcagcagcagcggcagcagcagcagcagctgcagccaatgctaatgcttccacttctgcttctaatactgtcagtggaactgttccagttgttcctgagcctgaagttacttccattgttgctactgttgtagataatgagaatacagtaactatttcaactgaggaacaagcacaacttactagtacccctgctattcaggatcaaagtgtggaagtatccagtaatactggagaagaaacatctaagcaagaaactgtagctgattttactcccaaaaaagaagaggaggagagccaaccagcaaagaaaacatacacttggaatacaaaggaagaggcaaagcaagcttttaaagaattattgaaagaaaagcgggtaccatcgaatgcttcatgggagcaggctatgaaaatgattattaatgatccacgatacagtgctttggcaaagttaagtgaaaaaaagcaagcctttaatgcctataaagtccagacag

SEQ ID NO: 281291 - DNA, 356 bp, Homo sapiens
  misc_feature (245)..(245): n is a, c, g, or t
gcctactactactataccgctgtgagaagacgacagaaggggagaaagactgtattcaataatcaagttggaggccagacgtggtggctcacacctataatccctaccgtttgggaggccaaggcaagcagatggcttgagcccaggagttcaagaccagccttggcaacatggcaaaaccctgtctctaggggaaaaaaaaaaaatacaaaaattagccgagcatggtggcacgtgcctgtagncccacctccttgggaggctgaggtggaaagatcacttgagcctgggaatgtcaaggctgcagtgagccataattgcaccactgcactccagggtgacagcgagaccctgtt

SEQ ID NO: 281292 - DNA, 1415 bp, Homo sapiens
gactcagatcgcttcttgttggtatgtgtagcggcagtggccgccggcggagcagtctgagcccgacgatgaggccggggacgggagctgagcgtggaggcctcatgatggggcaccctggcatgcattatgccccaatgggaatgcaccctatgggtcagagagcgaatatgcctcctgtacctcatggaatgatgccgcagatgatgccccctatgggagggccaccaatgggacaaatgcctggaatgatgtcgtcagtaatgcctggaatgatgatgtctcatatgtctcaggcttccatgcagcctgccttaccgccaggagtaaatagtatggatgtagcagcaggtacagcatctggtgcaaaatcaatgtggactgaacataaatcacctgatggaaggacttactactacaacactgaaaccaaacagtctacctgggagaaaccagatgatcttaaaacacctgctgagcaactcttatctaaatgcccctggaaggaatacaaatcagattctggaaagccttactattataattctcaaacaaaagaatctcgctgggccaaacctaaagaacttgaggatcttgaaggataccagaataccattgttgctggaagtcttattacaaaatcaaacctgcatgcaatgatcaaagctgaagaaagcagtaagcaagaagagtgcaccacaacatcaacagccccagtccctacaacagaaattccgaccacaatgagcaccatggctgctgccgaagcagcagctgctgttgttgcagcagcagcagcggcagcagcagcagcagctgcagccaatgctaatgcttccacttctgcttctaatactgtcagtggaactgttccagttgttcctgagcctgaagttacttccattgttgctactgttgtagataatgagaatacagtaactatttcaactgaggaacaagcacaacttactagtacccctgctattcaggatcaaagtgtggaagtatccagtaatactggagaagaaacatctaagcaagaaactgtagctgattttactcccaaaaaagaagaggaggagagccaaccagcaaagaaaacatacacttggaatacaaaggaagaggcaaagcaagcttttaaagaattattgaaagaaaagcgggtaccatcgaatgcttcatgggagcaggctatgaaaatgattattaatgatccacgatacagtgctttggcaaagttaagtgaaaaaaagcaagcctttaatgcctataaagtccagacagaaaaagaagaaaaagaagaagcaagatcaaagtacaaagaggctaaggaatcctttcagcgttttcttgaaatctacatgaataaaaggatgtaataaggaaggtaaataagcaatcagaagtatata

SEQ ID NO: 281293 - DNA, 934 bp, Homo sapiens
gactcagatcgcttcttgttggtatgtgtagcggcagtggccgccggcggagcagtctgagcccgacgatgaggccggggacgggagctgagcgtggaggcctcatgatggggcaccctggcatgcattatgccccaatgggaatgcaccctatgggtcagagagcgaatatgcctcctgtacctcatggaatgatgccgcagatgatgccccctatgggagggccaccaatgggacaaatgcctggaatgatgtcgtcagtaatgcctggaatgatgatgtctcatatgtctcaggcttccatgcagcctgccttaccgccaggagtaaatagtatggatgtagcagcaggtacagcatctggtgcaaaatcaatgtggactgaacataaatcacctgatggaaggacttactactacaacactgaaaccaaacagtctacctgggagaaaccagatgatcttaaaacacctgctgagcaactcttatctaaatgcccctggaaggaatacaaatcagattctggaaagccttactattataattctcaaacaaaagaatctcgctgggccaaacctaaagaacttgaggatcttgaaggaacaagcacaacttactagtacccctgctattcaggatcaaagtgtggaagtatccagtaatactggagaagaaacatctaagcaagaaactgtagctgattttactcccaaaaaagaagaggaggagagccaaccagcaaagaaaacatacacttggaatacaaaggaagaggcaaagcaagcttttaaagaattattgaaagaaaagcgggtaccatcgaatgcttcatgggagcaggctatgaaaatgattattaatgatccacgatacagtgctttggcaaagttaagtgaaaaaaagcaagcctttaatgcctataaagtccagacag

SEQ ID NO: 281294 - DNA, 470 bp, Homo sapiens
agcagcagcagctgcagccaatgctaatgcttccacttctgcttctaatactgtcagtggaactgttccagttgttcctgagcctgaagttacttccattgttgctactgttgtagataatgagaatacagtaactatttcaactgaggaacaagcacaacttactagtacccctgctattcaggatcaaagtgtggaagtatccagtaatactggagaagaaacatctaagcaagaaactgtagctgagtaagtttagtaacttgtcttctgaaaatcagtaccagattgcattaaataaaagtaattgccagtttagttagtggccattaatagtttaaataaatttttttgagaatcgtaatatcaccgttaagacagttgatcagttttcaggccgaattttggagggttatgccagcaaacttgaaaaatagttcagtgaaattttaacaagtagagccaaggct

SEQ ID NO: 281295 - DNA, 1821 bp, Homo sapiens
  misc_feature (1816)..(1820): n is a, c, g, or t
cgcgccgcttccggtctgcagccttgtagtggggctggagcagagcctgccgcgaacccccggagcccacgatccctcgtgccatccctcgaatccaccagcacgagcgtcccacccgcgcctgggaccatggccactgactcatgggccctggcggtggacgagcaggaagctgcggctgagtcgttgagcaacttgcatcttaaggaagagaaaatcaaaccagataccaatggtgctgttgtcaagaccaatgccaatgcagagaagacagatgaagaagagaaagaggacagagctgcccagtccttactcaacaagctgatcagaagcaaccttgttgataacacaaaccaagtggaagtcctgcagcgggatccaaactcccctctgtactcggtgaagtcttttgaagagcttcggctgaaaccacagcttctccaaggagtctatgccatgggtttcaatcgtccatccaagatacaagagaacgcattgccactgatgcttgctgagcccccacagaacttaattgcccaatctcagtctggtactggtaaaacagctgccttcgtgctggccatgcttagccaagtagaacctgcaaacaaatacccccagtgtctatgtctctccccaacgtatgagctcgccctccaaacaggaaaagtgattgaacaaatgggcaaattttaccctgaactgaagctagcttatgctgttcgaggcaataaattggaaagaggccagaagatcagtgagcagattgtcattggcacccctgggactgtgctggactggtgctccaagctcaagttcattgatcccaagaaaatcaaggtgtttgttctggatgaggctgatgtcatgatagccactcagggccaccaagatcagagcatccgcatccagaggatgctgcccaggaactgccagatgctgcttttctccgccacctttgaagactctgtgtggaagtttgcccagaaagtggtcccagacccaaacgttatcaaactgaagcgtgaggaagagaccctggacaccatcaagcagtactatgtcctgtgcagcagcagagacgagaagttccaggccttgtgtaacctctacggggccatcaccattgctcaagccatgatcttctgccatactcgcaaaacagctagttggctggcagcagagctctcaaaagaaggccaccaggtggctctgctgagtggggagatgatggtggaacagagggctgcagtgattgagcgcttccgagagggcaaagagaaggttttggtgaccaccaacgtgtgtgcccgcggcattgatgttgaacaagtgtctgtcgtcatcaactttgatcttcccgtggacaaggacgggaatcctgacaatgagacctacctgcaccggatcgggcgcacgggccgctttggcaagaggggcctggcagtgaacatggtggacagcaagcacagcatgaacatcctgaacagaatccaggagcattttaataagaagatagaaagattggacacagatgatttggacgagattgagaaaatagccaactgagaagctccaccagccactgatgccagccctggcactgcccctgcacaggagacaagtgcgttcagggcacaggccccgacatcaccccaaggacaacggcacaagtagagagaaactacctacctcacttcaaattatgtttggacttgacaaaaatgtatgcaaatgatgggggatggtagaaaaaaattatttacacaaccttggaagattaggcatgaatacacagagatttaccttttggaannnnna

SEQ ID NO: 281296 - DNA, 1718 bp, Homo sapiens
  misc_feature (1713)..(1717): n is a, c, g, or t
cgcgccgcttccggtctgcagccttgtagtggggctggagcagagcctgccgcgaacccccggagcccacgatccctcgtgccatccctcgaatccaccagcacgagcgtcccacccgcgcctgggaccatggccactgactcatgggccctggcggtggacgagcaggaagctgcggctgagtcgaggacagagctgcccagtccttactcaacaagctgatcagaagcaaccttgttgataacacaaaccaagtggaagtcctgcagcgggatccaaactcccctctgtactcggtgaagtcttttgaagagcttcggctgaaaccacagcttctccaaggagtctatgccatgggtttcaatcgtccatccaagatacaagagaacgcattgccactgatgcttgctgagcccccacagaacttaattgcccaatctcagtctggtactggtaaaacagctgccttcgtgctggccatgcttagccaagtagaacctgcaaacaaatacccccagtgtctatgtctctccccaacgtatgagctcgccctccaaacaggaaaagtgattgaacaaatgggcaaattttaccctgaactgaagctagcttatgctgttcgaggcaataaattggaaagaggccagaagatcagtgagcagattgtcattggcacccctgggactgtgctggactggtgctccaagctcaagttcattgatcccaagaaaatcaaggtgtttgttctggatgaggctgatgtcatgatagccactcagggccaccaagatcagagcatccgcatccagaggatgctgcccaggaactgccagatgctgcttttctccgccacctttgaagactctgtgtggaagtttgcccagaaagtggtcccagacccaaacgttatcaaactgaagcgtgaggaagagaccctggacaccatcaagcagtactatgtcctgtgcagcagcagagacgagaagttccaggccttgtgtaacctctacggggccatcaccattgctcaagccatgatcttctgccatactcgcaaaacagctagttggctggcagcagagctctcaaaagaaggccaccaggtggctctgctgagtggggagatgatggtggaacagagggctgcagtgattgagcgcttccgagagggcaaagagaaggttttggtgaccaccaacgtgtgtgcccgcggcattgatgttgaacaagtgtctgtcgtcatcaactttgatcttcccgtggacaaggacgggaatcctgacaatgagacctacctgcaccggatcgggcgcacgggccgctttggcaagaggggcctggcagtgaacatggtggacagcaagcacagcatgaacatcctgaacagaatccaggagcattttaataagaagatagaaagattggacacagatgatttggacgagattgagaaaatagccaactgagaagctccaccagccactgatgccagccctggcactgcccctgcacaggagacaagtgcgttcagggcacaggccccgacatcaccccaaggacaacggcacaagtagagagaaactacctacctcacttcaaattatgtttggacttgacaaaaatgtatgcaaatgatgggggatggtagaaaaaaattatttacacaaccttggaagattaggcatgaatacacagagatttaccttttggaannnnna

SEQ ID NO: 281297 - DNA, 1728 bp, Homo sapiens
  misc_feature (1723)..(1727): n is a, c, g, or t
cgcgccgcttccggtctgcagccttgtagtggggctggagcagagcctgccgcgaacccccggagcccacgatccctcgtgccatccctcgaatccaccagcacgagcgtcccacccgcgcctgggaccatggccactgactcatgggccctggcggtggacgagcaggaagctgcggctgagtcgttgagcaacttgcatcttaaggaagagaaaatcaaaccagataccaatggtgctgttgtcaagaccaatgccaatgcagagaagacagatgaagaagagaaagaggacagagctgcccagtccttactcaacaagctgatcagaagcaaccttgttgataacacaaaccaagtggaagtcctgcagcgggatccaaactcccctctgtactcggtgaagtcttttgaagagcttcggctcccacagaacttaattgcccaatctcagtctggtactggtaaaacagctgccttcgtgctggccatgcttagccaagtagaacctgcaaacaaatacccccagtgtctatgtctctccccaacgtatgagctcgccctccaaacaggaaaagtgattgaacaaatgggcaaattttaccctgaactgaagctagcttatgctgttcgaggcaataaattggaaagaggccagaagatcagtgagcagattgtcattggcacccctgggactgtgctggactggtgctccaagctcaagttcattgatcccaagaaaatcaaggtgtttgttctggatgaggctgatgtcatgatagccactcagggccaccaagatcagagcatccgcatccagaggatgctgcccaggaactgccagatgctgcttttctccgccacctttgaagactctgtgtggaagtttgcccagaaagtggtcccagacccaaacgttatcaaactgaagcgtgaggaagagaccctggacaccatcaagcagtactatgtcctgtgcagcagcagagacgagaagttccaggccttgtgtaacctctacggggccatcaccattgctcaagccatgatcttctgccatactcgcaaaacagctagttggctggcagcagagctctcaaaagaaggccaccaggtggctctgctgagtggggagatgatggtggaacagagggctgcagtgattgagcgcttccgagagggcaaagagaaggttttggtgaccaccaacgtgtgtgcccgcggcattgatgttgaacaagtgtctgtcgtcatcaactttgatcttcccgtggacaaggacgggaatcctgacaatgagacctacctgcaccggatcgggcgcacgggccgctttggcaagaggggcctggcagtgaacatggtggacagcaagcacagcatgaacatcctgaacagaatccaggagcattttaataagaagatagaaagattggacacagatgatttggacgagattgagaaaatagccaactgagaagctccaccagccactgatgccagccctggcactgcccctgcacaggagacaagtgcgttcagggcacaggccccgacatcaccccaaggacaacggcacaagtagagagaaactacctacctcacttcaaattatgtttggacttgacaaaaatgtatgcaaatgatgggggatggtagaaaaaaattatttacacaaccttggaagattaggcatgaatacacagagatttaccttttggaannnnna

SEQ ID NO: 281298 - DNA, 1747 bp, Homo sapiens
  misc_feature (1742)..(1746): n is a, c, g, or t
agcagcggttgttggagtgtaactgccatgctcagccgcgatggctggggctgccgggcgcgtccaagatcgcgccctgcggcggtttcccatcaccctgcctgtgggcgacttgagcaacttgcatcttaaggaagagaaaatcaaaccagataccaatggtgctgttgtcaagaccaatgccaatgcagagaagacagatgaagaagagaaagaggacagagctgcccagtccttactcaacaagctgatcagaagcaaccttgttgataacacaaaccaagtggaagtcctgcagcgggatccaaactcccctctgtactcggtgaagtcttttgaagagcttcggctgaaaccacagcttctccaaggagtctatgccatgggtttcaatcgtccatccaagatacaagagaacgcattgccactgatgcttgctgagcccccacagaacttaattgcccaatctcagtctggtactggtaaaacagctgccttcgtgctggccatgcttagccaagtagaacctgcaaacaaatacccccagtgtctatgtctctccccaacgtatgagctcgccctccaaacaggaaaagtgattgaacaaatgggcaaattttaccctgaactgaagctagcttatgctgttcgaggcaataaattggaaagaggccagaagatcagtgagcagattgtcattggcacccctgggactgtgctggactggtgctccaagctcaagttcattgatcccaagaaaatcaaggtgtttgttctggatgaggctgatgtcatgatagccactcagggccaccaagatcagagcatccgcatccagaggatgctgcccaggaactgccagatgctgcttttctccgccacctttgaagactctgtgtggaagtttgcccagaaagtggtcccagacccaaacgttatcaaactgaagcgtgaggaagagaccctggacaccatcaagcagtactatgtcctgtgcagcagcagagacgagaagttccaggccttgtgtaacctctacggggccatcaccattgctcaagccatgatcttctgccatactcgcaaaacagctagttggctggcagcagagctctcaaaagaaggccaccaggtggctctgctgagtggggagatgatggtggaacagagggctgcagtgattgagcgcttccgagagggcaaagagaaggttttggtgaccaccaacgtgtgtgcccgcggcattgatgttgaacaagtgtctgtcgtcatcaactttgatcttcccgtggacaaggacgggaatcctgacaatgagacctacctgcaccggatcgggcgcacgggccgctttggcaagaggggcctggcagtgaacatggtggacagcaagcacagcatgaacatcctgaacagaatccaggagcattttaataagaagatagaaagattggacacagatgatttggacgagattgagaaaatagccaactgagaagctccaccagccactgatgccagccctggcactgcccctgcacaggagacaagtgcgttcagggcacaggccccgacatcaccccaaggacaacggcacaagtagagagaaactacctacctcacttcaaattatgtttggacttgacaaaaatgtatgcaaatgatgggggatggtagaaaaaaattatttacacaaccttggaagattaggcatgaatacacagagatttaccttttggaannnnna

SEQ ID NO: 281299 - DNA, 1678 bp, Homo sapiens
  misc_feature (1673)..(1677): n is a, c, g, or t
tgggaaggcggctctaacttggctgatgcaactgcgagaaaagttgagcaacttgcatcttaaggaagagaaaatcaaaccagataccaatggtgctgttgtcaagaccaatgccaatgcagagaagacagatgaagaagagaaagaggacagagctgcccagtccttactcaacaagctgatcagaagcaaccttgttgataacacaaaccaagtggaagtcctgcagcgggatccaaactcccctctgtactcggtgaagtcttttgaagagcttcggctgaaaccacagcttctccaaggagtctatgccatgggtttcaatcgtccatccaagatacaagagaacgcattgccactgatgcttgctgagcccccacagaacttaattgcccaatctcagtctggtactggtaaaacagctgccttcgtgctggccatgcttagccaagtagaacctgcaaacaaatacccccagtgtctatgtctctccccaacgtatgagctcgccctccaaacaggaaaagtgattgaacaaatgggcaaattttaccctgaactgaagctagcttatgctgttcgaggcaataaattggaaagaggccagaagatcagtgagcagattgtcattggcacccctgggactgtgctggactggtgctccaagctcaagttcattgatcccaagaaaatcaaggtgtttgttctggatgaggctgatgtcatgatagccactcagggccaccaagatcagagcatccgcatccagaggatgctgcccaggaactgccagatgctgcttttctccgccacctttgaagactctgtgtggaagtttgcccagaaagtggtcccagacccaaacgttatcaaactgaagcgtgaggaagagaccctggacaccatcaagcagtactatgtcctgtgcagcagcagagacgagaagttccaggccttgtgtaacctctacggggccatcaccattgctcaagccatgatcttctgccatactcgcaaaacagctagttggctggcagcagagctctcaaaagaaggccaccaggtggctctgctgagtggggagatgatggtggaacagagggctgcagtgattgagcgcttccgagagggcaaagagaaggttttggtgaccaccaacgtgtgtgcccgcggcattgatgttgaacaagtgtctgtcgtcatcaactttgatcttcccgtggacaaggacgggaatcctgacaatgagacctacctgcaccggatcgggcgcacgggccgctttggcaagaggggcctggcagtgaacatggtggacagcaagcacagcatgaacatcctgaacagaatccaggagcattttaataagaagatagaaagattggacacagatgatttggacgagattgagaaaatagccaactgagaagctccaccagccactgatgccagccctggcactgcccctgcacaggagacaagtgcgttcagggcacaggccccgacatcaccccaaggacaacggcacaagtagagagaaactacctacctcacttcaaattatgtttggacttgacaaaaatgtatgcaaatgatgggggatggtagaaaaaaattatttacacaaccttggaagattaggcatgaatacacagagatttaccttttggaannnnna

SEQ ID NO: 281300 - DNA, 1679 bp, Homo sapiens
  misc_feature (1674)..(1678): n is a, c, g, or t
cgcgccgcttccggtctgcagccttgtagtggggctggagcagagcctgccgcgaacccccggagcccacgatccctcgtgccatccctcgaatccaccagcacgagcgtcccacccgcgcctgggaccatggccactgactcatgggccctggcggtggacgagcaggaagctgcggctgagtcggtgctgttgtcaagaccaatgccaatgcagagaagacagatgaagaagagaaagaggacagagctgcccagtccttactcaacaagctgatcagaagcaaccttgttgataacacaaaccaagtggaagtcctgcagcgggatccaaactcccctctgtactcggtgaagtcttttgaagagcttcggctcccacagaacttaattgcccaatctcagtctggtactggtaaaacagctgccttcgtgctggccatgcttagccaagtagaacctgcaaacaaatacccccagtgtctatgtctctccccaacgtatgagctcgccctccaaacaggaaaagtgattgaacaaatgggcaaattttaccctgaactgaagctagcttatgctgttcgaggcaataaattggaaagaggccagaagatcagtgagcagattgtcattggcacccctgggactgtgctggactggtgctccaagctcaagttcattgatcccaagaaaatcaaggtgtttgttctggatgaggctgatgtcatgatagccactcagggccaccaagatcagagcatccgcatccagaggatgctgcccaggaactgccagatgctgcttttctccgccacctttgaagactctgtgtggaagtttgcccagaaagtggtcccagacccaaacgttatcaaactgaagcgtgaggaagagaccctggacaccatcaagcagtactatgtcctgtgcagcagcagagacgagaagttccaggccttgtgtaacctctacggggccatcaccattgctcaagccatgatcttctgccatactcgcaaaacagctagttggctggcagcagagctctcaaaagaaggccaccaggtggctctgctgagtggggagatgatggtggaacagagggctgcagtgattgagcgcttccgagagggcaaagagaaggttttggtgaccaccaacgtgtgtgcccgcggcattgatgttgaacaagtgtctgtcgtcatcaactttgatcttcccgtggacaaggacgggaatcctgacaatgagacctacctgcaccggatcgggcgcacgggccgctttggcaagaggggcctggcagtgaacatggtggacagcaagcacagcatgaacatcctgaacagaatccaggagcattttaataagaagatagaaagattggacacagatgatttggacgagattgagaaaatagccaactgagaagctccaccagccactgatgccagccctggcactgcccctgcacaggagacaagtgcgttcagggcacaggccccgacatcaccccaaggacaacggcacaagtagagagaaactacctacctcacttcaaattatgtttggacttgacaaaaatgtatgcaaatgatgggggatggtagaaaaaaattatttacacaaccttggaagattaggcatgaatacacagagatttaccttttggaannnnna

SEQ ID NO: 281301 - DNA, 1774 bp, Homo sapiens
  misc_feature (108)..(108): n is a, c, g, or t
  misc_feature (1769)..(1773): n is a, c, g, or t
gcccccggctcccggaggtcgacattttggtttccataggcaaagtcctaacaccacaattgacatagttaaaaaggggagacggtaacgtgtttggtagaggttacntatcttgctatagttgtttattttagttgctgagtgatacacagccctcaaagagtctgacattgtgcccatggttacacttgtccgggggagaccttgaatttggtgtggaagaaataacatcagtagttcagaggacagagctgcccagtccttactcaacaagctgatcagaagcaaccttgttgataacacaaaccaagtggaagtcctgcagcgggatccaaactcccctctgtactcggtgaagtcttttgaagagcttcggctgaaaccacagcttctccaaggagtctatgccatgggtttcaatcgtccatccaagatacaagagaacgcattgccactgatgcttgctgagcccccacagaacttaattgcccaatctcagtctggtactggtaaaacagctgccttcgtgctggccatgcttagccaagtagaacctgcaaacaaatacccccagtgtctatgtctctccccaacgtatgagctcgccctccaaacaggaaaagtgattgaacaaatgggcaaattttaccctgaactgaagctagcttatgctgttcgaggcaataaattggaaagaggccagaagatcagtgagcagattgtcattggcacccctgggactgtgctggactggtgctccaagctcaagttcattgatcccaagaaaatcaaggtgtttgttctggatgaggctgatgtcatgatagccactcagggccaccaagatcagagcatccgcatccagaggatgctgcccaggaactgccagatgctgcttttctccgccacctttgaagactctgtgtggaagtttgcccagaaagtggtcccagacccaaacgttatcaaactgaagcgtgaggaagagaccctggacaccatcaagcagtactatgtcctgtgcagcagcagagacgagaagttccaggccttgtgtaacctctacggggccatcaccattgctcaagccatgatcttctgccatactcgcaaaacagctagttggctggcagcagagctctcaaaagaaggccaccaggtggctctgctgagtggggagatgatggtggaacagagggctgcagtgattgagcgcttccgagagggcaaagagaaggttttggtgaccaccaacgtgtgtgcccgcggcattgatgttgaacaagtgtctgtcgtcatcaactttgatcttcccgtggacaaggacgggaatcctgacaatgagacctacctgcaccggatcgggcgcacgggccgctttggcaagaggggcctggcagtgaacatggtggacagcaagcacagcatgaacatcctgaacagaatccaggagcattttaataagaagatagaaagattggacacagatgatttggacgagattgagaaaatagccaactgagaagctccaccagccactgatgccagccctggcactgcccctgcacaggagacaagtgcgttcagggcacaggccccgacatcaccccaaggacaacggcacaagtagagagaaactacctacctcacttcaaattatgtttggacttgacaaaaatgtatgcaaatgatgggggatggtagaaaaaaattatttacacaaccttggaagattaggcatgaatacacagagatttaccttttggaannnnna

SEQ ID NO: 281302 - DNA, 949 bp, Homo sapiens
  misc_feature (949)..(949): n is a, c, g, or t
cgcgccgcttccggtctgcagccttgtagtggggctggagcagagcctgccgcgaacccccggagcccacgatccctcgtgccatccctcgaatccaccagcacgagcgtcccacccgcgcctgggaccatggccactgactcatgggccctggcggtggacgagcaggaagctgcggctgagtcgcccacagaacttaattgcccaatctcagtctggtactggtaaaacagctgccttcgtgctggccatgcttagccaagtagaacctgcaaacaaatacccccagtgtctatgtctctccccaacgtatgagctcgccctccaaacaggaaaagtgattgaacaaatgggcaaattttaccctgaactgaagctagcttatgctgttcgaggcaataaattggaaagaggccagaagatcagtgagcagattgtcattggcacccctgggactgtgctggactggtgctccaagctcaagttcattgatcccaagaaaatcaaggtgtttgttctggatgaggctgatgtcatgatagccactcagggccaccaagatcagagcatccgcatccagaggatgctgcccaggaactgccagatgctgcttttctccgccacctttgaagactctgtgtggaagtttgcccagaaagtggtcccagacccaaacgttatcaaactgaagcgtgaggaagagaccctggacaccatcaagcagtactatgtcctgtgcagcagcagagacgagaagtccgccgtgtactctacgggcaccccatggcaacccaggttgcgcctcgcacacgtgcggcgacccacaagacccggctctcggggaatggcaagcggggtgccccgagaaattgaccagccgccgaacatctcacccacgggccaacgggggcggtggtgcatatgacgaaaagccaccgtgcacgcgacn

SEQ ID NO: 281303 - DNA, 1772 bp, Homo sapiens
  misc_feature (1767)..(1771): n is a, c, g, or t
cgcgccgcttccggtctgcagccttgtagtggggctggagcagagcctgccgcgaacccccggagcccacgatccctcgtgccatccctcgaatccaccagcacgagcgtcccacccgcgcctgggaccatggccactgactcatgggccctggcggtggacgagcaggaagctgcggctgagtcggtgctgttgtcaagaccaatgccaatgcagagaagacagatgaagaagagaaagaggacagagctgcccagtccttactcaacaagctgatcagaagcaaccttgttgataacacaaaccaagtggaagtcctgcagcgggatccaaactcccctctgtactcggtgaagtcttttgaagagcttcggctgaaaccacagcttctccaaggagtctatgccatgggtttcaatcgtccatccaagatacaagagaacgcattgccactgatgcttgctgagcccccacagaacttaattgcccaatctcagtctggtactggtaaaacagctgccttcgtgctggccatgcttagccaagtagaacctgcaaacaaatacccccagtgtctatgtctctccccaacgtatgagctcgccctccaaacaggaaaagtgattgaacaaatgggcaaattttaccctgaactgaagctagcttatgctgttcgaggcaataaattggaaagaggccagaagatcagtgagcagattgtcattggcacccctgggactgtgctggactggtgctccaagctcaagttcattgatcccaagaaaatcaaggtgtttgttctggatgaggctgatgtcatgatagccactcagggccaccaagatcagagcatccgcatccagaggatgctgcccaggaactgccagatgctgcttttctccgccacctttgaagactctgtgtggaagtttgcccagaaagtggtcccagacccaaacgttatcaaactgaagcgtgaggaagagaccctggacaccatcaagcagtactatgtcctgtgcagcagcagagacgagaagttccaggccttgtgtaacctctacggggccatcaccattgctcaagccatgatcttctgccatactcgcaaaacagctagttggctggcagcagagctctcaaaagaaggccaccaggtggctctgctgagtggggagatgatggtggaacagagggctgcagtgattgagcgcttccgagagggcaaagagaaggttttggtgaccaccaacgtgtgtgcccgcggcattgatgttgaacaagtgtctgtcgtcatcaactttgatcttcccgtggacaaggacgggaatcctgacaatgagacctacctgcaccggatcgggcgcacgggccgctttggcaagaggggcctggcagtgaacatggtggacagcaagcacagcatgaacatcctgaacagaatccaggagcattttaataagaagatagaaagattggacacagatgatttggacgagattgagaaaatagccaactgagaagctccaccagccactgatgccagccctggcactgcccctgcacaggagacaagtgcgttcagggcacaggccccgacatcaccccaaggacaacggcacaagtagagagaaactacctacctcacttcaaattatgtttggacttgacaaaaatgtatgcaaatgatgggggatggtagaaaaaaattatttacacaaccttggaagattaggcatgaatacacagagatttaccttttggaannnnna

SEQ ID NO: 281304 - DNA, 1625 bp, Homo sapiens
  misc_feature (1620)..(1624): n is a, c, g, or t
cgcgccgcttccggtctgcagccttgtagtggggctggagcagagcctgccgcgaacccccggagcccacgatccctcgtgccatccctcgaatccaccagcacgagcgtcccacccgcgcctgggaccatggccactgactcatgggccctggcggtggacgagcaggaagctgcggctgagtcgaggacagagctgcccagtccttactcaacaagctgatcagaagcaaccttgttgataacacaaaccaagtggaagtcctgcagcgggatccaaactcccctctgtactcggtgaagtcttttgaagagcttcggctcccacagaacttaattgcccaatctcagtctggtactggtaaaacagctgccttcgtgctggccatgcttagccaagtagaacctgcaaacaaatacccccagtgtctatgtctctccccaacgtatgagctcgccctccaaacaggaaaagtgattgaacaaatgggcaaattttaccctgaactgaagctagcttatgctgttcgaggcaataaattggaaagaggccagaagatcagtgagcagattgtcattggcacccctgggactgtgctggactggtgctccaagctcaagttcattgatcccaagaaaatcaaggtgtttgttctggatgaggctgatgtcatgatagccactcagggccaccaagatcagagcatccgcatccagaggatgctgcccaggaactgccagatgctgcttttctccgccacctttgaagactctgtgtggaagtttgcccagaaagtggtcccagacccaaacgttatcaaactgaagcgtgaggaagagaccctggacaccatcaagcagtactatgtcctgtgcagcagcagagacgagaagttccaggccttgtgtaacctctacggggccatcaccattgctcaagccatgatcttctgccatactcgcaaaacagctagttggctggcagcagagctctcaaaagaaggccaccaggtggctctgctgagtggggagatgatggtggaacagagggctgcagtgattgagcgcttccgagagggcaaagagaaggttttggtgaccaccaacgtgtgtgcccgcggcattgatgttgaacaagtgtctgtcgtcatcaactttgatcttcccgtggacaaggacgggaatcctgacaatgagacctacctgcaccggatcgggcgcacgggccgctttggcaagaggggcctggcagtgaacatggtggacagcaagcacagcatgaacatcctgaacagaatccaggagcattttaataagaagatagaaagattggacacagatgatttggacgagattgagaaaatagccaactgagaagctccaccagccactgatgccagccctggcactgcccctgcacaggagacaagtgcgttcagggcacaggccccgacatcaccccaaggacaacggcacaagtagagagaaactacctacctcacttcaaattatgtttggacttgacaaaaatgtatgcaaatgatgggggatggtagaaaaaaattatttacacaaccttggaagattaggcatgaatacacagagatttaccttttggaannnnna

SEQ ID NO: 281305 - DNA, 2274 bp, Homo sapiens
atttttttttttataaagaatatgcaatccatttgggatttattgcatttaaagaaaacagattaaaacaggtatgataaatacagtaagaaaataactttaaatttcaaacaaaacagtgaatcagggacagaattcagtcaaaaagaataagcagtgtaaaggcaataaagtaataaaatcagttagtgcttaattagatatggcaggggaaaaggggtgggagggggagactgagtctatctcataattgtttcccagctatatttgaggactgaagttactttagcaagtatgttttgtaacaagtagaaatacaataaagatgtaaatttgctttatttaaaggttaaagttatttgcttagtggtacataaaaggcttcagaaaattcaagtttaacaaaaaatggaagtgtaatcaaagaaagtgcacttaaagctgtttgccagcaattaaaaagtagcttctatacagcttctattagatgacttttcaatcacaaaaagagcatagtcataaaaacaattctttcaaaagtagcagtataaattttaaaataaaacaaaaataaccccaaatcatgaccctttgcattatcatctaccttattctcttagtagcttttgtaaaccctcactaggagtgaatgttctcttagatatgattgtggttgcaattccattttttaaaaattcacattaactccacagtagagagatgtgacatgcatgtgtgtacatatttttatcttaatatataaaacaccactgagtataaaagttctcaaataaactattcatcatttatggtattctcacagtagatatgtcatctcattctcacagtagactgtcaactcaataattggacctaaaataacaagtttgctaaaaagaaaaaaaaatgagaaaaaagtttactgcacattctaaatatattaaaaacaaatgtacccaagcgcctcaaaactagtgatattaatacacttgtaccttctaacagtgcttacgtgaagtaccaaaacctaaaataaaccaagcagagtagctgacttgtaagaaaactgctctgcctggtgaacttcagcatagaagagtgggctccaccttagattttccaccagcaagaggacaacagtctatcactcttaaacaataaacagggtaagactgaaagttgtgtctatttgcaaatccggataatgtcgtaactatacccaacacgtacacagggattggggtaagggaaaataattacactcctgaataaatgttctagtcagttaaattttcatccggcctacaacctttcctcctccacctattatacttaccatgcaatttttgtgtcttagcagatacattcttcaatgccataaaaagctgatctttttaatactaacattttactgacgtgatattaaaataagcaaatggtccactttttaaaggattattcaaaatcaacaagcattattaaagctgttaagaaacaactttggcctcaagatttttgctagcttcataataatttacttctcttagtgatgttcaagtataacaggtttagttataactacatcctaaagaagcacaggggacacccaaataatattagggaaaaaaaaacccaaatatatatatatatatatatatttgcttagtggtacatatataataacctttcttccttccttaaaccagaattgaaccatcccataatagagccaaacttttattgagtgctgtgtgccaggtactgtgttaagcactttcacatatcttgggagctttattctcataattctcacaagggaataacctgagcatcagctgtgtggagtgacctacaccttgaccatgattctgggggatgatgaatgaaaatgcaaagtataaatctatactccttaggaaaatgcctctactacaacacaaaggaatctctccatttctatcctattgaacccccaattgaatcctgtatcttttctctgagctacaatcttgaaagaagaaagtcactgtgctgtgttataagaatgtaaatattttatgctgtcagttgtttcctcagaatttataagtcaaagggtctacatcagtgtcagaatcatttaaaattattcagtgtattgaaaagcaagtaaaactctaggtatttcatgtttacatctgaaggagacattagttcatcctctaccccttttctaaatgatgaaactcatgaggtctagcagagaccaaggactaatacaatcaagaagcatat

SEQ ID NO: 281306 - DNA, 666 bp, Homo sapiens
agagagagcctcggctaggtgtggaaacaggaagagaactagaactggaagtaaagcatgaagatgtgactgaatgctgcaatctcatgatcaaatttgaatggatgaggagtgctttttagggatgagcaaagaaagtggtttctcgagatggaatctactggtctgtatgctttgctctgtgggctatcatcttttttcctgccatcggtcagaaaaaacatgtcgaagatggatggcattagattatgcaggaatttctattggaatactgggctgctatgtctcaggagtattttacgcattttattgtaataactactggcgtcaggtgtacttgatcacagtgcttgctatgatcctggcagtgttctttgcgcagattcatcccaattacctcacgcagcaatggcaaaggctccgttctatcatcttttgttctgtttcgggatatggagtgattcctactcttcactgggtttggctcaatggaggaattggtgctcctattgtacaggactttgcaccccgtgtaattgtgatgtatatgattgctcttcttgctttcctattctacatttccaaagtcccagagcggtactttccaggacaactaaactacctcggatcaagccaccaaatatggcatatccttgcagtagtgat

SEQ ID NO: 281307 - DNA, 2220 bp, Homo sapiens
atttttttttttataaagaatatgcaatccatttgggatttattgcatttaaagaaaacagattaaaacaggtatgataaatacagtaagaaaataactttaaatttcaaacaaaacagtgaatcagggacagaattcagtcaaaaagaataagcagtgtaaaggcaataaagtaataaaatcagttagtgcttaattagatatggcaggggaaaaggggtgggagggggagactgagtctatctcataattgtttcccagctatatttgaggactgaagttactttagcaagtatgttttgtaacaagtagaaatacaataaagatgtaaatttgctttatttaaaggttaaagttatttgcttagtggtacataaaaggcttcagaaaattcaagtttaacaaaaaatggaagtgtaatcaaagaaagtgcacttaaagctgtttgccagcaattaaaaagtagcttctatacagcttctattagatgacttttcaatcacaaaaagagcatagtcataaaaacaattctttcaaaagtagcagtataaattttaaaataaaacaaaaataaccccaaatcatgaccctttgcattatcatctaccttattctcttagtagcttttgtaaaccctcactaggagtgaatgttctcttagatatgattgtggttgcaattccattttttaaaaattcacattaactccacagtagagagatgtgacatgcatgtgtgtacatatttttatcttaatatataaaacaccactgagtataaaagttctcaaataaactattcatcatttatggtattctcacagtagatatgtcatctcattctcacagtagactgtcaactcaataattggacctaaaataacaagtttgctaaaaagaaaaaaaaatgagaaaaaagtttactgcacattctaaatatattaaaaacaaatgtacccaagcgcctcaaaactagtgatattaatacacttgtaccttctaacagtgcttacgtgaagtaccaaaacctaaaataaaccaagcagagtagctgacttgtaagaaaactgctctgcctggtgaacttcagcatagaagagtgggctccaccttagattttccaccagcaagaggacaacagtctatcactcttaaacaataaacagggtaagactgaaagttgtgtctatttgcaaatccggataatgtcgtaactatacccaacacgtacacagggattgcatccggcctacaacctttcctcctccacctattatacttaccatgcaatttttgtgtcttagcagatacattcttcaatgccataaaaagctgatctttttaatactaacattttactgacgtgatattaaaataagcaaatggtccactttttaaaggattattcaaaatcaacaagcattattaaagctgttaagaaacaactttggcctcaagatttttgctagcttcataataatttacttctcttagtgatgttcaagtataacaggtttagttataactacatcctaaagaagcacaggggacacccaaataatattagggaaaaaaaaacccaaatatatatatatatatatatatttgcttagtggtacatatataataacctttcttccttccttaaaccagaattgaaccatcccataatagagccaaacttttattgagtgctgtgtgccaggtactgtgttaagcactttcacatatcttgggagctttattctcataattctcacaagggaataacctgagcatcagctgtgtggagtgacctacaccttgaccatgattctgggggatgatgaatgaaaatgcaaagtataaatctatactccttaggaaaatgcctctactacaacacaaaggaatctctccatttctatcctattgaacccccaattgaatcctgtatcttttctctgagctacaatcttgaaagaagaaagtcactgtgctgtgttataagaatgtaaatattttatgctgtcagttgtttcctcagaatttataagtcaaagggtctacatcagtgtcagaatcatttaaaattattcagtgtattgaaaagcaagtaaaactctaggtatttcatgtttacatctgaaggagacattagttcatcctctaccccttttctaaatgatgaaactcatgaggtctagcagagaccaaggactaatacaatcaagaagcatat

SEQ ID NO: 281308 - DNA, 1563 bp, Homo sapiens
atttttttttttataaagaatatgcaatccatttgggatttattgcatttaaagaaaacagattaaaacaggtatgataaatacagtaagaaaataactttaaatttcaaacaaaacagtgaatcagggacagaattcagtcaaaaagaataagcagtgtaaaggcaataaagtaataaaatcagttagtgcttaattagatatggcaggggaaaaggggtgggagggggagactgagtctatctcataattgtttcccagctatatttgaggactgaagttactttagcaagtatgttttgtaacaagtagaaatacaataaagatgtaaatttgctttatttaaaggttaaagttatttgcttagtggtacataaaaggcttcagaaaattcaagtttaacaaaaaatggaagtgtaatcaaagaaagtgcacttaaagctgtttgccagcaattaaaaagtagcttctatacagcttctattagatgacttttcaatcacaaaaagagcatagtcataaaaacaattctttcaaaagtagcagtataaattttaaaataaaacaaaaataaccccaaatcatgaccctttgcattatcatctaccttattctcttagtagcttttgtaaaccctcactaggagtgaatgttctcttagatatgattgtggttgcaattccattttttaaaaattcacattaactccacagtagagagatgtgacatgcatgtgtgtacatatttttatcttaatatataaaacaccactgagtataaaagttctcaaataaactattcatcatttatggtattctcacagtagatatgtcatctcattctcacagtagactgtcaactcaataattggacctaaaataacaagtttgctaaaaagaaaaaaaaatgagaaaaaagtttactgcacattctaaatatattaaaaacaaatgtacccaagcgcctcaaaactagtgatattaatacacttgtaccttctaacagtgcttacgtgaagtaccaaaacctaaaataaaccaagcagagtagctgacttgtaagaaaactgctctgcctggtgaacttcagcatagaagagtgggctccaccttagattttccaccagcaagaggacaacagtctatcactcttaaacaataaacaggtacctcctgctgaggaaaagttaggttccaggctgcaagttaccacaatccaagataaccaaacaagtctgaatgttgaaaagctgttcaatgtactcagcagaaatcctaaacactcaattcttcttttggctttacattttgatgatgttacatgtgtaacttgcctgaatgagaaatgaaaggaacagaaccaaaaggatcttctggaggatggttatgtggagcagaaagtgagtctacattcttatctgaggatgctctctcctcgagcctatctgcaaaaataagatgaaacgaaataaaaaatgaaatgaaataaaaatgatctttaaattaaaaagtgatatacatataaataaaagtgaaaattaaagcaccagcctttttgcaaaac

SEQ ID NO: 281309 - DNA, 1475 bp, Homo sapiens
atttttttttttataaagaatatgcaatccatttgggatttattgcatttaaagaaaacagattaaaacaggtatgataaatacagtaagaaaataactttaaatttcaaacaaaacagtgaatcagggacagaattcagtcaaaaagaataagcagtgtaaaggcaataaagtaataaaatcagttagtgcttaattagatatggcaggggaaaaggggtgggagggggagactgagtctatctcataattgtttcccagctatatttgaggactgaagttactttagcaagtatgttttgtaacaagtagaaatacaataaagatgtaaatttgctttatttaaaggttaaagttatttgcttagtggtacataaaaggcttcagaaaattcaagtttaacaaaaaatggaagtgtaatcaaagaaagtgcacttaaagctgtttgccagcaattaaaaagtagcttctatacagcttctattagatgacttttcaatcacaaaaagagcatagtcataaaaacaattctttcaaaagtagcagtataaattttaaaataaaacaaaaataaccccaaatcatgaccctttgcattatcatctaccttattctcttagtagcttttgtaaaccctcactaggagtgaatgttctcttagatatgattgtggttgcaattccattttttaaaaattcacattaactccacagtagagagatgtgacatgcatgtgtgtacatatttttatcttaatatataaaacaccactgagtataaaagttctcaaataaactattcatcatttatggtattctcacagtagatatgtcatctcattctcacagtagactgtcaactcaataattggacctaaaataacaagtttgctaaaaagaaaaaaaaatgagaaaaaagtttactgcacattctaaatatattaaaaacaaatgtacccaagcgcctcaaaactagtgatattaatacacttgtaccttctaacagtgcttacgtgaagtaccaaaacctaaaataaaccaagcagagtagctgacttgtaagaaaactgctctgcctggtgaacttcagcatagaagagtgggctccaccttagattttccaccagcaagaggacaacagtctatcactcttaaacaataaacaggtacctcctgctgaggaaaagttaggttccaggctgcaagttaccacaatccaagtgatgatgttacatgtgtaacttgcctgaatgagaaatgaaaggaacagaaccaaaaggatcttctggaggatggttatgtggagcagaaagtgagtctacattcttatctgaggatgctctctcctcgagcctatctgcaaaaataagatgaaacgaaataaaaaatgaaatgaaataaaaatgatctttaaattaaaaagtgatatacatataaataaaagtgaaaattaaagcaccagcctttttgcaaaac

SEQ ID NO: 281310 - DNA, 2007 bp, Homo sapiens
tggagcggaaaaagctttatcaacaaatatttttttgcaaaatgagaaacccctaaaaatgtaaatttgctttatttaaaggttaaagttatttgcttagtggtacataaaaggcttcagaaaattcaagtttaacaaaaaatggaagtgtaatcaaagaaagtgcacttaaagctgtttgccagcaattaaaaagtagcttctatacagcttctattagatgacttttcaatcacaaaaagagcatagtcataaaaacaattctttcaaaagtagcagtataaattttaaaataaaacaaaaataaccccaaatcatgaccctttgcattatcatctaccttattctcttagtagcttttgtaaaccctcactaggagtgaatgttctcttagatatgattgtggttgcaattccattttttaaaaattcacattaactccacagtagagagatgtgacatgcatgtgtgtacatatttttatcttaatatataaaacaccactgagtataaaagttctcaaataaactattcatcatttatggtattctcacagtagatatgtcatctcattctcacagtagactgtcaactcaataattggacctaaaataacaagtttgctaaaaagaaaaaaaaatgagaaaaaagtttactgcacattctaaatatattaaaaacaaatgtacccaagcgcctcaaaactagtgatattaatacacttgtaccttctaacagtgcttacgtgaagtaccaaaacctaaaataaaccaagcagagtagctgacttgtaagaaaactgctctgcctggtgaacttcagcatagaagagtgggctccaccttagattttccaccagcaagaggacaacagtctatcactcttaaacaataaacagggtaagactgaaagttgtgtctatttgcaaatccggataatgtcgtaactatacccaacacgtacacagggattggggtaagggaaaataattacactcctgaataaatgttctagtcagttaaattttcatccggcctacaacctttcctcctccacctattatacttaccatgcaatttttgtgtcttagcagatacattcttcaatgccataaaaagctgatctttttaatactaacattttactgacgtgatattaaaataagcaaatggtccactttttaaaggattattcaaaatcaacaagcattattaaagctgttaagaaacaactttggcctcaagatttttgctagcttcataataatttacttctcttagtgatgttcaagtataacaggtttagttataactacatcctaaagaagcacaggggacacccaaataatattagggaaaaaaaaacccaaatatatatatatatatatatatttgcttagtggtacatatataataacctttcttccttccttaaaccagaattgaaccatcccataatagagccaaacttttattgagtgctgtgtgccaggtactgtgttaagcactttcacatatcttgggagctttattctcataattctcacaagggaataacctgagcatcagctgtgtggagtgacctacaccttgaccatgattctgggggatgatgaatgaaaatgcaaagtataaatctatactccttaggaaaatgcctctactacaacacaaaggaatctctccatttctatcctattgaacccccaattgaatcctgtatcttttctctgagctacaatcttgaaagaagaaagtcactgtgctgtgttataagaatgtaaatattttatgctgtcagttgtttcctcagaatttataagtcaaagggtctacatcagtgtcagaatcatttaaaattattcagtgtattgaaaagcaagtaaaactctaggtatttcatgtttacatctgaaggagacattagttcatcctctaccccttttctaaatgatgaaactcatgaggtctagcagagaccaaggactaatacaatcaagaagcatat

SEQ ID NO: 281311 - DNA, 2406 bp, Homo sapiens
tgccgggtccgccgcggcgctggcggcgagtggccggtgtgagcgcagagccgggccctgggcagcagcggcagcgcggtaggacctcgcgcagcgtccgcgggctccggggcgggggcgccagcggcgaagaccctcctccccggggaggcgggacctgggtggagctcccgagcctggggagctggtggcggacggtgaacgatgcatcagaagctgctgaagagcgcgcattacatcgagctgggcagttaccagtactggccggtcctggtgccccgtggcatccgcctgtacacctacgagcagatccccgggtccctcaaggacaatccgtacatcaccagacggctaccgggcctacctgccgtccaggctgtgtatcaaaagtttgtttattttatctaatgagacagtaaacatctggagtcatttgctgggtttctttctcttcttcaccctgggaatatatgacatgacatctgtgttaccttcagcaagtgcgtccagagaagattttgtaatttgttctatttgtcttttctgcttccaggtctgtatgctttgctctgtgggctatcatcttttttcctgccatcggtcagaaaaaacatgtcgaagatggatggcattagattatgcaggaatttctattggaatactgggctgctatgtctcaggagtattttacgcattttattgtaataactactggcgtcaggtgtacttgatcacagtgcttgctatgatcctggcagtgttctttgcgcagattcatcccaattacctcacgcagcaatggcaaaggctccgttctatcatcttttgttctgtttcgggatatggagtgattcctactcttcactgggtttggctcaatggaggaattggtgctcctattgtacaggactttgcaccccgtgtaattgtgatgtatatgattgctcttcttgctttcctattctacatttccaaagtcccagagcggtactttccagctttaaaatcatattttagaatcaggaacgaagattcagggaatgtctgtcacatcttatggcatcccacctggacagaatatccgatttgaagattgtgattgacttccgtaaaactgtacaactctccatttggcagtgcttacgtgaagtaccaaaacctaaaataaaccaagcagagtagctgacttgtaagaaaactgctctgcctggtgaacttcagcatagaagagtgggctccaccttagattttccaccagcaagaggacaacagtctatcactcttaaacaataaacagggtaagactgaaagttgtgtctatttgcaaatccggataatgtcgtaactatacccaacacgtacacagggattggggtaagggaaaataattacactcctgaataaatgttctagtcagttaaattttcatccggcctacaacctttcctcctccacctattatacttaccatgcaatttttgtgtcttagcagatacattcttcaatgccataaaaagctgatctttttaatactaacattttactgacgtgatattaaaataagcaaatggtccactttttaaaggattattcaaaatcaacaagcattattaaagctgttaagaaacaactttggcctcaagatttttgctagcttcataataatttacttctcttagtgatgttcaagtataacaggtttagttataactacatcctaaagaagcacaggggacacccaaataatattagggaaaaaaaaacccaaatatatatatatatatatatatttgcttagtggtacatatataataacctttcttccttccttaaaccagaattgaaccatcccataatagagccaaacttttattgagtgctgtgtgccaggtactgtgttaagcactttcacatatcttgggagctttattctcataattctcacaagggaataacctgagcatcagctgtgtggagtgacctacaccttgaccatgattctgggggatgatgaatgaaaatgcaaagtataaatctatactccttaggaaaatgcctctactacaacacaaaggaatctctccatttctatcctattgaacccccaattgaatcctgtatcttttctctgagctacaatcttgaaagaagaaagtcactgtgctgtgttataagaatgtaaatattttatgctgtcagttgtttcctcagaatttataagtcaaagggtctacatcagtgtcagaatcatttaaaattattcagtgtattgaaaagcaagtaaaactctaggtatttcatgtttacatctgaaggagacattagttcatcctctaccccttttctaaatgatgaaactcatgaggtctagcagagaccaaggactaatacaatcaagaagcatat

SEQ ID NO: 281312 - DNA, 2243 bp, Homo sapiens
tgccgggtccgccgcggcgctggcggcgagtggccggtgtgagcgcagagccgggccctgggcagcagcggcagcgcggtaggacctcgcgcagcgtccgcgggctccggggcgggggcgccagcggcgaagaccctcctccccggggaggcgggacctgggtggagctcccgagcctggggagctggtggcggacggtgaacgatgcatcagaagctgctgaagagcgcgcattacatcgagctgggcagttaccagtactggccggtcctggtgccccgtggcatccgcctgtacacctacgagcagatccccgggtccctcaaggacaatccgtacatcaccagacggctaccgggcctacctgccgtccaggctgtgtatcaaaaggtctgtatgctttgctctgtgggctatcatcttttttcctgccatcggtcagaaaaaacatgtcgaagatggatggcattagattatgcaggaatttctattggaatactgggctgctatgtctcaggagtattttacgcattttattgtaataactactggcgtcaggtgtacttgatcacagtgcttgctatgatcctggcagtgttctttgcgcagattcatcccaattacctcacgcagcaatggcaaaggctccgttctatcatcttttgttctgtttcgggatatggagtgattcctactcttcactgggtttggctcaatggaggaattggtgctcctattgtacaggactttgcaccccgtgtaattgtgatgtatatgattgctcttcttgctttcctattctacatttccaaagtcccagagcggtactttccagctttaaaatcatattttagaatcaggaacgaagattcagggaatgtctgtcacatcttatggcatcccacctggacagaatatccgatttgaagattgtgattgacttccgtaaaactgtacaactctccatttggcagtgcttacgtgaagtaccaaaacctaaaataaaccaagcagagtagctgacttgtaagaaaactgctctgcctggtgaacttcagcatagaagagtgggctccaccttagattttccaccagcaagaggacaacagtctatcactcttaaacaataaacagggtaagactgaaagttgtgtctatttgcaaatccggataatgtcgtaactatacccaacacgtacacagggattggggtaagggaaaataattacactcctgaataaatgttctagtcagttaaattttcatccggcctacaacctttcctcctccacctattatacttaccatgcaatttttgtgtcttagcagatacattcttcaatgccataaaaagctgatctttttaatactaacattttactgacgtgatattaaaataagcaaatggtccactttttaaaggattattcaaaatcaacaagcattattaaagctgttaagaaacaactttggcctcaagatttttgctagcttcataataatttacttctcttagtgatgttcaagtataacaggtttagttataactacatcctaaagaagcacaggggacacccaaataatattagggaaaaaaaaacccaaatatatatatatatatatatatttgcttagtggtacatatataataacctttcttccttccttaaaccagaattgaaccatcccataatagagccaaacttttattgagtgctgtgtgccaggtactgtgttaagcactttcacatatcttgggagctttattctcataattctcacaagggaataacctgagcatcagctgtgtggagtgacctacaccttgaccatgattctgggggatgatgaatgaaaatgcaaagtataaatctatactccttaggaaaatgcctctactacaacacaaaggaatctctccatttctatcctattgaacccccaattgaatcctgtatcttttctctgagctacaatcttgaaagaagaaagtcactgtgctgtgttataagaatgtaaatattttatgctgtcagttgtttcctcagaatttataagtcaaagggtctacatcagtgtcagaatcatttaaaattattcagtgtattgaaaagcaagtaaaactctaggtatttcatgtttacatctgaaggagacattagttcatcctctaccccttttctaaatgatgaaactcatgaggtctagcagagaccaaggactaatacaatcaagaagcatat

SEQ ID NO: 281313 - DNA, 1497 bp, Homo sapiens
tgccgggtccgccgcggcgctggcggcgagtggccggtgtgagcgcagagccgggccctgggcagcagcggcagcgcggtaggacctcgcgcagcgtccgcgggctccggggcgggggcgccagcggcgaagaccctcctccccggggaggcgggacctgggtggagctcccgagcctggggagctggtggcggacggtgaacgatgcatcagaagctgctgaagagcgcgcattacatcgagctgggcagttaccagtactggccggtcctggtgccccgtggcatccgcctgtacacctacgagcagatccccgggtccctcaaggacaatccgtacatcaccagacggctaccgggcctacctgccgtccaggctgtgtatcaaaagtttgtttattttatctaatgagacagtaaacatctggagtcatttgctgggtttctttctcttcttcaccctgggaatatatgacatgacatctgtgttaccttcagcaagtgcgtccagagaagattttgtaatttgttctatttgtcttttctgcttccaggtctgtatgctttgctctgtgggctatcatcttttttcctgccatcggtcagaaaaaacatgtcgaagatggatggcattagattatgcaggaatttctattggaatactgggctgctatgtctcaggagtattttacgcattttattgtaataactactggcgtcaggtgtacttgatcacagtgcttgctatgatcctggcagtgttctttgcgcagattcatcccaattacctcacgcagcaatggcaaaggctccgttctatcatcttttgttctgtttcgggatatggagtgattcctactcttcactgggtttggctcaatggaggaattggtgctcctattgtacaggactttgcaccccgtgtaattgtgatgtatatgattgctcttcttgctttcctattctacatttccaaagtcccagagcggtactttccagctttaaaatcatattttagaatcaggaacgaagattcagggaatgtctgtcacatcttatggcatcccacctggacagaatatccgatttgaagattgtgattgacttccgtaaaactgtacaactctccatttggcagtgcttacgtgaagtaccaaaacctaaaataaaccaagcagagtagctgacttgtaagaaaactgctctgcctggtgaacttcagcatagaagagtgggctccaccttagattttccaccagcaagaggacaacagtctatcactcttaaacaataaacagggagttaatgccgagaatccatcagaagtatctactgtttagaaggaaatggagcagcaccaaatgggtctaattcgactggttgggactgttgggactgatgtggagtgatgctttgcaccacaagttctgtaaagggcacggcaccaaaatcatccattttcaatacatctgcactatggaatgacccatgtagtgaa

SEQ ID NO: 281314 - DNA, 568 bp, Homo sapiens
taaaagccaaaattactttttcagttcctttattgttaataacagaattaaaatgtgatttcctttcattctagtactggcgtcaggtgtacttgatcacagtgcttgctatgatcctggcagtgttctttgcgcagattcatcccaattacctcacgcagcaatggcaaaggctccgttctatcatcttttgttctgtttcgggatatggagtgattcctactcttcactgggtttggctcaatggaggaattggtgctcctattgtacaggtaggttgagtgtagttaatatttttctcttttttttcctttcaattttattccttttgggtaaagtagtataatcaggccaagtgggtagatgtttgtcatttgagaacatatttgtaattgcatgttgatgccataattttcacagccatataaataagcataccttgcagaagtcgaggtaaaatctgaatactgattttctctgagttgtctttctgtaaaaaaaaatacattattattctctattacccttagtatataaatacccaagtccttatttgtggaggaggact

SEQ ID NO: 281315 - DNA, 2296 bp, Homo sapiens
tgccgggtccgccgcggcgctggcggcgagtggccggtgtgagcgcagagccgggccctgggcagcagcggcagcgcggtaggacctcgcgcagcgtccgcgggctccggggcgggggcgccagcggcgaagaccctcctccccggggaggcgggacctgggtggagctcccgagcctggggagctggtggcggacggtgaacgatgcatcagaagctgctgaagagcgcgcattacatcgagctgggcagttaccagtactggccggtcctggtgccccgtggcatccgcctgtacacctacgagcagatccccgggtccctcaaggacaatccgtacatcaccagacggctaccgggcctacctgccgtccaggctgtgtatcaaaagtttgtttattttatctaatgagacagtaaacatctggagtcatttgctgggtttctttctcttcttcaccctgggaatatatgacatgacatctgtgttaccttcagcaagtgcgtccagagaagattttgtaatttgttctatttgtcttttctgcttccaggtctgtatgctttgctctgtgggctatcatcttttttcctgccatcggtcagaaaaaacatgtcgaagatggatggcattagattatgcaggaatttctattggaatactgggctgctatgtctcaggagtattttacgcattttattgtaataactactggcgtcaggtgtacttgatcacagtgcttgctatgatcctggcagtgttctttgcgcagattcatcccaattacctcacgcagcaatggcaaaggctccgttctatcatcttttgttctgtttcgggatatggagtgattcctactcttcactgggtttggctcaatggaggaattggtgctcctattgtacagaatcaggaacgaagattcagggaatgtctgtcacatcttatggcatcccacctggacagaatatccgatttgaagattgtgattgacttccgtaaaactgtacaactctccatttggcagtgcttacgtgaagtaccaaaacctaaaataaaccaagcagagtagctgacttgtaagaaaactgctctgcctggtgaacttcagcatagaagagtgggctccaccttagattttccaccagcaagaggacaacagtctatcactcttaaacaataaacagggtaagactgaaagttgtgtctatttgcaaatccggataatgtcgtaactatacccaacacgtacacagggattggggtaagggaaaataattacactcctgaataaatgttctagtcagttaaattttcatccggcctacaacctttcctcctccacctattatacttaccatgcaatttttgtgtcttagcagatacattcttcaatgccataaaaagctgatctttttaatactaacattttactgacgtgatattaaaataagcaaatggtccactttttaaaggattattcaaaatcaacaagcattattaaagctgttaagaaacaactttggcctcaagatttttgctagcttcataataatttacttctcttagtgatgttcaagtataacaggtttagttataactacatcctaaagaagcacaggggacacccaaataatattagggaaaaaaaaacccaaatatatatatatatatatatatttgcttagtggtacatatataataacctttcttccttccttaaaccagaattgaaccatcccataatagagccaaacttttattgagtgctgtgtgccaggtactgtgttaagcactttcacatatcttgggagctttattctcataattctcacaagggaataacctgagcatcagctgtgtggagtgacctacaccttgaccatgattctgggggatgatgaatgaaaatgcaaagtataaatctatactccttaggaaaatgcctctactacaacacaaaggaatctctccatttctatcctattgaacccccaattgaatcctgtatcttttctctgagctacaatcttgaaagaagaaagtcactgtgctgtgttataagaatgtaaatattttatgctgtcagttgtttcctcagaatttataagtcaaagggtctacatcagtgtcagaatcatttaaaattattcagtgtattgaaaagcaagtaaaactctaggtatttcatgtttacatctgaaggagacattagttcatcctctaccccttttctaaatgatgaaactcatgaggtctagcagagaccaaggactaatacaatcaagaagcatat

SEQ ID NO: 281316 - DNA, 1860 bp, Homo sapiens
ccaagcccataaatgtttgaattgaaagcctagcctcttaactacttccctgaatatcatgcataagttgctttagtttctttagtcactttgttaatttgtttttatttttcacaggtctgtatgctttgctctgtgggctatcatcttttttcctgccatcggtcagaaaaaacatgtcgaagatggatggcattagattatgcaggaatttctattggaatactgggctgctatgtctcaggagtattttacgcattttattgtaataactactggcgtcaggtgtacttgatcacagtgcttgctatgatcctggcagtgttctttgcgcagattcatcccaattacctcacgcagcaatggcaaaggctccgttctatcatcttttgttctgtttcgggatatggagtgattcctactcttcactgggtttggctcaatggaggaattggtgctcctattgtacagaatcaggaacgaagattcagggaatgtctgtcacatcttatggcatcccacctggacagaatatccgatttgaagattgtgattgacttccgtaaaactgtacaactctccatttggcagtgcttacgtgaagtaccaaaacctaaaataaaccaagcagagtagctgacttgtaagaaaactgctctgcctggtgaacttcagcatagaagagtgggctccaccttagattttccaccagcaagaggacaacagtctatcactcttaaacaataaacagggtaagactgaaagttgtgtctatttgcaaatccggataatgtcgtaactatacccaacacgtacacagggattggggtaagggaaaataattacactcctgaataaatgttctagtcagttaaattttcatccggcctacaacctttcctcctccacctattatacttaccatgcaatttttgtgtcttagcagatacattcttcaatgccataaaaagctgatctttttaatactaacattttactgacgtgatattaaaataagcaaatggtccactttttaaaggattattcaaaatcaacaagcattattaaagctgttaagaaacaactttggcctcaagatttttgctagcttcataataatttacttctcttagtgatgttcaagtataacaggtttagttataactacatcctaaagaagcacaggggacacccaaataatattagggaaaaaaaaacccaaatatatatatatatatatatatttgcttagtggtacatatataataacctttcttccttccttaaaccagaattgaaccatcccataatagagccaaacttttattgagtgctgtgtgccaggtactgtgttaagcactttcacatatcttgggagctttattctcataattctcacaagggaataacctgagcatcagctgtgtggagtgacctacaccttgaccatgattctgggggatgatgaatgaaaatgcaaagtataaatctatactccttaggaaaatgcctctactacaacacaaaggaatctctccatttctatcctattgaacccccaattgaatcctgtatcttttctctgagctacaatcttgaaagaagaaagtcactgtgctgtgttataagaatgtaaatattttatgctgtcagttgtttcctcagaatttataagtcaaagggtctacatcagtgtcagaatcatttaaaattattcagtgtattgaaaagcaagtaaaactctaggtatttcatgtttacatctgaaggagacattagttcatcctctaccccttttctaaatgatgaaactcatgaggtctagcagagaccaaggactaatacaatcaagaagcatat

SEQ ID NO: 281317 - DNA, 1553 bp, Homo sapiens
tgccgggtccgccgcggcgctggcggcgagtggccggtgtgagcgcagagccgggccctgggcagcagcggcagcgcggtaggacctcgcgcagcgtccgcgggctccggggcgggggcgccagcggcgaagaccctcctccccggggaggcgggacctgggtggagctcccgagcctggggagctggtggcggacggtgaacgatgcatcagaagctgctgaagagcgcgcattacatcgagctgggcagttaccagtactggccggtcctggtgccccgtggcatccgcctgtacacctacgagcagatccccgggtccctcaaggacaatccgtacatcaccagacggctaccgggcctacctgccgtccaggctgtgtatcaaaagtttgtttattttatctaatgagacagtaaacatctggagtcatttgctgggtttctttctcttcttcaccctgggaatatatgacatgacatctgtgttaccttcagcaagtgcgtccagagaagattttgtaatttgttctatttgtcttttctgcttccaggtctgtatgctttgctctgtgggctatcatcttttttcctgccatcggtcagaaaaaacatgtcgaagatggatggcattagattatgcaggaatttctattggaatactgggctgctatgtctcaggagtattttacgcattttattgtaataactactggcgtcaggtgtacttgatcacagtgcttgctatgatcctggcagtgttctttgcgcagattcatcccaattacctcacgcagcaatggcaaaggctccgttctatcatcttttgttctgtttcgggatatggagtgattcctactcttcactgggtttggctcaatggaggaattggtgctcctattgtacaggactttgcaccccgtgtaattgtgatgtatatgattgctcttcttgctttcctattctacatttccaaagtcccagagcggtactttccagctttaaaatcatattttagaatcaggaacgaagattcagggaatgtctgtcacatcttatggcatcccacctggacagaatatccgatttgaagattgtgattgacttccgtaaaactgtacaactctccatttggcagtgcttacgtgaagtaccaaaacctaaaataaaccaagcagagtagctgacttgtaagaaaactgctctgcctggtgaacttcagcatagaagagtgggctccaccttagattttccaccagcaagaggacaacagtctatcactcttaaacaataaacaggtgatgatgttacatgtgtaacttgcctgaatgagaaatgaaaggaacagaaccaaaaggatcttctggaggatggttatgtggagcagaaagtgagtctacattcttatctgaggatgctctctcctcgagcctatctgcaaaaataagatgaaacgaaataaaaaatgaaatgaaataaaaatgatctttaaattaaaaagtgatatacatataaataaaagtgaaaattaaagcaccagcctttttgcaaaac

SEQ ID NO: 281318 - DNA, 450 bp, Homo sapiens
taattttagaaatggagtatcactatgttgctcaagctagactcaaactcctggactcaagggatcctcccgcctcagccttccaagtcactgggattataagtgcatgccatcccacgcagctactctcttgaatactcgagaaagccaagcactacaattgtgtggctggtaataattttctcagtgggcaaccaccacagttaatattagtgaaattaaagcaggaacagagctgcctctatgtctacagatgttcccatgagccaggaaacttcgctttcttctcttgaacaaatttctttaaaatctgtcctttacaaactaaaaatctctctcaggtgcatttacgtagcttcaggcctgtgccctagcttgcaaggcctggggcaaaagtccaaatggaggcccacccaccacacacctaaatatttaaacgctgtaaatcaa

SEQ ID NO: 281319 - DNA, 432 bp, Homo sapiens
taattttagaaatggagtatcactatgttgctcaagctagactcaaactcctggactcaagggatcctcccgcctcagccttccaagtcactgggattataagtgcatgccatcccacgcagctactctcttgaatactcgagaaagccaagcactacaattgtgtggctgcttcccaggtattttaggaaatgcaccattcttcgccaaattaagatttttttaaaagccactagtatataatctgcttgaaaggaagattaaatttctcttatccacctttctactcactgctcatcactataaatgaatgcaacaaaagtttctcacagtcatcgataatatcaatattgtgagtatatcttctttaacattgtaatattaatgtttctttatattattgggtgaataaaagccatttatatttgatgg

SEQ ID NO: 281320 - DNA, 2388 bp, Homo sapiens
gcccgcggcaagccagcccgccggcgccccggagcgctgccgccaccgtcaccgccaccgcccggtccaggcccaagcccaggccctgcgcggagcggagcggcgcggcgtccacccgggcccagccagccggcgcggcgggggcgggtccaggatcttcggcggatcttccattctcagggcgggagccggagtccgggcgcccgggatcgggctgggcccgcgcccatggcaagcgcggcctgcccgggccctggggaccctgccatgtgaggcaggcccgggctgggggcccggccatggccggggaacggcccccactgcggggccctgggcccgggcctggagaggtgccgggggaggggcccccggggccggggggcacgggcggaggcccgggccggggccgcccctcctcctaccgggctctccgcagcgccgtgtctagcctggcgcgtgtggacgattttcactgcgcggagaagatcggggccggcttcttctctgaggtctacaaggttcggcaccgacagtcagggcaagtcatggtgctgaagatgaacaagctccccagtaaccggggcaacacactacgggaagtgcagctgatgaaccggctcaggcaccccaacatcctaaggttcatgggagtctgtgtgcaccagggacagctgcacgctcttacagagtatatgaatggggggacattggaacagctgctcagctcccctgaacccctatcctggccggtcaggctccacctggccctggacattgcccgaggcctgcggtacctgcactccaaaggtgtatttcaccgcgacctcacatccaagggagggggcaaggaaggagccattggccgtggtgggctccccatactggatggctccagaggtgttacggggtgagctgtatgatgagaaggctgatgtctttgccttcgggattgtcctctgtgagctcatcgcccgagtacctgcagaccctgactacctaccacgcactgaggactttggcctggatgtgcctgctttccgaactctggtgggggatgactgcccactgcctttcttgctcctggccatccactgctgcaacctggaacccagcacccgtgcccccttcaccgaaattacccagcacctggaatggatcctggagcagctgcctgagccagccccactcaccaggaccgccctgacacacaatcagggctctgttgcaagagggggtccctctgccacgcttcccaggccagatccccggctttcccgaagccggtcagacctcttcctgcccccatcaccagaatcaccccccaactggggggacaatctgactcgagtcaaccccttctcactacgggaagacctcaggggtggcaagatcaagctcttagacacacccagcaagccagtcctgcctcttgtgccaccatcaccattcccatccactcagctgcccttggtgaccactccggagaccctggtccagcctgggacacctgcccgccgctgccgctcactaccctcatcccccgagctcccccgccgtatggagacagcactgccaggtcctggccctcccgctgtgggcccctcggctgaagagaagatggagtgcgagggcagcagccctgagccggaacctccagggccagcgccccagctgcctctggctgtggccacagacaacttcatcagcacctgttcctcggcctcccaaccctggtcccctagatcaggacccgtcctcaataacaatcccccagctgtggtggtgaactccccacaaggctgggctggggagccctggaaccgggcccagcatagcctgccccgggcggcagccctggagcggacagaaccctcgccacccccttcagctccccgggagcccgatgaggggctgccctgtcctggctgctgcctcggccccttcagctttggcttcctgtccatgtgcccccgccccacaccagctgttgcccgctaccgcaacctgaactgtgaggcgggcagtctcctctgccaccgagggcaccacgccaagccacccacacccagcctgcagctgcctggggcacgctcttagcagtggagcccgtggtctcaggcctccaactttggccttcaggacaccctgtaagaacagagcacacttgctggacagtgccagttccagatgggctgaccggctcttctccccgtgtaggggagccccagcatggactcaagggacagagcacttccagtcgaccccccggctcgcgttcccgtggggatcactgaaccagacacagcattgctgacacatgagactaacacgtgcaattatttaaaaagatttcaataaaactgcctggctggctccgggccgccccta

SEQ ID NO: 281321 - DNA, 2643 bp, Homo sapiens
gcccgcggcaagccagcccgccggcgccccggagcgctgccgccaccgtcaccgccaccgcccggtccaggcccaagcccaggccctgcgcggagcggagcggcgcggcgtccacccgggcccagccagccggcgcggcgggggcgggtccaggatcttcggcggatcttccattctcagggcgggagccggagtccgggcgcccgggatcgggctgggcccgcgcccatggcaagcgcggcctgcccgggccctggggaccctgccatgtgaggcaggcccgggctgggggcccggccatggccggggaacggcccccactgcggggccctgggcccgggcctggagaggtgccgggggaggggcccccggggccggggggcacgggcggaggcccgggccggggccgcccctcctcctaccgggctctccgcagcgccgtgtctagcctggcgcgtgtggacgattttcactgcgcggagaagatcggggccggcttcttctctgaggtctacaaggttcggcaccgacagtcagggcaagtcatggtgctgaagatgaacaagctccccagtaaccggggcaacacactacgggaagtgcagctgatgaaccggctcaggcaccccaacatcctaaggttcatgggagtctgtgtgcaccagggacagctgcacgctcttacagagtatatgaatggggggacattggaacagctgctcagctcccctgaacccctatcctggccggtcaggctccacctggccctggacattgcccgaggcctgcggtacctgcactccaaaggtgtatttcaccgcgacctcacatccaagaactgtctagtccgacgggaagatcgaggcttcaccgctgtcgtgggtgacttcgggctggccgaaaagattcctgtgtataggtgagatgaatgtccctgttccccccaaatctcccagagtgcccctatctgatgtccccagagccccagggatgtttcccttggggaacggagggagttcacctcatccccttttgcctgggggggatgcctgaataggatgcttctgaccactctgcccctgcccctgcagggagggggcaaggaaggagccattggccgtggtgggctccccatactggatggctccagaggtgttacggggtgagctgtatgatgagaaggctgatgtctttgccttcgggattgtcctctgtgagctcatcgcccgagtacctgcagaccctgactacctaccacgcactgaggactttggcctggatgtgcctgctttccgaactctggtgggggatgactgcccactgcctttcttgctcctggccatccactgctgcaacctggaacccagcacccgtgcccccttcaccgaaattacccagcacctggaatggatcctggagcagctgcctgagccagccccactcaccaggaccgccctgacacacaatcagggctctgttgcaagagggggtccctctgccacgcttcccaggccagatccccggctttcccgaagccggtcagacctcttcctgcccccatcaccagaatcaccccccaactggggggacaatctgactcgagtcaaccccttctcactacgggaagacctcaggggtggcaagatcaagctcttagacacacccagcaagccagtcctgcctcttgtgccaccatcaccattcccatccactcagctgcccttggtgaccactccggagaccctggtccagcctgggacacctgcccgccgctgccgctcactaccctcatcccccgagctcccccgccgtatggagacagcactgccaggtcctggccctcccgctgtgggcccctcggctgaagagaagatggagtgcgagggcagcagccctgagccggaacctccagggccagcgccccagctgcctctggctgtggccacagacaacttcatcagcacctgttcctcggcctcccaaccctggtcccctagatcaggacccgtcctcaataacaatcccccagctgtggtggtgaactccccacaaggctgggctggggagccctggaaccgggcccagcatagcctgccccgggcggcagccctggagcggacagaaccctcgccacccccttcagctccccgggagcccgatgaggggctgccctgtcctggctgctgcctcggccccttcagctttggcttcctgtccatgtgcccccgccccacaccagctgttgcccgctaccgcaacctgaactgtgaggcgggcagtctcctctgccaccgagggcaccacgccaagccacccacacccagcctgcagctgcctggggcacgctcttagcagtggagcccgtggtctcaggcctccaactttggccttcaggacaccctgtaagaacagagcacacttgctggacagtgccagttccagatgggctgaccggctcttctccccgtgtaggggagccccagcatggactcaagggacagagcacttccagtcgaccccccggctcgcgttcccgtggggatcactgaaccagacacagcattgctgacacatgagactaacacgtgcaattatttaaaaagatttcaataaaactgcctggctggctccgggccgccccta

SEQ ID NO: 281322 - DNA, 2898 bp, Homo sapiens
gcccgcggcaagccagcccgccggcgccccggagcgctgccgccaccgtcaccgccaccgcccggtccaggcccaagcccaggccctgcgcggagcggagcggcgcggcgtccacccgggcccagccagccggcgcggcgggggcgggtccaggatcttcggcggatcttccattctcagggcgggagccggagtccgggcgcccgggatcgggctgggcccgcgcccatggcaagcgcggcctgcccgggccctggggaccctgccatgtgaggcaggcccgggctgggggcccggccatggccggggaacggcccccactgcggggccctgggcccgggcctggagaggtgccgggggaggggcccccggggccggggggcacgggcggaggcccgggccggggccgcccctcctcctaccgggctctccgcagcgccgtgtctagcctggcgcgtgtggacgattttcactgcgcggagaagatcggggccggcttcttctctgaggtctacaaggttcggcaccgacagtcagggcaagtcatggtgctgaagatgaacaagctccccagtaaccggggcaacacactacgggaagtgcagctgatgaaccggctcaggcaccccaacatcctaaggttcatgggagtctgtgtgcaccagggacagctgcacgctcttacagagtatatgaatggggggacattggaacagctgctcagctcccctgaacccctatcctggccggtcaggctccacctggccctggacattgcccgaggcctgcggtacctgcactccaaaggtgtatttcaccgcgacctcacatccaagaactgtctagtccgacgggaagatcgaggcttcaccgctgtcgtgggtgacttcgggctggccgaaaagattcctgtgtataggtgagatgaatgtccctgttccccccaaatctcccagagtgcccctatctgatgtccccagagccccagggatgtttcccttggggaacggagggagttcacctcatccccttttgcctgggggggatgcctgaataggatgcttctgaccactctgcccctgcccctgcagggagggggcaaggaaggagccattggccgtggtgggctccccatactggatggctccagaggtgttacggggtgagctgtatgatgagaaggtgagacatcaacccttcagatccccaaggccttccgagacccttgaggtattctcataaagccccatccatccccaaaacaaccctaccagatcttcaggagtccccaagatccctttgcccctcacaggcacccttctaacacatgaaaactgtcaagatcccccaccctcaaccaaattctgctatattctgtcaaaattctgaaatgaaaactgttaattcttccccgacactattatctctgacccccaggctgatgtctttgccttcgggattgtcctctgtgagctcatcgcccgagtacctgcagaccctgactacctaccacgcactgaggactttggcctggatgtgcctgctttccgaactctggtgggggatgactgcccactgcctttcttgctcctggccatccactgctgcaacctggaacccagcacccgtgcccccttcaccgaaattacccagcacctggaatggatcctggagcagctgcctgagccagccccactcaccaggaccgccctgacacacaatcagggctctgttgcaagagggggtccctctgccacgcttcccaggccagatccccggctttcccgaagccggtcagacctcttcctgcccccatcaccagaatcaccccccaactggggggacaatctgactcgagtcaaccccttctcactacgggaagacctcaggggtggcaagatcaagctcttagacacacccagcaagccagtcctgcctcttgtgccaccatcaccattcccatccactcagctgcccttggtgaccactccggagaccctggtccagcctgggacacctgcccgccgctgccgctcactaccctcatcccccgagctcccccgccgtatggagacagcactgccaggtcctggccctcccgctgtgggcccctcggctgaagagaagatggagtgcgagggcagcagccctgagccggaacctccagggccagcgccccagctgcctctggctgtggccacagacaacttcatcagcacctgttcctcggcctcccaaccctggtcccctagatcaggacccgtcctcaataacaatcccccagctgtggtggtgaactccccacaaggctgggctggggagccctggaaccgggcccagcatagcctgccccgggcggcagccctggagcggacagaaccctcgccacccccttcagctccccgggagcccgatgaggggctgccctgtcctggctgctgcctcggccccttcagctttggcttcctgtccatgtgcccccgccccacaccagctgttgcccgctaccgcaacctgaactgtgaggcgggcagtctcctctgccaccgagggcaccacgccaagccacccacacccagcctgcagctgcctggggcacgctcttagcagtggagcccgtggtctcaggcctccaactttggccttcaggacaccctgtaagaacagagcacacttgctggacagtgccagttccagatgggctgaccggctcttctccccgtgtaggggagccccagcatggactcaagggacagagcacttccagtcgaccccccggctcgcgttcccgtggggatcactgaaccagacacagcattgctgacacatgagactaacacgtgcaattatttaaaaagatttcaataaaactgcctggctggctccgggccgccccta

SEQ ID NO: 281323 - DNA, 3308 bp, Homo sapiens
gcccgcggcaagccagcccgccggcgccccggagcgctgccgccaccgtcaccgccaccgcccggtccaggcccaagcccaggccctgcgcggagcggagcggcgcggcgtccacccgggcccagccagccggcgcggcgggggcgggtccaggatcttcggcggatcttccattctcagggcgggagccggagtccgggcgcccgggatcgggctgggcccgcgcccatggcaagcgcggcctgcccgggccctggggaccctgccatgtgaggcaggcccgggctgggggcccggccatggccggggaacggcccccactgcggggccctgggcccgggcctggagaggtgccgggggaggggcccccggggccggggggcacgggcggaggcccgggccggggccgcccctcctcctaccgggctctccgcagcgccgtgtctagcctggcgcgtgtggacgattttcactgcgcggagaagatcggggccggcttcttctctgaggtctacaaggttcggcaccgacagtcagggcaagtcatggtgctgaagatgaacaagctccccagtaaccggggcaacacactacgggaagtgcagctgatgaaccggctcaggcaccccaacatcctaaggttcatgggagtctgtgtgcaccagggacagctgcacgctcttacagagtatatgaatggggggacattggaacagctgctcagctcccctgaacccctatcctggccggtcaggctccacctggccctggacattgcccgaggcctgcggtacctgcactccaaaggtgtatttcaccgcgacctcacatccaagaactgtctagtccgacgggaagatcgaggcttcaccgctgtcgtgggtgacttcgggctggccgaaaagattcctgtgtatagggagggggcaaggaaggagccattggccgtggtgggctccccatactggatggctccagaggtgttacggggtgagctgtatgatgagaaggctgatgtctttgccttcgggattgtcctctgtgagctcatcgcccgagtacctgcagaccctgactacctaccacgcactgaggactttggcctggatgtgcctgctttccgaactctggtgggggatgactgcccactgcctttcttgctcctggccatccactgctgcaacctggaacccagcacccgtgcccccttcaccgaaattacccagcacctggaatggatcctggagcagctgcctgagccagccccactcaccaggaccgccctgacacacaatcagggctctgttgcaagagggggtccctctgccacgcttcccaggccagatccccggctttcccgaagccggtcagacctcttcctgcccccatcaccagaatcaccccccaactggggggacaatctgactcgagtcaaccccttctcactacgggaagacctcaggggtggcaagatcaagctcttagacacacccagcaagccagtcctgcctcttgtgccaccatcaccattcccatccactcagctgcccttggtgaccactccggagaccctggtccagcctgggacacctgcccgccgctgccgctcactaccctcatcccccgagctcccccgccgtatggagacagcactgccaggtcctggccctcccgctgtgggcccctcggctgaagagaagatggagtgcgagggcagcagccctgagccggaacctccagggccagcgccccagctgcctctggctgtggccacagacaacttcatcagcacctgttcctcggcctcccaaccctggtcccctagatcaggacccgtcctcaataacaatcccccagctgtggtggtgaactccccacaaggctgggctggggagccctggaaccgggcccagcatagcctgccccgggcggcagccctggagcggacagaaccctcgccacccccttcagctccccgggagcccgatgaggggctgccctgtcctggctgctgcctcggccccttcagctttggcttcctgtccatgtgcccccgccccacaccagctgttgcccgctaccgcaacctgaactgtgaggcgggcagtctcctctgccaccgagggcaccacgccaagccacccacacccagcctgcagctgcctggggcacgctcttagcagtggagcccgtggtctcaggcctccaactttggccttcaggacaccctgtaagaacagagcacacttgctggacagtgccagttccagatgggctgaccggctcttctccccgtgtaggggagccccagcatggactcaagggacagagcacttccagtcgaccccccggctcgcgttcccgtggggatcactgaaccagacacagcattgctgacacatgagactaacacgtgcaattatttaaaaagatttcaataaaactgcctggctggctccgggccgcccctaaaaaaaaaaaaaaaaaaaaaaaaaaaaaaaaaaaaaaaaaagagaaacaacaaagaaagaaaaaaatagaaaaaaaaaacaaacacaatatagaatagaacaacaatcgcaagaacaaaaaaacaatagacaaaaataagtggggaggcgcgcgcgcactgtccaaatcattctacctcgctcctgggagtggcgctcccggtgagaccgccaccattacacaacttctttttttactcaataacgaggcggagtgcgccccacataaatagagaggaaacaccgagctatatatctatatacaaaacgagcagcggcggggcgggcgcgcggcgcgactctatactacatacatcacactctttgatatcagacccgtggcgataggacgaacacagcagcccatgccatgaaaacccgatgtacgaaacaatatctttcttgagaaaggaaagctaacaaataccataatcattcatattcttgagcggtgcagattgaggagagacgcgcacaaaacaaacggcatgcgcgagatcaaactcacactcacaccaacacaccaaagaaacgagatgattagataccccacacctagctccccaatccataagggagtgagaaacatcatcattaaataagcgcagactgatctcaagcaaggcggagtgtatgctaagctcttggttgcgaggtgaacctcacaaacccaccatgagatccacaatttttatatcatctcgattcccgcagcctagtacgagtaaatagaaacacgtcgttctgacgatctagaatgaacaaggaggaaatagaaaagatcattcaccaacatcc

SEQ ID NO: 281324 - DNA, 2264 bp, Homo sapiens
gcccgcggcaagccagcccgccggcgccccggagcgctgccgccaccgtcaccgccaccgcccggtccaggcccaagcccaggccctgcgcggagcggagcggcgcggcgtccacccgggcccagccagccggcgcggcgggggcgggtccaggatcttcggcggatcttccattctcagggcgggagccggagtccgggcgcccgggatcgggctgggcccgcgcccatggcaagcgcggcctgcccgggccctggggaccctgccatgtgaggcaggcccgggctgggggcccggccatggccggggaacggcccccactgcggggccctgggcccgggcctggagaggtgccgggggaggggcccccggggccggggggcacgggcggaggcccgggccggggccgcccctcctcctaccgggctctccgcagcgccgtgtctagcctggcgcgtgtggacgattttcactgcgcggagaagatcggggccggcttcttctctgaggtctacaaggttcggcaccgacagtcagggcaagtcatggtgctgaagatgaacaagctccccagtaaccggggcaacacactacgggaagtgcagctgatgaaccggctcaggcaccccaacatcctaaggttcatgggagtctgtgtgcaccagggacagctgcacgctcttacagagtatatgaatggggggacattggaacagctgctcagctcccctgaacccctatcctggccggtcaggctccacctggccctggacattgcccgaggcctgcggtacctgcactccaaaggtgtatttcaccgcgacctcacatccaagaactgtctagtccgacgggaagatcgaggcttcaccgctgtcgtgggtgacttcgggctggccgaaaagattcctgtgtatagggagggggcaaggaaggagccattggccgtggtgggctccccatactggatggctccagaggtgttacggggtgagctgtatgatgagaaggctgatgtctttgccttcgggattgtcctctgtgagctcatcgcccgagtacctgcagaccctgactacctaccacgcactgaggactttggcctggatgtgcctgctttccgaactctggtgggggatgactgcccactgcctttcttgctcctggccatccactgctgcaacctggaacccagcacccgtgcccccttcaccgaaattacccagcacctggaatggatcctggagcagctgcctgagccagccccactcaccaggaccgccctgacacacaatcagggctctgttgcaagagggggtccctctgccacgcttcccaggccagatccccggctttcccgaagccggtcagacctcttcctgcccccatcaccagaatcaccccccaactggggggacaatctgactcgagtcaaccccttctcactacgggaagacctcaggggtggcaagatcaagctcttagacacacccagcaagccagtcctgcctcttgtgccaccatcaccattcccatccactcagctgcccttggtgaccactccggagaccctggtccagcctgggacacctgcccgccgctgccgctcactaccctcatcccccgagctcccccgccgtatggagacagcactgccaggtcctggccctcccgctgtgggcccctcggctgaagagaagatggagtgcgagggcagcagggcggcagccctggagcggacagaaccctcgccacccccttcagctccccgggagcccgatgaggggctgccctgtcctggctgctgcctcggccccttcagctttggcttcctgtccatgtgcccccgccccacaccagctgttgcccgctaccgcaacctgaactgtgaggcgggcagtctcctctgccaccgagggcaccacgccaagccacccacacccagcctgcagctgcctggggcacgctcttagcagtggagcccgtggtctcaggcctccaactttggccttcaggacaccctgtaagaacagagcacacttgctggacagtgccagttccagatgggctgaccggctcttctccccgtgtaggggagccccagcatggactcaagggacagagcacttccagtcgaccccccggctcgcgttcccgtggggatcactgaaccagacacagcattgctgacacatgagactaacacgtgcaattatttaaaaagatttcaataaaactgcctggctggctccgggccgccccta

SEQ ID NO: 281325 - DNA, 1536 bp, Homo sapiens
gcccgcggcaagccagcccgccggcgccccggagcgctgccgccaccgtcaccgccaccgcccggtccaggcccaagcccaggccctgcgcggagcggagcggcgcggcgtccacccgggcccagccagccggcgcggcgggggcgggtccaggatcttcggcggatcttccattctcagggcgggagccggagtccgggcgcccgggatcgggctgggcccgcgcccatggcaagcgcggcctgcccgggccctggggaccctgccatgtgaggcaggcccgggctgggggcccggccatggccggggaacggcccccactgcggggccctgggcccgggcctggagaggtgccgggggaggggcccccggggccggggggcacgggcggaggcccgggccggggccgcccctcctcctaccgggctctccgcagcgccgtgtctagcctggcgcgtgtggacgattttcactgcgcggagaagatcggggccggcttcttctctgaggtctacaaggttcggcaccgacagtcagggcaagtcatggtgctgaagatgaacaagctccccagtaaccggggcaacacactacgggaagtgcagctgatgaaccggctcaggcaccccaacatcctaaggttcatgggagtctgtgtgcaccagggacagctgcacgctcttacagagtatatgaatggggggacattggaacagctgctcagctcccctgaacccctatcctggccggtcaggctccacctggccctggacattgcccgaggcctgcggtacctgcactccaaaggtgtatttcaccgcgacctcacatccaagaactgtctagtccgacgggaagatcgaggcttcaccgctgtcgtgggtgacttcgggctggccgaaaagattcctgtgtatagggagggggcaaggaaggagccattggccgtggtgggctccccatactggatggctccagaggtgttacggggtgagctgtatgatgagaaggctgatgtctttgccttcgggattgtcctctgtgagctcatcgcccgagtacctgcagaccctgactacctaccacgcactgaggactttggcctggatgtgcctgctttccgaactctggtgggggatgactgcccactgcctttcttgctcctggccatccactgctgcaacctggaacccagcacccgtgcccccttcaccgaaattacccagcacctggaatggatcctggagcagctgcctgagccagccccactcaccaggaccgccctgacacacaatcagggctctgttgcaagagggggtccctctgccacgcttcccaggccagatccccggctttcccgaagccggtcagacctcttcctgcccccactaaccggctttttgcccaaatgggccattatcgaagaattcacaaaaaacaatagcctcatcatccccacatcatagccaccatcaacctccttaactctattctacctacggctaatctatccactcaatcacactaatccccaaa

SEQ ID NO: 281326 - DNA, 130 bp, Homo sapiens
tcaaatgctgaggacagtgattccagacttctctatctacaggctctgttgcaagagggggtccctctgccacgcttcccaggccagatccccggctttcccgaagccggtcagacctcttcctgccccc

SEQ ID NO: 281327 - DNA, 2471 bp, Homo sapiens
gcccgcggcaagccagcccgccggcgccccggagcgctgccgccaccgtcaccgccaccgcccggtccaggcccaagcccaggccctgcgcggagcggagcggcgcggcgtccacccgggcccagccagccggcgcggcgggggcgggtccaggatcttcggcggatcttccattctcagggcgggagccggagtccgggcgcccgggatcgggctgggcccgcgcccatggcaagcgcggcctgcccgggccctggggaccctgccatgtgaggcaggcccgggctgggggcccggccatggccggggaacggcccccactgcggggccctgggcccgggcctggagaggtgccgggggaggggcccccggggccggggggcacgggcggaggcccgggccggggccgcccctcctcctaccgggctctccgcagcgccgtgtctagcctggcgcgtgtggacgattttcactgcgcggagaagatcggggccggcttcttctctgaggtctacaaggttcggcaccgacagtcagggcaagtcatggtgctgaagatgaacaagctccccagtaaccggggcaacacactacgggaagtgcagctgatgaaccggctcaggcaccccaacatcctaaggttcatgggagtctgtgtgcaccagggacagctgcacgctcttacagagtatatgaatggggggacattggaacagctgctcagctcccctgaacccctatcctggccggtcaggctccacctggccctggacattgcccgaggcctgcggtacctgcactccaaaggtgtatttcaccgcgacctcacatccaagaactgtctagtccgacgggaagatcgaggcttcaccgctgtcgtgggtgacttcgggctggccgaaaagattcctgtgtatagggagggggcaaggaaggagccattggccgtggtgggctccccatactggatggctccagaggtgttacggggtgagctgtatgatgagaaggctgatgtctttgccttcgggattgtcctctgtgagctcatcgcccgagtacctgcagaccctgactacctaccacgcactgaggactttggcctggatgtgcctgctttccgaactctggtgggggatgactgcccactgcctttcttgctcctggccatccactgctgcaacctggaacccagcacccgtgcccccttcaccgaaattacccagcacctggaatggatcctggagcagctgcctgagccagccccactcaccaggaccgccctgacacacaatcagggctctgttgcaagagggggtccctctgccacgcttcccaggccagatccccggctttcccgaagccggtcagacctcttcctgcccccatcaccagaatcaccccccaactggggggacaatctgactcgagtcaaccccttctcactacgggaagacctcaggggtggcaagatcaagctcttagacacacccagcaagccagtcctgcctcttgtgccaccatcaccattcccatccactcagctgcccttggtgaccactccggagaccctggtccagcctgggacacctgcccgccgctgccgctcactaccctcatcccccgagctcccccgccgtatggagacagcactgccaggtcctggccctcccgctgtgggcccctcggctgaagagaagatggagtgcgagggcagcagccctgagccggaacctccagggccagcgccccagctgcctctggctgtggccacagacaacttcatcagcacctgttcctcggcctcccaaccctggtcccctagatcaggacccgtcctcaataacaatcccccagctgtggtggtgaactccccacaaggctgggctggggagccctggaaccgggcccagcatagcctgccccgggcggcagccctggagcggacagaaccctcgccacccccttcagctccccgggagcccgatgaggggctgccctgtcctggctgctgcctcggccccttcagctttggcttcctgtccatgtgcccccgccccacaccagctgttgcccgctaccgcaacctgaactgtgaggcgggcagtctcctctgccaccgagggcaccacgccaagccacccacacccagcctgcagctgcctggggcacgctcttagcagtggagcccgtggtctcaggcctccaactttggccttcaggacaccctgtaagaacagagcacacttgctggacagtgccagttccagatgggctgaccggctcttctccccgtgtaggggagccccagcatggactcaagggacagagcacttccagtcgaccccccggctcgcgttcccgtggggatcactgaaccagacacagcattgctgacacatgagactaacacgtgcaattatttaaaaagatttcaataaaactgcctggctggctccgggccgccccta

SEQ ID NO: 281328 - DNA, 1921 bp, Homo sapiens
gagagcagagagggttggagttatgctggagtgacagggctttgggttatacattgggaggccagacagcagaaggtgatgagtgcgtggggatactatgtgtgtgtgtgtcagaactgtctagtccgacgggaagatcgaggcttcaccgctgtcgtgggtgacttcgggctggccgaaaagattcctgtgtataggtgagatgaatgtccctgttccccccaaatctcccagagtgcccctatctgatgtccccagagccccagggatgtttcccttggggaacggagggagttcacctcatccccttttgcctgggggggatgcctgaataggatgcttctgaccactctgcccctgcccctgcagggagggggcaaggaaggagccattggccgtggtgggctccccatactggatggctccagaggtgttacggggtgagctgtatgatgagaaggctgatgtctttgccttcgggattgtcctctgtgagctcatcgcccgagtacctgcagaccctgactacctaccacgcactgaggactttggcctggatgtgcctgctttccgaactctggtgggggatgactgcccactgcctttcttgctcctggccatccactgctgcaacctggaacccagcacccgtgcccccttcaccgaaattacccagcacctggaatggatcctggagcagctgcctgagccagccccactcaccaggaccgccctgacacacaatcagggctctgttgcaagagggggtccctctgccacgcttcccaggccagatccccggctttcccgaagccggtcagacctcttcctgcccccatcaccagaatcaccccccaactggggggacaatctgactcgagtcaaccccttctcactacgggaagacctcaggggtggcaagatcaagctcttagacacacccagcaagccagtcctgcctcttgtgccaccatcaccattcccatccactcagctgcccttggtgaccactccggagaccctggtccagcctgggacacctgcccgccgctgccgctcactaccctcatcccccgagctcccccgccgtatggagacagcactgccaggtcctggccctcccgctgtgggcccctcggctgaagagaagatggagtgcgagggcagcagccctgagccggaacctccagggccagcgccccagctgcctctggctgtggccacagacaacttcatcagcacctgttcctcggcctcccaaccctggtcccctagatcaggacccgtcctcaataacaatcccccagctgtggtggtgaactccccacaaggctgggctggggagccctggaaccgggcccagcatagcctgccccgggcggcagccctggagcggacagaaccctcgccacccccttcagctccccgggagcccgatgaggggctgccctgtcctggctgctgcctcggccccttcagctttggcttcctgtccatgtgcccccgccccacaccagctgttgcccgctaccgcaacctgaactgtgaggcgggcagtctcctctgccaccgagggcaccacgccaagccacccacacccagcctgcagctgcctggggcacgctcttagcagtggagcccgtggtctcaggcctccaactttggccttcaggacaccctgtaagaacagagcacacttgctggacagtgccagttccagatgggctgaccggctcttctccccgtgtaggggagccccagcatggactcaagggacagagcacttccagtcgaccccccggctcgcgttcccgtggggatcactgaaccagacacagcattgctgacacatgagactaacacgtgcaattatttaaaaagatttcaataaaactgcctggctggctccgggccgccccta

SEQ ID NO: 281329 - DNA, 2930 bp, Homo sapiens
gcccgcggcaagccagcccgccggcgccccggagcgctgccgccaccgtcaccgccaccgcccggtccaggcccaagcccaggccctgcgcggagcggagcggcgcggcgtccacccgggcccagccagccggcgcggcgggggcgggtccaggatcttcggcggatcttccattctcagggcgggagccggagtccgggcgcccgggatcgggctgggcccgcgcccatggcaagcgcggcctgcccgggccctggggaccctgccatgtgaggcaggcccgggctgggggcccggccatggccggggaacggcccccactgcggggccctgggcccgggcctggagaggtgccgggggaggggcccccggggccggggggcacgggcggaggcccgggccggggccgcccctcctcctaccgggctctccgcagcgccgtgtctagcctggcgcgtgtggacgattttcactgcgcggagaagatcggggccggcttcttctctgaggtctacaaggttcggcaccgacagtcagggcaagtcatggtgctgaagatgaacaagctccccagtaaccggggcaacacactacgggaagtgcagctgatgaaccggctcaggcaccccaacatcctaaggttcatgggagtctgtgtgcaccagggacagctgcacgctcttacagagtatatgaatggggggacattggaacagctgctcagctcccctgaacccctatcctggccggtcaggctccacctggccctggacattgcccgaggcctgcggtacctgcactccaaaggtgtatttcaccgcgacctcacatccaagaactgtctagtccgacgggaagatcgaggcttcaccgctgtcgtgggtgacttcgggctggccgaaaagattcctgtgtatagggagggggcaaggaaggagccattggccgtggtgggctccccatactggatggctccagaggtgttacggggtgagctgtatgatgagaaggctgatgtctttgccttcgggattgtcctctgtgagctcatcgcccgagtacctgcagaccctgactacctaccacgcactgaggactttggcctggatgtgcctgctttccgaactctggtgggggatgactgcccactgcctttcttgctcctggccatccactgctgcaacctggaacccagcacccgtgcccccttcaccgaaattacccagcacctggaatggatcctggagcagctgcctgagccagccccactcaccaggaccgccctgacacacaatcagggctctgttgcaagagggggtccctctgccacgcttcccaggccagatccccggctttcccgaagccggtcagacctcttcctgcccccatcaccagaatcaccccccaactggggggacaatctgactcgagtcaaccccttctcactacgggaagacctcaggggtggcaagatcaagctcttagacacacccagcaagccagtcctgcctcttgtgccaccatcaccattcccatccactcagctgcccttggtgaccactccggagaccctggtccagcctgggacacctgcccgccgctgccgctcactaccctcatcccccgagctcccccgccgtatggagacagcactgccaggtcctggccctcccgctgtgggcccctcggctgaagagaagatggagtgcgagggcagcagccctgagccggaacctccagggccagcgccccagctgcctctggctgtggccacagacaacttcatcagcacctgttcctcggcctcccaaccctggtcccctagatcaggacccgtcctcaataacaatcccccagctgtggtggtgaactccccacaaggctgggctggggagccctggaaccgggcccagcatagcctgccccgggcggcagccctggagcggacagaaccctcgccacccccttcagctccccgggagcccgatgaggggctgccctgtcctggctgctgcctcggccccttcagctttggcttcctgtccatgtgcccccgccccacaccagctgttgcccgctaccgcaacctgaactgtgaggcgggcagtctcctctgccaccgagggcaccacgccaagccacccacacccagcctgcagctgcctggggcacgctcttagcagtggagcccgtggtctcaggcctccaactttggccttcaggacaccctgtaagaacagagcacacttgctggacagtgccagttccagatgggctgaccggctcttctccccgtgtaggggagccccagcatggactcaagggacagagcacttccagtcgaccccccggctcgcgttcccgtggggatcactgaaccagacacagcattgctgacacatgagactaacacgtgcaattatttaaaaagatttcaataaaactgcctggctggctccgggccgcccctaaaaaaaaaaaaaaaaaaaaaaaaaaaaaaaaaaaaaaaaaaggggggggggcgcaaaaaattccccggggggccccttgcggcaccagcagctttgttgtggttaaagaacggcggggtcccctatataagtgggggtggcattatatataacgacgtgcaggagcgcggggcggcggcgtgtattaaacacaaaggggcggtggcagggggaaaaaagcgcgtggtactgcagtggagctatcttggtgggaggaggcgacaccactctctgggggggggggggggaaactattatgtggggacaaatcctcctgcaggagtggattttaacagcgtcgtgggggtcattaataaaaaatttacgacgggtttatctggggtgttacaccactacgggtcttatagcgtagcgatagaaatattgggtactaagggaattctattcacaatttttacc

SEQ ID NO: 281330 - DNA, 2387 bp, Homo sapiens
gcccgcggcaagccagcccgccggcgccccggagcgctgccgccaccgtcaccgccaccgcccggtccaggcccaagcccaggccctgcgcggagcggagcggcgcggcgtccacccgggcccagccagccggcgcggcgggggcgggtccaggatcttcggcggatcttccattctcagggcgggagccggagtccgggcgcccgggatcgggctgggcccgcgcccatggcaagcgcggcctgcccgggccctggggaccctgccatgtgaggcaggcccgggctgggggcccggccatggccggggaacggcccccactgcggggccctgggcccgggcctggagaggtgccgggggaggggcccccggggccggggggcacgggcggaggcccgggccggggccgcccctcctcctaccgggctctccgcagcgccgtgtctagcctggcgcgtgtggacgattttcactgcgcggagaagatcggggccggcttcttctctgaggtctacaaggttcggcaccgacagtcagggcaagtcatggtgctgaagatgaacaagctccccagtaaccggggcaacacactacgggaagtgcagctgatgaaccggctcaggcaccccaacatcctaaggttcatgggagtctgtgtgcaccagggacagctgcacgctcttacagagtatatgaatggggggacattggaacagctgctcagctcccctgaacccctatcctggccggtcaggctccacctggccctggacattgcccgaggcctgcggtacctgcactccaaaggtgtatttcaccgcgacctcacatccaagaactgtctagtccgacgggaagatcgaggcttcaccgctgtcgtgggtgacttcgggctggccgaaaagattcctgtgtatagggagggggcaaggaaggagccattggccgtggtgggctccccatactggatggctccagaggtgttacggggtgagctgtatgatgagaaggctgatgtctttgccttcgggattgtcctctgtgagctcatcgcccgagtacctgcagaccctgactacctaccacgcactgaggactttggcctggatgtgcctgctttccgaactctggtgggggatgactgcccactgcctttcttgctcctggccatccactgctgcaacctggaacccagcacccgtgcccccttcaccgaaattacccagcacctggaatggatcctggagcagctgcctgagccagccccactcaccaggaccgccctgacacacaatcagggctctgttgcaagagggggtccctctgccacgcttcccaggccagatccccggctttcccgaagccggtcagacctcttcctgcccccatcaccagaatcaccccccaactggggggacaatctgactcgagtcaaccccttctcactacgggaagacctcaggggtggcaagatcaagctcttagacacacccagcaagccagtcctgcctcttgtgccaccatcaccattcccatccactcagctgcccttggtgaccactccggagaccctggtccagcctgggacacctgcccgccgctgccgctcactaccctcatcccccgagctcccccgccgtatggagacagcactgccaggtcctggccctcccgctgtgggcccctcggctgaagagaagatggagtgcgagggcagcagccctgagccggaacctccagggccagcgccccagctgcctctggctgtggccacagacaacttcatcagcacctgttcctcggcctcccaaccctggtcccctagatcaggacccgtcctcaataacaatcccccagctgtggtggtgaactccccacaaggctgggctggggagccctggaaccgggcccagcatagcctgccccgctgcctcggccccttcagctttggcttcctgtccatgtgcccccgccccacaccagctgttgcccgctaccgcaacctgaactgtgaggcgggcagtctcctctgccaccgagggcaccacgccaagccacccacacccagcctgcagctgcctggggcacgctcttagcagtggagcccgtggtctcaggcctccaactttggccttcaggacaccctgtaagaacagagcacacttgctggacagtgccagttccagatgggctgaccggctcttctccccgtgtaggggagccccagcatggactcaagggacagagcacttccagtcgaccccccggctcgcgttcccgtggggatcactgaaccagacacagcattgctgacacatgagactaacacgtgcaattatttaaaaagatttcaataaaactgcctggctggctccgggccgccccta

SEQ ID NO: 281331 - DNA, 1377 bp, Homo sapiens
gcccgcggcaagccagcccgccggcgccccggagcgctgccgccaccgtcaccgccaccgcccggtccaggcccaagcccaggccctgcgcggagcggagcggcgcggcgtccacccgggcccagccagccggcgcggcgggggcgggtccaggatcttcggcggatcttccattctcagggcgggagccggagtccgggcgcccgggatcgggctgggcccgcgcccatggcaagcgcggcctgcccgggccctggggaccctgccatgtgaggcaggcccgggctgggggcccggccatggccggggaacggcccccactgcggggccctgggcccgggcctggagaggtgccgggggaggggcccccggggccggggggcacgggcggaggcccgggccggggccgcccctcctcctaccgggctctccgcagcgccgtgtctagcctggcgcgtgtggacgattttcactgcgcggagaagatcggggccggcttcttctctgaggtctacaaggttcggcaccgacagtcagggcaagtcatggtgctgaagatgaacaagctccccagtaaccggggcaacacactacgggaagtgcagctgatgaaccggctcaggcaccccaacatcctaaggttcatgggagtctgtgtgcaccagggacagctgcacgctcttacagagtatatgaatggggggacattggaacagctgctcagctcccctgaacccctatcctggccggtcaggctccacctggccctggacattgcccgaggcctgcggtacctgcactccaaaggtgtatttcaccgcgacctcacatccaagaactgtctagtccgacgggaagatcgaggcttcaccgctgtcgtgggtgacttcgggctggccgaaaagattcctgtgtatagggagggggcaaggaaggagccattggccgtggtgggctccccatactggatggctccagaggtgttacggggtgagctgtatgatgagaaggtgagacatcaacccttcagatccccaaggccttccgagacccttgaggtattctcataaagccccatccatccccaaaacaaccctaccagatcttcaggagtccccaagatccctttgcccctcacaggcacccttctaacacatgaaaactgtcaagatcccccaccctcaaccaaattctgctatattctgtcaaaattctgaaatgaaaactgttaattcttccccgacactattatctctgacccccaggctgatgtctttgccttcgggattgtcctctgtgagctcatcgcccgagtacctgcagaccctgactacctaccacgcactgaggtgaatgtttctaggtttgcaaagaaag

SEQ ID NO: 281332 - DNA, 3307 bp, Homo sapiens
ctagatgactgccagaagctcatagaacacggagtcaacactgcagaggacttagtccgagaaggtgaaatcgccatgcttggtggtgtgggagaagagaatgggaaactgtggagctttaccaaaaaggcctcgcacattcagttggacagcttaccagaagtacctttactggttgatgtgccttgtttatctgctcagttggatgactcaattcttaacatagtgaaagaccacatttttaagcatggaacagtagcatctcgcccaccagtacagatagaagaactaatagagaaacctggaggcatcattgtacgatggtgtaaggtggatgatgactttacagcccaagattacaggctccagtttcgtaaatgtacttcaaatcattttgaggatgtatatgtaggttctgaaactgaattcatagtattgcacatagaccccaacgttgattaccagttcagagtctgcgcccgaggagatggagctggagcctgagctgctgttgcaggaggcccgcgagaacgtggaggcagcgcagagctaccggcgggagctgggtcaccggcttgaggggctgcgtgaggcgcggaggcagatcaaagaaagtgcatcacagacaagggatgttctcaaacagcattttaatgatttaaagggaacccttggaaagctcctggatgagcgattggtgacccttttgcaagaggtggacaccattgaacaggagaccattaaaccactagatgactgccagaagctcatagaacacggagtcaacactgcagaggacttagtccgagaaggtgaaatcgccatgcttggtggtgtgggagaagagaatgagaaactgtggagctttaccaaaaaggcctcgcacattcagttggacagcttaccagaagtacctttactggttgatgtgccttgtttatctgctcagttggatgactcaattcttaacatagtgaaagaccacatttttaagcatggaacagtagcatctcgcccaccagtacagatagaagaactaatagagaaacctggaggcatcattgtacgatggtgtaaggtggatgatgactttacagcccaagattacaggctccagtttcgtaaatgtacttcaaatcattttgaggatgtatatgtaggttctgaaactgaattcatagtattgcacatagaccccaacgttgattaccagttcagagtctgcgcccgaggagatggccgacaggagtggagtccttggagtgtcccccagataggtcattccacattggtgcctcatgagtggacagctggttttgaggggtacagtctgagcagtcgaagaaatatagcacttcggaacgattctgaatcatcgggtgttctctactccagagctccgacttatttctgtgggcagacattaacattcagagttgaaactgtgggacagccagacagaagagatagcataggagtgtgtgcagaaaaacaggatggatatgactctctgcagcgggatcaagctgtgtgcattagtacaaatggtgcagtttttgtcaatggaaaagaaatgacaaatcagttacccgcagttacttctgggtccactgtcacgtttgacattgaagccgtgactctaggaaccaccagtaataatgaaggtggacacttcaagcttcgagtaactataagttcaaataatagagaagtggtttttgactggttacttgatcagtcttgtggttctctttactttggatgctcatttttctatcctggatggaaagtgttagtgttttagatgtttgggtgcttggctttggttttcagggtctaacgtagctgtcctcagcccagcgtagttgtaattgctttaaaaaaaaagttgaattcatctctaacttaggccattggaaagtgtttactggattcattttgtaatattttagcaaaaagagacttcaatgttgtggacaaaatcatacaattcagtcaattttatttttagcatactgttaaatatcacatcacaataaaaatcaaattggcattaaaagtatagaagatataggaagttctatacccttccactgtacttctcaaagttggttattagaccaggaaaacttaatgtaatattatttttaaaatcatcttaaaggatccaagtccatgtaactctttagaacaagaggaataggtcagatagaagaagctgtgtaatgtattaatacatccgttcatgtgctgtccacatgaatgtgttgactgtgctctccatgttcaggtatttgtaagcagtgttgacttttatcccctcttcagtaatctttaagtccccaaaacattataactttttctttttttgttgagacggagtctcactcttgtcactcaggctggagtgcagtggtgtgatctcagttcactgcaacctctgcctcccacgttcaagcgatcctcctgcctcagcctcctgagtagctgggattacaggcgtcggccaccacacctggctaatttttgtatttttagtagagacagggtttcaccatgttggccaggctggtcttgaactcctgacctcaggtgttccacccacctcagccttccaaagtgctaggattacaggcgtgagccactgcagtgggccaatttttgtatttttttaaatgcttgaccaagtgtctaaaataggcaagtagtaccttttgttctttcattgcaatttgatacagtataggctacagtatttttacagggtaaaactagttatggcagtagtatgcacagcagtgttagccatttcatatgtatgtaatatgcacgtgtgtatccaatctgcctgtgacatgcattttactctttgcagagaatgagctgcagtccagtttaatgtcagtttaataagtggtctctttttagcagagcaaaaaaatatagcgtaaatacttattttttttaaaaacttacttaaatttgtgtgtaaaatatttatttgaaggactttaatatgtaaaaataattgtcttctatgccaccctacagattttattttaatgtgaattatttttttcatttcatttttaccagtatagtaaaaaagtagaaaagcaagtatgatatttttgtaagataatttatttggggattcatgttccctgttagacaatcatgaccttttctacttgtctttttatatataagtagtagatttccacttgtttagggattaagaagatgttctagaatgtagataccttgtccagccataggaatcaaaataaaaaactaaaaaagttca

SEQ ID NO: 281333 - DNA, 997 bp, Homo sapiens
aattatgcttgtacaatgattttattagataagagataacacttgtgtgatttattatgtcaaaattatgcaggaatatactaaaatcttttgtaatttgtgggactgatcatgataccctgttaatggaatcttttattttattgaacttgaccatggcccctaagagtagtctcccatttccatgttttatttaacgtgtctgtattgaagatatccctcaagagattctaacagttttcaatatctttgctttgaaaaagagtggacagctggttttgaggggtacagtctgagcagtcgaagaaatatagcacttcggaacgattctgaatcatcgggtgttctctactccagagctccgacttatttctgtgggcagacattaacattcaggcaagtagatattaaaacatctcacctgcctcaggaagcagagtgaagtgcatagagcatacataagctttgaattcaaaacatcctgagtttattccgtcatttataggcagtgttactgtgggaaggcttctttatttcctgtagctgtagttttctcatctgtattcacagggttattacgtagattaactgggaaatgtatataaaatgcttgttatttaatatgtttatatctcttttcctcttggtaagtagaggtaagtagagtatctctcaaaagtcaatcttaggctgggcatagtggttcacacctgtaaccccagcactttggtaggccgaggcaggtggatcacctgaggtcgggagttcgagaccaacctgagcaacatggagaaaccccatctctactaaaaatacaaaatcagccgggcaggtggcacatatgcctgtaatcccagctacttgggaggctgaggcaggagaattgcttgaacccaagaggcagaggttgcagtgagctgagatcatgccactgcactccagcctgggcaacaagagcgaaactctgtctcaaacacacacacaaaattaaaaagta

SEQ ID NO: 281334 - DNA, 498 bp, Homo sapiens
ccaaaaaaaaaaaattagctgggtagtgtctgtattgaagatatccctcaagagattctaacagttttcaatatctttgctttgaaaaagagtggacagctggttttgaggggtacagtctgagcagtcgaagaaatatagcacttcggaacgattgtctgtgactacccatatggtaaaatacatacacagtccaacaaaaggctaatacatagtaaagcctaagcatactactatgtaatattataatacataacttggagactttagttagagtactatgttatctattcagttttgaaaacattcattaagattttaaatgcaaattcattccttatttggaataaaacaaagtcctctaagttataacaagtattggtcataagttttcagacctattcattcaattacaagaaccccagaattctgtgatgtccagtagaagtatataataaaacactgcatatgtttctacttgatatctttatcccgcta

SEQ ID NO: 281335 - DNA, 3724 bp, Homo sapiens
ttttttataaacatgctgttgttattttctaacaggactgtcattccatttttattatttttcctatcagtggacctagttatttccagttttttgctataagtatttttacttgtgtttctttatggacatatgtgaagtttgtaaaatattaatatttacctaggtgtaaaattatgaggtcttcttagagtattggatccatacgctgataggtaataacaaactttccacaagatgattctatcaatttagccttccaaggagtatatgagtttctgttattccatatcttgaccaataattggcattgtgagactttatatttttgcctaaatgtaccttgttgtggttttatttatttgtttgtttttgagacagggtctcactctgtcacccaggctggagtacagtggcacaatcatgtctccagtctcaatctcctgggctcaagtgatcctcccgcctcagcccccaagtaattgggacttcaggcatgtgcttccacagccagctaagttttgtaattctttgcagagatggggttttgctgtgttgcctaggctggcctcaaattcctgggctcaagtgctccacccgcttcggcctctcaaagtgttaggattataggcatgagccatcatgtctggccttgttgtggttttagatcgtatttgccatattacaaattaggtacaaattaggttgaatattcataatatacatttttggctatttatgtttcttctcctgtagaacgcttatttatgtcttttacccatttttctattgggtggctaattaacatacagaatatatgcaggacccctaaaaattaatgggggttctgtatactgtatgttaattatctcttggttattatgaatgatgtatggttgtgggagacttactgaatcttgaatgttttatctttggcattgattaaaaaacatgccatttcttcaaaggaggcagacttttttatatcagactgggaaatacagaacacatggttcaataaagaaaagaagggagcccaggcgcagtgtctcacgcctatagtcctagcactttgagaggctgagacgagaagattgcttgagctcaggagttaaagatctgagatatggtgaagcccagtctctacaaaaaatacaaaaaattagccggacatggtggtgtgcacctgaaatcccagctacttgtggggtggaaggaagaggatggcttgaacccggggtgtggaggctgcaataagccgagatcacgccactgcactacagcctgggtgacaaagtgagaccctttctcaaaaaaaaaagaagggagataatgatgtgatggcatattttctatggccttcccaagaataccccatattcagcatgtgggcctgtctgcttggtccaaaatggctccgttcaaaatttttaagcagtgatgctgagagaagtcattttctgttttttacctaacataaagcttttctccctaggtggatgatgactttacagcccaagattacaggctccagtttcgtaaatgtacttcaaatcattttgaggatgtatatgtaggttctgaaactgaattcatagtattgcacatagaccccaacgttgattaccagttcagagtctgcgcccgaggagatggccgacaggagtggagtccttggagtgtcccccagataggtcattccacattggtgcctcatgagtggacagctggttttgaggggtacagtctgagcagtcgaagaaatatagcacttcggaacgattctgaatcatcgggtgttctctactccagagctccgacttatttctgtgggcagacattaacattcagagttgaaactgtgggacagccagacagaagagatagcataggagtgtgtgcagaaaaacaggatggatatgactctctgcagcgggatcaagctgtgtgcattagtacaaatggtgcagtttttgtcaatggaaaagaaatgacaaatcagttacccgcagttacttctgggtccactgtcacgtttgacattgaagccgtgactctaggaaccaccagtaataatgaaggtggacacttcaagcttcgagtaactataagttcaaataatagagaagtggtttttgactggttacttgatcagtcttgtggttctctttactttggatgctcatttttctatcctggatggaaagtgttagtgttttagatgtttgggtgcttggctttggttttcagggtctaacgtagctgtcctcagcccagcgtagttgtaattgctttaaaaaaaaagttgaattcatctctaacttaggccattggaaagtgtttactggattcattttgtaatattttagcaaaaagagacttcaatgttgtggacaaaatcatacaattcagtcaattttatttttagcatactgttaaatatcacatcacaataaaaatcaaattggcattaaaagtatagaagatataggaagttctatacccttccactgtacttctcaaagttggttattagaccaggaaaacttaatgtaatattatttttaaaatcatcttaaaggatccaagtccatgtaactctttagaacaagaggaataggtcagatagaagaagctgtgtaatgtattaatacatccgttcatgtgctgtccacatgaatgtgttgactgtgctctccatgttcaggtatttgtaagcagtgttgacttttatcccctcttcagtaatctttaagtccccaaaacattataactttttctttttttgttgagacggagtctcactcttgtcactcaggctggagtgcagtggtgtgatctcagttcactgcaacctctgcctcccacgttcaagcgatcctcctgcctcagcctcctgagtagctgggattacaggcgtcggccaccacacctggctaatttttgtatttttagtagagacagggtttcaccatgttggccaggctggtcttgaactcctgacctcaggtgttccacccacctcagccttccaaagtgctaggattacaggcgtgagccactgcagtgggccaatttttgtatttttttaaatgcttgaccaagtgtctaaaataggcaagtagtaccttttgttctttcattgcaatttgatacagtataggctacagtatttttacagggtaaaactagttatggcagtagtatgcacagcagtgttagccatttcatatgtatgtaatatgcacgtgtgtatccaatctgcctgtgacatgcattttactctttgcagagaatgagctgcagtccagtttaatgtcagtttaataagtggtctctttttagcagagcaaaaaaatatagcgtaaatacttattttttttaaaaacttacttaaatttgtgtgtaaaatatttatttgaaggactttaatatgtaaaaataattgtcttctatgccaccctacagattttattttaatgtgaattatttttttcatttcatttttaccagtatagtaaaaaagtagaaaagcaagtatgatatttttgtaagataatttatttggggattcatgttccctgttagacaatcatgaccttttctacttgtctttttatatataagtagtagatttccacttgtttagggattaagaagatgttctagaatgtagataccttgtccagccataggaatcaaaataaaaaactaaaaaagttca

SEQ ID NO: 281336 - DNA, 3907 bp, Homo sapiens
ttttttataaacatgctgttgttattttctaacaggactgtcattccatttttattatttttcctatcagtggacctagttatttccagttttttgctataagtatttttacttgtgtttctttatggacatatgtgaagtttgtaaaatattaatatttacctaggtgtaaaattatgaggtcttcttagagtattggatccatacgctgataggtaataacaaactttccacaagatgattctatcaatttagccttccaaggagtatatgagtttctgttattccatatcttgaccaataattggcattgtgagactttatatttttgcctaaatgtaccttgttgtggttttatttatttgtttgtttttgagacagggtctcactctgtcacccaggctggagtacagtggcacaatcatgtctccagtctcaatctcctgggctcaagtgatcctcccgcctcagcccccaagtaattgggacttcaggcatgtgcttccacagccagctaagttttgtaattctttgcagagatggggttttgctgtgttgcctaggctggcctcaaattcctgggctcaagtgctccacccgcttcggcctctcaaagtgttaggattataggcatgagccatcatgtctggccttgttgtggttttagatcgtatttgccatattacaaattaggtacaaattaggttgaatattcataatatacatttttggctatttatgtttcttctcctgtagaacgcttatttatgtcttttacccatttttctattgggtggctaattaacatacagaatatatgcaggacccctaaaaattaatgggggttctgtatactgtatgttaattatctcttggttattatgaatgatgtatggttgtgggagacttactgaatcttgaatgttttatctttggcattgattaaaaaacatgccatttcttcaaaggaggcagacttttttatatcagactgggaaatacagaacacatggttcaataaagaaaagaagggagcccaggcgcagtgtctcacgcctatagtcctagcactttgagaggctgagacgagaagattgcttgagctcaggagttaaagatctgagatatggtgaagcccagtctctacaaaaaatacaaaaaattagccggacatggtggtgtgcacctgaaatcccagctacttgtggggtggaaggaagaggatggcttgaacccggggtgtggaggctgcaataagccgagatcacgccactgcactacagcctgggtgacaaagtgagaccctttctcaaaaaaaaaagaagggagataatgatgtgatggcatattttctatggccttcccaagaataccccatattcagcatgtgggcctgtctgcttggtccaaaatggctccgttcaaaatttttaagcagtgatgctgagagaagtcattttctgttttttacctaacataaagcttttctccctaggtggatgatgactttacagcccaagattacaggctccagtttcgtaaatgtacttcaaatcattttgaggatgtatatgtaggttctgaaactgaattcatagtattgcacatagaccccaacgttgattaccagttcagagtctgcgcccgaggagatggccgacaggagtggagtccttggagtgtcccccagataggtcattccacattggtgcctcatgagtggacagctggttttgaggggtacagtctgagcagtcgaagaaatatagcacttcggaacgattctgaatcatcgggtgttctctactccagagctccgacttatttctgtgggcagacattaacattcagagttgaaactgtgggacagccagacagaagagatagcataggagtgtgtgcagaaaaacaggatggatatgactctctgcagcgggatcaagctgtgtgcattagtacaaatggtgcagtttttgtcaatggaaaagaaatgacaaatcagttacccgcagttacttctgggtccactgtcacgtttgacattgaagccgtgactctaggaaccaccagtaataatgaaggtggacacttcaagcttcgagtaactataagttcaaataatagagaagtggtttttgactggttacttgatcagtcttgtggttctctttactttggatgctcatttttctatcctggatggaaagtgttagtgttttagatgtttgggtgcttggctttggttttcagggtctaacgtagctgtcctcagcccagcgtagttgtaattgctttaaaaaaaaagttgaattcatctctaacttaggccattggaaagtgtttactggattcattttgtaatattttagcaaaaagagacttcaatgttgtggacaaaatcatacaattcagtcaattttatttttagcatactgttaaatatcacatcacaataaaaatcaaattggcattaaaagtatagaagatataggaagttctatacccttccactgtacttctcaaagttggttattagaccaggaaaacttaatgtaatattatttttaaaatcatcttaaaggatccaagtccatgtaactctttagaacaagaggaataggtcagatagaagaagctgtgtaatgtattaatacatccgttcatgtgctgtccacatgaatgtgttgactgtgctctccatgttcaggtatttgtaagcagtgttgacttttatcccctcttcagtaatctttaagtccccaaaacattataactttttctttttttgttgagacggagtctcactcttgtcactcaggctggagtgcagtggtgtgatctcagttcactgcaacctctgcctcccacgttcaagcgatcctcctgcctcagcctcctgagtagctgggattacaggcgtcggccaccacacctggctaatttttgtatttttagtagagacagggtttcaccatgttggccaggctggtcttgaactcctgacctcaggtgttccacccacctcagccttccaaagtgctaggattacaggcgtgagccactgcagtgggccaatttttgtatttttttaaatgcttgaccaagtgtctaaaataggcaagtagtaccttttgttctttcattgcaatttgatacagtataggctacagtatttttacagggtaaaactagttatggcagtagtatgcacagcagtgttagccatttcatatgtatgtaatatgcacgtgtgtatccaatctgcctgtgacatgcattttactctttgcagagaatgagctgcagtccagtttaatgtcagtttaataagtggtctctttttagcagagcaaaaaaatatagcgtaaatacttattttttttaaaaacttacttaaatttgtgtgtaaaatatttatttgaaggactttaatatgtaaaaataattgtcttctatgccaccctacagattttattttaatgtgaattatttttttcatttcatttttaccagtatagtaaaaaagtagaaaagcaagtatgatatttttgtaagataatttatttggggattcatgttccctgttagacaatcatgaccttttctacttgtctttttatatataagtagtagatttccacttgtttagggattaagaagatgttctagaatgtagataccttgtccagccataggaatcaaaataaaaaactaaaaaagttcagtgtgtgtacttttttcttctgtgagatttggtgaatccagttttaacctacttttcatttgaagggaaaacaggcttcttgtggctccaggcattttagtaagatatcactgtgacttgtgaaagggtatgtgtaccttcttgtactttcttttaaaaacttttttaaaaatattttttgta

SEQ ID NO: 281337 - DNA, 3947 bp, Homo sapiens
ttattctactcatgctataattatttaccagtaactttggttcttcctgtattccaatttgaataccctatatttctttctcttgcctgattgccctctctcaccactcctattcagcacagagttggaagttctggccagggcagtcaggcaagagaaataaataaagggcattcaaacaggaaaagaggaagtcaaatggcctctgtaagccaaggagcgaggcctctgaagaaaccaaatgggccaatgaaaaaaaagaaaatgtcaggcccatataactgatgaacgtcgatgcaaaaatcctcaataaaatactgcagaccaaatccagcagcacatcaaaaagcttatccaccatgatcaagttggcttcatgcctggggatgcaaggctggttcaacatacgcaaatcaataaatccatcacataaacagagtaataacaaactttccacaagatgattctatcaatttagccttccaaggagtatatgagtttctgttattccatatcttgaccaataattggcattgtgagactttatatttttgcctaaatgtaccttgttgtggttttatttatttgtttgtttttgagacagggtctcactctgtcacccaggctggagtacagtggcacaatcatgtctccagtctcaatctcctgggctcaagtgatcctcccgcctcagcccccaagtaattgggacttcaggcatgtgcttccacagccagctaagttttgtaattctttgcagagatggggttttgctgtgttgcctaggctggcctcaaattcctgggctcaagtgctccacccgcttcggcctctcaaagtgttaggattataggcatgagccatcatgtctggccttgttgtggttttagatcgtatttgccatattacaaattaggtacaaattaggttgaatattcataatatacatttttggctatttatgtttcttctcctgtagaacgcttatttatgtcttttacccatttttctattgggtggctaattaacatacagaatatatgcaggacccctaaaaattaatgggggttctgtatactgtatgttaattatctcttggttattatgaatgatgtatggttgtgggagacttactgaatcttgaatgttttatctttggcattgattaaaaaacatgccatttcttcaaaggaggcagacttttttatatcagactgggaaatacagaacacatggttcaataaagaaaagaagggagcccaggcgcagtgtctcacgcctatagtcctagcactttgagaggctgagacgagaagattgcttgagctcaggagttaaagatctgagatatggtgaagcccagtctctacaaaaaatacaaaaaattagccggacatggtggtgtgcacctgaaatcccagctacttgtggggtggaaggaagaggatggcttgaacccggggtgtggaggctgcaataagccgagatcacgccactgcactacagcctgggtgacaaagtgagaccctttctcaaaaaaaaaagaagggagataatgatgtgatggcatattttctatggccttcccaagaataccccatattcagcatgtgggcctgtctgcttggtccaaaatggctccgttcaaaatttttaagcagtgatgctgagagaagtcattttctgttttttacctaacataaagcttttctccctaggtggatgatgactttacagcccaagattacaggctccagtttcgtaaatgtacttcaaatcattttgaggatgtatatgtaggttctgaaactgaattcatagtattgcacatagaccccaacgttgattaccagttcagagtctgcgcccgaggagatggccgacaggagtggagtccttggagtgtcccccagataggtcattccacattggtgcctcatgagtggacagctggttttgaggggtacagtctgagcagtcgaagaaatatagcacttcggaacgattctgaatcatcgggtgttctctactccagagctccgacttatttctgtgggcagacattaacattcagagttgaaactgtgggacagccagacagaagagatagcataggagtgtgtgcagaaaaacaggatggatatgactctctgcagcgggatcaagctgtgtgcattagtacaaatggtgcagtttttgtcaatggaaaagaaatgacaaatcagttacccgcagttacttctgggtccactgtcacgtttgacattgaagccgtgactctaggaaccaccagtaataatgaaggtggacacttcaagcttcgagtaactataagttcaaataatagagaagtggtttttgactggttacttgatcagtcttgtggttctctttactttggatgctcatttttctatcctggatggaaagtgttagtgttttagatgtttgggtgcttggctttggttttcagggtctaacgtagctgtcctcagcccagcgtagttgtaattgctttaaaaaaaaagttgaattcatctctaacttaggccattggaaagtgtttactggattcattttgtaatattttagcaaaaagagacttcaatgttgtggacaaaatcatacaattcagtcaattttatttttagcatactgttaaatatcacatcacaataaaaatcaaattggcattaaaagtatagaagatataggaagttctatacccttccactgtacttctcaaagttggttattagaccaggaaaacttaatgtaatattatttttaaaatcatcttaaaggatccaagtccatgtaactctttagaacaagaggaataggtcagatagaagaagctgtgtaatgtattaatacatccgttcatgtgctgtccacatgaatgtgttgactgtgctctccatgttcaggtatttgtaagcagtgttgacttttatcccctcttcagtaatctttaagtccccaaaacattataactttttctttttttgttgagacggagtctcactcttgtcactcaggctggagtgcagtggtgtgatctcagttcactgcaacctctgcctcccacgttcaagcgatcctcctgcctcagcctcctgagtagctgggattacaggcgtcggccaccacacctggctaatttttgtatttttagtagagacagggtttcaccatgttggccaggctggtcttgaactcctgacctcaggtgttccacccacctcagccttccaaagtgctaggattacaggcgtgagccactgcagtgggccaatttttgtatttttttaaatgcttgaccaagtgtctaaaataggcaagtagtaccttttgttctttcattgcaatttgatacagtataggctacagtatttttacagggtaaaactagttatggcagtagtatgcacagcagtgttagccatttcatatgtatgtaatatgcacgtgtgtatccaatctgcctgtgacatgcattttactctttgcagagaatgagctgcagtccagtttaatgtcagtttaataagtggtctctttttagcagagcaaaaaaatatagcgtaaatacttattttttttaaaaacttacttaaatttgtgtgtaaaatatttatttgaaggactttaatatgtaaaaataattgtcttctatgccaccctacagattttattttaatgtgaattatttttttcatttcatttttaccagtatagtaaaaaagtagaaaagcaagtatgatatttttgtaagataatttatttggggattcatgttccctgttagacaatcatgaccttttctacttgtctttttatatataagtagtagatttccacttgtttagggattaagaagatgttctagaatgtagataccttgtccagccataggaatcaaaataaaaaactaaaaaagttca

SEQ ID NO: 281338 - DNA, 2725 bp, Homo sapiens
ggtggcgttcagaggagtcccggaagttcctttcacttcacagacaagggatgttctcaaacagcattttaatgatttaaagggaacccttggaaagctcctggatgagcgattggtgacccttttgcaagaggtggacaccattgaacaggagaccattaaaccactagatgactgccagaagctcatagaacacggagtcaacactgcagaggacttagtccgagaaggtgaaatcgccatgcttggtggtgtgggagaagagaatgagaaactgtggagctttaccaaaaaggcctcgcacattcagttggacagcttaccagaagtacctttactggttgatgtgccttgtttatctgctcagttggatgactcaattcttaacatagtgaaagaccacatttttaagcatggaacagtagcatctcgcccaccagtacagatagaagaactaatagagaaacctggaggcatcattgtacgatggtgtaaggtggatgatgactttacagcccaagattacaggctccagtttcgtaaatgtacttcaaatcattttgaggatgtatatgtaggttctgaaactgaattcatagtattgcacatagaccccaacgttgattaccagttcagagtctgcgcccgaggagatggccgacaggagtggagtccttggagtgtcccccagataggtcattccacattggtgcctcatgagtggacagctggttttgaggggtacagtctgagcagtcgaagaaatatagcacttcggaacgattctgaatcatcgggtgttctctactccagagctccgacttatttctgtgggcagacattaacattcagagttgaaactgtgggacagccagacagaagagatagcataggagtgtgtgcagaaaaacaggatggatatgactctctgcagcgggatcaagctgtgtgcattagtacaaatggtgcagtttttgtcaatggaaaagaaatgacaaatcagttacccgcagttacttctgggtccactgtcacgtttgacattgaagccgtgactctaggaaccaccagtaataatgaaggtggacacttcaagcttcgagtaactataagttcaaataatagagaagtggtttttgactggttacttgatcagtcttgtggttctctttactttggatgctcatttttctatcctggatggaaagtgttagtgttttagatgtttgggtgcttggctttggttttcagggtctaacgtagctgtcctcagcccagcgtagttgtaattgctttaaaaaaaaagttgaattcatctctaacttaggccattggaaagtgtttactggattcattttgtaatattttagcaaaaagagacttcaatgttgtggacaaaatcatacaattcagtcaattttatttttagcatactgttaaatatcacatcacaataaaaatcaaattggcattaaaagtatagaagatataggaagttctatacccttccactgtacttctcaaagttggttattagaccaggaaaacttaatgtaatattatttttaaaatcatcttaaaggatccaagtccatgtaactctttagaacaagaggaataggtcagatagaagaagctgtgtaatgtattaatacatccgttcatgtgctgtccacatgaatgtgttgactgtgctctccatgttcaggtatttgtaagcagtgttgacttttatcccctcttcagtaatctttaagtccccaaaacattataactttttctttttttgttgagacggagtctcactcttgtcactcaggctggagtgcagtggtgtgatctcagttcactgcaacctctgcctcccacgttcaagcgatcctcctgcctcagcctcctgagtagctgggattacaggcgtcggccaccacacctggctaatttttgtatttttagtagagacagggtttcaccatgttggccaggctggtcttgaactcctgacctcaggtgttccacccacctcagccttccaaagtgctaggattacaggcgtgagccactgcagtgggccaatttttgtatttttttaaatgcttgaccaagtgtctaaaataggcaagtagtaccttttgttctttcattgcaatttgatacagtataggctacagtatttttacagggtaaaactagttatggcagtagtatgcacagcagtgttagccatttcatatgtatgtaatatgcacgtgtgtatccaatctgcctgtgacatgcattttactctttgcagagaatgagctgcagtccagtttaatgtcagtttaataagtggtctctttttagcagagcaaaaaaatatagcgtaaatacttattttttttaaaaacttacttaaatttgtgtgtaaaatatttatttgaaggactttaatatgtaaaaataattgtcttctatgccaccctacagattttattttaatgtgaattatttttttcatttcatttttaccagtatagtaaaaaagtagaaaagcaagtatgatatttttgtaagataatttatttggggattcatgttccctgttagacaatcatgaccttttctacttgtctttttatatataagtagtagatttccacttgtttagggattaagaagatgttctagaatgtagataccttgtccagccataggaatcaaaataaaaaactaaaaaagttca

SEQ ID NO: 281339 - DNA, 3361 bp, Homo sapiens
  misc_feature (2445)..(2445): n is a, c, g, or t
ttttttataaacatgctgttgttattttctaacaggactgtcattccatttttattatttttcctatcagtggacctagttatttccagttttttgctataagtatttttacttgtgtttctttatggacatatgtgaagtttgtaaaatattaatatttacctaggtgtaaaattatgaggtcttcttagagtattggatccatacgctgataggtaataacaaactttccacaagatgattctatcaatttagccttccaaggagtatatgagtttctgttattccatatcttgaccaataattggcattgtgagactttatatttttgcctaaatgtaccttgttgtggttttatttatttgtttgtttttgagacagggtctcactctgtcacccaggctggagtacagtggcacaatcatgtctccagtctcaatctcctgggctcaagtgatcctcccgcctcagcccccaagtaattgggacttcaggcatgtgcttccacagccagctaagttttgtaattctttgcagagatggggttttgctgtgttgcctaggctggcctcaaattcctgggctcaagtgctccacccgcttcggcctctcaaagtgttaggattataggcatgagccatcatgtctggccttgttgtggttttagatcgtatttgccatattacaaattaggtacaaattaggttgaatattcataatatacatttttggctatttatgtttcttctcctgtagaacgcttatttatgtcttttacccatttttctattgggtggctaattaacatacagaatatatgcaggacccctaaaaattaatgggggttctgtatactgtatgttaattatctcttggttattatgaatgatgtatggttgtgggagacttactgaatcttgaatgttttatctttggcattgattaaaaaacatgccatttcttcaaaggaggcagacttttttatatcagactgggaaatacagaacacatggttcaataaagaaaagaagggagcccaggcgcagtgtctcacgcctatagtcctagcactttgagaggctgagacgagaagattgcttgagctcaggagttaaagatctgagatatggtgaagcccagtctctacaaaaaatacaaaaaattagccggacatggtggtgtgcacctgaaatcccagctacttgtggggtggaaggaagaggatggcttgaacccggggtgtggaggctgcaataagccgagatcacgccactgcactacagcctgggtgacaaagtgagaccctttctcaaaaaaaaaagaagggagataatgatgtgatggcatattttctatggccttcccaagaataccccatattcagcatgtgggcctgtctgcttggtccaaaatggctccgttcaaaatttttaagcagtgatgctgagagaagtcattttctgttttttacctaacataaagcttttctccctaggtggatgatgactttacagcccaagattacaggctccagtttcgtaaatgtacttcaaatcattttgaggatgtatatgtaggttctgaaactgaattcatagtattgcacatagaccccaacgttgattaccagttcagagtctgcgcccgaggagatggccgacaggagtggagtccttggagtgtcccccagataggtcattccacattggtgcctcatgagtggacagctggttttgaggggtacagtctgagcagtcgaagaaatatagcacttcggaacgattctgaatcatcgggtgttctctactccagagctccgacttatttctgtgggcagacattaacattcagagttgaaactgtgggacagccagacagaagagatagcataggagtgtgtgcagaaaaacaggatggatatgactctctgcagcgggatcaagctgtgtgcattagtacaaatggtaagagataaataactgtcattctcttggaaatatattaattattttagtaatatgtgaatctgttccagttccatacatttatagtaggagatgagaaaatttaggtatttttctttttcttttttttttttttattatgaagtctcactccatcactcaggctggagtacagtggcatgatcgtagcccgctgcagcctgaaattcttgggcccaagccatcctcccaccccagcctcccgagtagccgggaccacaggtgcatgccactgtgactggctaattttttttatttttacttttttgtaaagataagttgttgcccaggtgagtcttgactcctggtttccagcaatcctcccaccttggtggcctcccaaagtgctaggattacaggcgtgagccaccgtgcccagccaacaccacaaaatattattaacatgtcttgctagtgaatttttttttttttttttttttgnaaagggattcccacctggtacctggtgtgatctcagttcactgcaacctctgcctcccacgttcaagcgatcctcctgcctcagcctcctgagtagctgggattacaggcgtcggccaccacacctggctaatttttgtatttttagtagagacagggtttcaccatgttggccaggctggtcttgaactcctgacctcaggtgttccacccacctcagccttccaaagtgctaggattacaggcgtgagccactgcagtgggccaatttttgtatttttttaaatgcttgaccaagtgtctaaaataggcaagtagtaccttttgttctttcattgcaatttgatacagtataggctacagtatttttacagggtaaaactagttatggcagtagtatgcacagcagtgttagccatttcatatgtatgtaatatgcacgtgtgtatccaatctgcctgtgacatgcattttactctttgcagagaatgagctgcagtccagtttaatgtcagtttaataagtggtctctttttagcagagcaaaaaaatatagcgtaaatacttattttttttaaaaacttacttaaatttgtgtgtaaaatatttatttgaaggactttaatatgtaaaaataattgtcttctatgccaccctacagattttattttaatgtgaattatttttttcatttcatttttaccagtatagtaaaaaagtagaaaagcaagtatgatatttttgtaagataatttatttggggattcatgttccctgttagacaatcatgaccttttctacttgtctttttatatataagtagtagatttccacttgtttagggattaagaagatgttctagaatgtagataccttgtccagccataggaatcaaaataaaaaactaaaaaagttca

SEQ ID NO: 281340 - DNA, 2460 bp, Homo sapiens
ttttatatttgaatgttatttagttagtttttttgagaccctttctcaaaaaaaaaagaagggagataatgatgtgatggcatattttctatggccttcccaagaataccccatattcagcatgtgggcctgtctgcttggtccaaaatggctccgttcaaaatttttaagcagtgatgctgagagaagtcattttctgttttttacctaacataaagcttttctccctaggtggatgatgactttacagcccaagattacaggctccagtttcgtaaatgtacttcaaatcattttgaggatgtatatgtaggttctgaaactgaattcatagtattgcacatagaccccaacgttgattaccagttcagagtctgcgcccgaggagatggccgacaggagtggagtccttggagtgtcccccagataggtcattccacattggtgcctcatgagtggacagctggttttgaggggtacagtctgagcagtcgaagaaatatagcacttcggaacgattctgaatcatcgggtgttctctactccagagctccgacttatttctgtgggcagacattaacattcagagttgaaactgtgggacagccagacagaagagatagcataggagtgtgtgcagaaaaacaggatggatatgactctctgcagcgggatcaagctgtgtgcattagtacaaatggtgcagtttttgtcaatggaaaagaaatgacaaatcagttacccgcagttacttctgggtccactgtcacgtttgacattgaagccgtgactctaggaaccaccagtaataatgaaggtggacacttcaagcttcgagtaactataagttcaaataatagagaagtggtttttgactggttacttgatcagtcttgtggttctctttactttggatgctcatttttctatcctggatggaaagtgttagtgttttagatgtttgggtgcttggctttggttttcagggtctaacgtagctgtcctcagcccagcgtagttgtaattgctttaaaaaaaaagttgaattcatctctaacttaggccattggaaagtgtttactggattcattttgtaatattttagcaaaaagagacttcaatgttgtggacaaaatcatacaattcagtcaattttatttttagcatactgttaaatatcacatcacaataaaaatcaaattggcattaaaagtatagaagatataggaagttctatacccttccactgtacttctcaaagttggttattagaccaggaaaacttaatgtaatattatttttaaaatcatcttaaaggatccaagtccatgtaactctttagaacaagaggaataggtcagatagaagaagctgtgtaatgtattaatacatccgttcatgtgctgtccacatgaatgtgttgactgtgctctccatgttcaggtatttgtaagcagtgttgacttttatcccctcttcagtaatctttaagtccccaaaacattataactttttctttttttgttgagacggagtctcactcttgtcactcaggctggagtgcagtggtgtgatctcagttcactgcaacctctgcctcccacgttcaagcgatcctcctgcctcagcctcctgagtagctgggattacaggcgtcggccaccacacctggctaatttttgtatttttagtagagacagggtttcaccatgttggccaggctggtcttgaactcctgacctcaggtgttccacccacctcagccttccaaagtgctaggattacaggcgtgagccactgcagtgggccaatttttgtatttttttaaatgcttgaccaagtgtctaaaataggcaagtagtaccttttgttctttcattgcaatttgatacagtataggctacagtatttttacagggtaaaactagttatggcagtagtatgcacagcagtgttagccatttcatatgtatgtaatatgcacgtgtgtatccaatctgcctgtgacatgcattttactctttgcagagaatgagctgcagtccagtttaatgtcagtttaataagtggtctctttttagcagagcaaaaaaatatagcgtaaatacttattttttttaaaaacttacttaaatttgtgtgtaaaatatttatttgaaggactttaatatgtaaaaataattgtcttctatgccaccctacagattttattttaatgtgaattatttttttcatttcatttttaccagtatagtaaaaaagtagaaaagcaagtatgatatttttgtaagataatttatttggggattcatgttccctgttagacaatcatgaccttttctacttgtctttttatatataagtagtagatttccacttgtttagggattaagaagatgttctagaatgtagataccttgtccagccataggaatcaaaataaaaaactaaaaaagttca

SEQ ID NO: 281341 - DNA, 2269 bp, Homo sapiens
aattatgcttgtacaatgattttattagataagagataacacttgtgtgatttattatgtcaaaattatgcaggaatatactaaaatcttttgtaatttgtgggactgatcatgataccctgttaatggaatcttttattttattgaacttgaccatggcccctaagagtagtctcccatttccatgttttatttaacgtgtctgtattgaagatatccctcaagagattctaacagttttcaatatctttgctttgaaaaagagtggacagctggttttgaggggtacagtctgagcagtcgaagaaatatagcacttcggaacgattctgaatcatcgggtgttctctactccagagctccgacttatttctgtgggcagacattaacattcagagttgaaactgtgggacagccagacagaagagatagcataggagtgtgtgcagaaaaacaggatggatatgactctctgcagcgggatcaagctgtgtgcattagtacaaatggtgcagtttttgtcaatggaaaagaaatgacaaatcagttacccgcagttacttctgggtccactgtcacgtttgacattgaagccgtgactctaggaaccaccagtaataatgaaggtggacacttcaagcttcgagtaactataagttcaaataatagagaagtggtttttgactggttacttgatcagtcttgtggttctctttactttggatgctcatttttctatcctggatggaaagtgttagtgttttagatgtttgggtgcttggctttggttttcagggtctaacgtagctgtcctcagcccagcgtagttgtaattgctttaaaaaaaaagttgaattcatctctaacttaggccattggaaagtgtttactggattcattttgtaatattttagcaaaaagagacttcaatgttgtggacaaaatcatacaattcagtcaattttatttttagcatactgttaaatatcacatcacaataaaaatcaaattggcattaaaagtatagaagatataggaagttctatacccttccactgtacttctcaaagttggttattagaccaggaaaacttaatgtaatattatttttaaaatcatcttaaaggatccaagtccatgtaactctttagaacaagaggaataggtcagatagaagaagctgtgtaatgtattaatacatccgttcatgtgctgtccacatgaatgtgttgactgtgctctccatgttcaggtatttgtaagcagtgttgacttttatcccctcttcagtaatctttaagtccccaaaacattataactttttctttttttgttgagacggagtctcactcttgtcactcaggctggagtgcagtggtgtgatctcagttcactgcaacctctgcctcccacgttcaagcgatcctcctgcctcagcctcctgagtagctgggattacaggcgtcggccaccacacctggctaatttttgtatttttagtagagacagggtttcaccatgttggccaggctggtcttgaactcctgacctcaggtgttccacccacctcagccttccaaagtgctaggattacaggcgtgagccactgcagtgggccaatttttgtatttttttaaatgcttgaccaagtgtctaaaataggcaagtagtaccttttgttctttcattgcaatttgatacagtataggctacagtatttttacagggtaaaactagttatggcagtagtatgcacagcagtgttagccatttcatatgtatgtaatatgcacgtgtgtatccaatctgcctgtgacatgcattttactctttgcagagaatgagctgcagtccagtttaatgtcagtttaataagtggtctctttttagcagagcaaaaaaatatagcgtaaatacttattttttttaaaaacttacttaaatttgtgtgtaaaatatttatttgaaggactttaatatgtaaaaataattgtcttctatgccaccctacagattttattttaatgtgaattatttttttcatttcatttttaccagtatagtaaaaaagtagaaaagcaagtatgatatttttgtaagataatttatttggggattcatgttccctgttagacaatcatgaccttttctacttgtctttttatatataagtagtagatttccacttgtttagggattaagaagatgttctagaatgtagataccttgtccagccataggaatcaaaataaaaaactaaaaaagttca

SEQ ID NO: 281342 - DNA, 2141 bp, Homo sapiens
  misc_feature (91)..(91): n is a, c, g, or t
ggccggcaccacatggctggctgcacatcagttattcccaggtcattactcagctaacagacgaaaaccagtcatgttgccccgctttgtncatagatttttccagacagaggctgagttacagtatagcaagaactcaatcatggttgctgtactattcagaaaaaaacaattgtggtgagattgctctttttaagctagtggctgttaagtatcattcatgttatatttttaaaagtatgaaatgacctttctacttcatttacagagttgaaactgtgggacagccagacagaagagatagcataggagtgtgtgcagaaaaacaggatggatatgactctctgcagcgggatcaagctgtgtgcattagtacaaatggtgcagtttttgtcaatggaaaagaaatgacaaatcagttacccgcagttacttctgggtccactgtcacgtttgacattgaagccgtgactctaggaaccaccagtaataatgaaggtggacacttcaagcttcgagtaactataagttcaaataatagagaagtggtttttgactggttacttgatcagtcttgtggttctctttactttggatgctcatttttctatcctggatggaaagtgttagtgttttagatgtttgggtgcttggctttggttttcagggtctaacgtagctgtcctcagcccagcgtagttgtaattgctttaaaaaaaaagttgaattcatctctaacttaggccattggaaagtgtttactggattcattttgtaatattttagcaaaaagagacttcaatgttgtggacaaaatcatacaattcagtcaattttatttttagcatactgttaaatatcacatcacaataaaaatcaaattggcattaaaagtatagaagatataggaagttctatacccttccactgtacttctcaaagttggttattagaccaggaaaacttaatgtaatattatttttaaaatcatcttaaaggatccaagtccatgtaactctttagaacaagaggaataggtcagatagaagaagctgtgtaatgtattaatacatccgttcatgtgctgtccacatgaatgtgttgactgtgctctccatgttcaggtatttgtaagcagtgttgacttttatcccctcttcagtaatctttaagtccccaaaacattataactttttctttttttgttgagacggagtctcactcttgtcactcaggctggagtgcagtggtgtgatctcagttcactgcaacctctgcctcccacgttcaagcgatcctcctgcctcagcctcctgagtagctgggattacaggcgtcggccaccacacctggctaatttttgtatttttagtagagacagggtttcaccatgttggccaggctggtcttgaactcctgacctcaggtgttccacccacctcagccttccaaagtgctaggattacaggcgtgagccactgcagtgggccaatttttgtatttttttaaatgcttgaccaagtgtctaaaataggcaagtagtaccttttgttctttcattgcaatttgatacagtataggctacagtatttttacagggtaaaactagttatggcagtagtatgcacagcagtgttagccatttcatatgtatgtaatatgcacgtgtgtatccaatctgcctgtgacatgcattttactctttgcagagaatgagctgcagtccagtttaatgtcagtttaataagtggtctctttttagcagagcaaaaaaatatagcgtaaatacttattttttttaaaaacttacttaaatttgtgtgtaaaatatttatttgaaggactttaatatgtaaaaataattgtcttctatgccaccctacagattttattttaatgtgaattatttttttcatttcatttttaccagtatagtaaaaaagtagaaaagcaagtatgatatttttgtaagataatttatttggggattcatgttccctgttagacaatcatgaccttttctacttgtctttttatatataagtagtagatttccacttgtttagggattaagaagatgttctagaatgtagataccttgtccagccataggaatcaaaataaaaaactaaaaaagttca

SEQ ID NO: 281343 - DNA, 2851 bp, Homo sapiens
ttttttataaacatgctgttgttattttctaacaggactgtcattccatttttattatttttcctatcagtggacctagttatttccagttttttgctataagtatttttacttgtgtttctttatggacatatgtgaagtttgtaaaatattaatatttacctaggtgtaaaattatgaggtcttcttagagtattggatccatacgctgataggtaataacaaactttccacaagatgattctatcaatttagccttccaaggagtatatgagtttctgttattccatatcttgaccaataattggcattgtgagactttatatttttgcctaaatgtaccttgttgtggttttatttatttgtttgtttttgagacagggtctcactctgtcacccaggctggagtacagtggcacaatcatgtctccagtctcaatctcctgggctcaagtgatcctcccgcctcagcccccaagtaattgggacttcaggcatgtgcttccacagccagctaagttttgtaattctttgcagagatggggttttgctgtgttgcctaggctggcctcaaattcctgggctcaagtgctccacccgcttcggcctctcaaagtgttaggattataggcatgagccatcatgtctggccttgttgtggttttagatcgtatttgccatattacaaattaggtacaaattaggttgaatattcataatatacatttttggctatttatgtttcttctcctgtagaacgcttatttatgtcttttacccatttttctattgggtggctaattaacatacagaatatatgcaggacccctaaaaattaatgggggttctgtatactgtatgttaattatctcttggttattatgaatgatgtatggttgtgggagacttactgaatcttgaatgttttatctttggcattgattaaaaaacatgccatttcttcaaaggaggcagacttttttatatcagactgggaaatacagaacacatggttcaataaagaaaagaagggagcccaggcgcagtgtctcacgcctatagtcctagcactttgagaggctgagacgagaagattgcttgagctcaggagttaaagatctgagatatggtgaagcccagtctctacaaaaaatacaaaaaattagccggacatggtggtgtgcacctgaaatcccagctacttgtggggtggaaggaagaggatggcttgaacccggggtgtggaggctgcaataagccgagatcacgccactgcactacagcctgggtgacaaagtgagaccctttctcaaaaaaaaaagaagggagataatgatgtgatggcatattttctatggccttcccaagaataccccatattcagcatgtgggcctgtctgcttggtccaaaatggctccgttcaaaatttttaagcagtgatgctgagagaagtcattttctgttttttacctaacataaagcttttctccctaggtggatgatgactttacagcccaagattacaggctccagtttcgtaaatgtacttcaaatcattttgaggatgtatatgtaggttctgaaactgaattcatagtattgcacatagaccccaacgttgattaccagttcagagtctgcgcccgaggagatggccgacaggagtggagtccttggagtgtcccccagataggtcattccacattggtgcctcatgagtggacagctggttttgaggggtacagtctgagcagtcgaagaaatatagcacttcggaacgattctgaatcatcgggtgttctctactccagagctccgacttatttctgtgggcagacattaacattcagagttgaaactgtgggacagccagacagaagagatagcataggagtgtgtgcagaaaaacaggatggatatgactctctgcagcgggatcaagctgtgtgcattagtacaaatggtgcagtttttgtcaatggaaaagaaatgacaaatcagttacccgcagttacttctgggtccactgtcacgtttgacattgaagccgtgactctaggaaccaccagtaataatgaaggtggacacttcaagcttcgagtaactataagttcaaataatagagaagtggtttttgactggttacttgatcagtcttgtggttctctttactttggatgctcatttttctatcctggatggaaagtgttagtgttttagatgtttgggtgcttggctttggttttcagggtctaacgtagctgtcctcagcccagcgtagttgtaattgctttaaaaaaaaagttgaattcatctctaacttaggccattggaaagtgtttactggattcattttgtaatattttagcaaaaagagacttcaatgttgtggacaaaatcatacaattcagtcaattttatttttagcatactgttaaatatcacatcacaataaaaatcaaattggcattaaaagtatagaagatataggaagttctatacccttccactgtacttctcaaagttggttattagaccaggaaaacttaatgtaatattatttttaaaatcatcttaaaggatccaagtccatgtaactctttagaacaagaggaataggtcagatagaagaagctgtgtaatgtattaatacatccgttcatgtgctgtccacatgaatgtgttgactgtgctctccatgttcaggtatttgtaagcagtgttgacttttatcccctcttcagtaatctttaagtccccaaaacattataactttttctttttttgttgagacggagtctcactccagcctgggtgagagagcaagaccctgcctcagaaaaaaaaaaa

SEQ ID NO: 281344 - DNA, 1655 bp, Homo sapiens
  misc_feature (7)..(7): n is a, c, g, or t
  misc_feature (10)..(10): n is a, c, g, or t
  misc_feature (14)..(14): n is a, c, g, or t
  misc_feature (739)..(739): n is a, c, g, or t
tcgtcanagnatcncgtggtcgatcactgtactattcagaaaaaaacaattgtggtgagattgctctttttaagctagtggctgttaagtatcattcatgttatatttttaaaagtatgaaatgacctttctacttcatttacagagttgaaactgtgggacagccagacagaagagatagcataggagtgtgtgcagaaaaacaggatggatatgactctctgcagcgggatcaagctgtgtgcattagtacaaatggtaagagataaataactgtcattctcttggaaatatattaattattttagtaatatgtgaatctgttccagttccatacatttatagtaggagatgagaaaatttaggtatttttctttttcttttttttttttttattatgaagtctcactccatcactcaggctggagtacagtggcatgatcgtagcccgctgcagcctgaaattcttgggcccaagccatcctcccaccccagcctcccgagtagccgggaccacaggtgcatgccactgtgactggctaattttttttatttttacttttttgtaaagataagttgttgcccaggtgagtcttgactcctggtttccagcaatcctcccaccttggtggcctcccaaagtgctaggattacaggcgtgagccaccgtgcccagccaacaccacaaaatattattaacatgtcttgctagtgaatttttttttttttttttttttgnaaagggattcccacctggtacctggtgtgatctcagttcactgcaacctctgcctcccacgttcaagcgatcctcctgcctcagcctcctgagtagctgggattacaggcgtcggccaccacacctggctaatttttgtatttttagtagagacagggtttcaccatgttggccaggctggtcttgaactcctgacctcaggtgttccacccacctcagccttccaaagtgctaggattacaggcgtgagccactgcagtgggccaatttttgtatttttttaaatgcttgaccaagtgtctaaaataggcaagtagtaccttttgttctttcattgcaatttgatacagtataggctacagtatttttacagggtaaaactagttatggcagtagtatgcacagcagtgttagccatttcatatgtatgtaatatgcacgtgtgtatccaatctgcctgtgacatgcattttactctttgcagagaatgagctgcagtccagtttaatgtcagtttaataagtggtctctttttagcagagcaaaaaaatatagcgtaaatacttattttttttaaaaacttacttaaatttgtgtgtaaaatatttatttgaaggactttaatatgtaaaaataattgtcttctatgccaccctacagattttattttaatgtgaattatttttttcatttcatttttaccagtatagtaaaaaagtagaaaagcaagtatgatatttttgtaagataatttatttggggattcatgttccctgttagacaatcatgaccttttctacttgtctttttatatataagtagtagatttccacttgtttagggattaagaagatgttctagaatgtagataccttgtccagccataggaatcaaaataaaaaactaaaaaagttca

SEQ ID NO: 281345 - DNA, 1778 bp, Homo sapiens
  misc_feature (91)..(91): n is a, c, g, or t
  misc_feature (862)..(862): n is a, c, g, or t
ggccggcaccacatggctggctgcacatcagttattcccaggtcattactcagctaacagacgaaaaccagtcatgttgccccgctttgtncatagatttttccagacagaggctgagttacagtatagcaagaactcaatcatggttgctgtactattcagaaaaaaacaattgtggtgagattgctctttttaagctagtggctgttaagtatcattcatgttatatttttaaaagtatgaaatgacctttctacttcatttacagagttgaaactgtgggacagccagacagaagagatagcataggagtgtgtgcagaaaaacaggatggatatgactctctgcagcgggatcaagctgtgtgcattagtacaaatggtaagagataaataactgtcattctcttggaaatatattaattattttagtaatatgtgaatctgttccagttccatacatttatagtaggagatgagaaaatttaggtatttttctttttcttttttttttttttattatgaagtctcactccatcactcaggctggagtacagtggcatgatcgtagcccgctgcagcctgaaattcttgggcccaagccatcctcccaccccagcctcccgagtagccgggaccacaggtgcatgccactgtgactggctaattttttttatttttacttttttgtaaagataagttgttgcccaggtgagtcttgactcctggtttccagcaatcctcccaccttggtggcctcccaaagtgctaggattacaggcgtgagccaccgtgcccagccaacaccacaaaatattattaacatgtcttgctagtgaatttttttttttttttttttttgnaaagggattcccacctggtacctggtgtgatctcagttcactgcaacctctgcctcccacgttcaagcgatcctcctgcctcagcctcctgagtagctgggattacaggcgtcggccaccacacctggctaatttttgtatttttagtagagacagggtttcaccatgttggccaggctggtcttgaactcctgacctcaggtgttccacccacctcagccttccaaagtgctaggattacaggcgtgagccactgcagtgggccaatttttgtatttttttaaatgcttgaccaagtgtctaaaataggcaagtagtaccttttgttctttcattgcaatttgatacagtataggctacagtatttttacagggtaaaactagttatggcagtagtatgcacagcagtgttagccatttcatatgtatgtaatatgcacgtgtgtatccaatctgcctgtgacatgcattttactctttgcagagaatgagctgcagtccagtttaatgtcagtttaataagtggtctctttttagcagagcaaaaaaatatagcgtaaatacttattttttttaaaaacttacttaaatttgtgtgtaaaatatttatttgaaggactttaatatgtaaaaataattgtcttctatgccaccctacagattttattttaatgtgaattatttttttcatttcatttttaccagtatagtaaaaaagtagaaaagcaagtatgatatttttgtaagataatttatttggggattcatgttccctgttagacaatcatgaccttttctacttgtctttttatatataagtagtagatttccacttgtttagggattaagaagatgttctagaatgtagataccttgtccagccataggaatcaaaataaaaaactaaaaaagttca

SEQ ID NO: 281346 - DNA, 2502 bp, Homo sapiens
  misc_feature (2445)..(2445): n is a, c, g, or t
  misc_feature (2472)..(2472): n is a, c, g, or t
ttttttataaacatgctgttgttattttctaacaggactgtcattccatttttattatttttcctatcagtggacctagttatttccagttttttgctataagtatttttacttgtgtttctttatggacatatgtgaagtttgtaaaatattaatatttacctaggtgtaaaattatgaggtcttcttagagtattggatccatacgctgataggtaataacaaactttccacaagatgattctatcaatttagccttccaaggagtatatgagtttctgttattccatatcttgaccaataattggcattgtgagactttatatttttgcctaaatgtaccttgttgtggttttatttatttgtttgtttttgagacagggtctcactctgtcacccaggctggagtacagtggcacaatcatgtctccagtctcaatctcctgggctcaagtgatcctcccgcctcagcccccaagtaattgggacttcaggcatgtgcttccacagccagctaagttttgtaattctttgcagagatggggttttgctgtgttgcctaggctggcctcaaattcctgggctcaagtgctccacccgcttcggcctctcaaagtgttaggattataggcatgagccatcatgtctggccttgttgtggttttagatcgtatttgccatattacaaattaggtacaaattaggttgaatattcataatatacatttttggctatttatgtttcttctcctgtagaacgcttatttatgtcttttacccatttttctattgggtggctaattaacatacagaatatatgcaggacccctaaaaattaatgggggttctgtatactgtatgttaattatctcttggttattatgaatgatgtatggttgtgggagacttactgaatcttgaatgttttatctttggcattgattaaaaaacatgccatttcttcaaaggaggcagacttttttatatcagactgggaaatacagaacacatggttcaataaagaaaagaagggagcccaggcgcagtgtctcacgcctatagtcctagcactttgagaggctgagacgagaagattgcttgagctcaggagttaaagatctgagatatggtgaagcccagtctctacaaaaaatacaaaaaattagccggacatggtggtgtgcacctgaaatcccagctacttgtggggtggaaggaagaggatggcttgaacccggggtgtggaggctgcaataagccgagatcacgccactgcactacagcctgggtgacaaagtgagaccctttctcaaaaaaaaaagaagggagataatgatgtgatggcatattttctatggccttcccaagaataccccatattcagcatgtgggcctgtctgcttggtccaaaatggctccgttcaaaatttttaagcagtgatgctgagagaagtcattttctgttttttacctaacataaagcttttctccctaggtggatgatgactttacagcccaagattacaggctccagtttcgtaaatgtacttcaaatcattttgaggatgtatatgtaggttctgaaactgaattcatagtattgcacatagaccccaacgttgattaccagttcagagtctgcgcccgaggagatggccgacaggagtggagtccttggagtgtcccccagataggtcattccacattggtgcctcatgagtggacagctggttttgaggggtacagtctgagcagtcgaagaaatatagcacttcggaacgattctgaatcatcgggtgttctctactccagagctccgacttatttctgtgggcagacattaacattcagagttgaaactgtgggacagccagacagaagagatagcataggagtgtgtgcagaaaaacaggatggatatgactctctgcagcgggatcaagctgtgtgcattagtacaaatggtaagagataaataactgtcattctcttggaaatatattaattattttagtaatatgtgaatctgttccagttccatacatttatagtaggagatgagaaaatttaggtatttttctttttcttttttttttttttattatgaagtctcactccatcactcaggctggagtacagtggcatgatcgtagcccgctgcagcctgaaattcttgggcccaagccatcctcccaccccagcctcccgagtagccgggaccacaggtgcatgccactgtgactggctaattttttttatttttacttttttgtaaagataagttgttgcccaggtgagtcttgactcctggtttccagcaatcctcccaccttggtggcctcccaaagtgctaggattacaggcgtgagccaccgtgcccagccaacaccacaaaatattattaacatgtcttgctagtgaatttttttttttttttttttttgnaaagggattcccacctggtacccgggnataacccgggctcatggaaaccccggcccc

SEQ ID NO: 281347 - DNA, 2747 bp, Homo sapiens
ttttttataaacatgctgttgttattttctaacaggactgtcattccatttttattatttttcctatcagtggacctagttatttccagttttttgctataagtatttttacttgtgtttctttatggacatatgtgaagtttgtaaaatattaatatttacctaggtgtaaaattatgaggtcttcttagagtattggatccatacgctgataggtaataacaaactttccacaagatgattctatcaatttagccttccaaggagtatatgagtttctgttattccatatcttgaccaataattggcattgtgagactttatatttttgcctaaatgtaccttgttgtggttttatttatttgtttgtttttgagacagggtctcactctgtcacccaggctggagtacagtggcacaatcatgtctccagtctcaatctcctgggctcaagtgatcctcccgcctcagcccccaagtaattgggacttcaggcatgtgcttccacagccagctaagttttgtaattctttgcagagatggggttttgctgtgttgcctaggctggcctcaaattcctgggctcaagtgctccacccgcttcggcctctcaaagtgttaggattataggcatgagccatcatgtctggccttgttgtggttttagatcgtatttgccatattacaaattaggtacaaattaggttgaatattcataatatacatttttggctatttatgtttcttctcctgtagaacgcttatttatgtcttttacccatttttctattgggtggctaattaacatacagaatatatgcaggacccctaaaaattaatgggggttctgtatactgtatgttaattatctcttggttattatgaatgatgtatggttgtgggagacttactgaatcttgaatgttttatctttggcattgattaaaaaacatgccatttcttcaaaggaggcagacttttttatatcagactgggaaatacagaacacatggttcaataaagaaaagaagggagcccaggcgcagtgtctcacgcctatagtcctagcactttgagaggctgagacgagaagattgcttgagctcaggagttaaagatctgagatatggtgaagcccagtctctacaaaaaatacaaaaaattagccggacatggtggtgtgcacctgaaatcccagctacttgtggggtggaaggaagaggatggcttgaacccggggtgtggaggctgcaataagccgagatcacgccactgcactacagcctgggtgacaaagtgagaccctttctcaaaaaaaaaagaagggagataatgatgtgatggcatattttctatggccttcccaagaataccccatattcagcatgtgggcctgtctgcttggtccaaaatggctccgttcaaaatttttaagcagtgatgctgagagaagtcattttctgttttttacctaacataaagcttttctccctaggtggatgatgactttacagcccaagattacaggctccagtttcgtaaatgtacttcaaatcattttgaggatgtatatgtaggttctgaaactgaattcatagtattgcacatagaccccaacgttgattaccagttcagagtctgcgcccgaggagatggccgacaggagtggagtccttggagtgtcccccagataggtcattccacattggtgcctcatggtatgctgctaaccttttctctcctgaagcctaactatatattagaatacctgtattctgtgctaagggcagcacactgacaaccagctattctaagcatagatcctgaattgataagaacaacatgcaccatgtcttttactcagattacctcatgtgatttttgttttcatcagttcttcagagtccaaaaaaaatgctggacaagatttttagcctcattgaaaaccaaagattgaaaatattatgtagggcactgatattcctttttattcttttttttatatttgaatgttatttagttagtttttttgagacaaggtctcactctgtcgcccaggctggtgtgtggtggtgcaatcatgcagcctgacctctagatccttctgcctcagtctcccaagtagctgggaccacctgcatgcacaccacacctggctaattttttatttttttctagagactgggtcttgctatgttgcccaggctggtctcaaattcctgggctcaagcaatcctcttgccttgacctcccaaagtgctgggattacaggcgtgagccactgtgcccagctgatgctgattttccaaactctcaagaaatacctggagagagacattttcttaaaagtctgatgatttgagggccgggcacggtggctcacacttgtaatcccagcactttgggaggctgaggcgggcggatcacgaggtgcaggagatcaagaccatcctggctaacacggtgaaaccccatctctactataaataaaaaaattagccggacatggtggtgggtgtctgtggtcccagctactcgggaggctgaggcaggagaatggcgtgaacccgggaggcagacttttttatatcagactgggaaatacagaacacatggttcaataaagaaaagaagggagccaggtgtggtggctcacgcctctaatcccagcactttgggaagccgaggcaggcggatcacctgaggtcaggagttcgagaccagcctgaccaacatggtgaaacccc

SEQ ID NO: 281348 - DNA, 2452 bp, Homo sapiens
ttttttataaacatgctgttgttattttctaacaggactgtcattccatttttattatttttcctatcagtggacctagttatttccagttttttgctataagtatttttacttgtgtttctttatggacatatgtgaagtttgtaaaatattaatatttacctaggtgtaaaattatgaggtcttcttagagtattggatccatacgctgataggtaataacaaactttccacaagatgattctatcaatttagccttccaaggagtatatgagtttctgttattccatatcttgaccaataattggcattgtgagactttatatttttgcctaaatgtaccttgttgtggttttatttatttgtttgtttttgagacagggtctcactctgtcacccaggctggagtacagtggcacaatcatgtctccagtctcaatctcctgggctcaagtgatcctcccgcctcagcccccaagtaattgggacttcaggcatgtgcttccacagccagctaagttttgtaattctttgcagagatggggttttgctgtgttgcctaggctggcctcaaattcctgggctcaagtgctccacccgcttcggcctctcaaagtgttaggattataggcatgagccatcatgtctggccttgttgtggttttagatcgtatttgccatattacaaattaggtacaaattaggttgaatattcataatatacatttttggctatttatgtttcttctcctgtagaacgcttatttatgtcttttacccatttttctattgggtggctaattaacatacagaatatatgcaggacccctaaaaattaatgggggttctgtatactgtatgttaattatctcttggttattatgaatgatgtatggttgtgggagacttactgaatcttgaatgttttatctttggcattgattaaaaaacatgccatttcttcaaaggaggcagacttttttatatcagactgggaaatacagaacacatggttcaataaagaaaagaagggagcccaggcgcagtgtctcacgcctatagtcctagcactttgagaggctgagacgagaagattgcttgagctcaggagttaaagatctgagatatggtgaagcccagtctctacaaaaaatacaaaaaattagccggacatggtggtgtgcacctgaaatcccagctacttgtggggtggaaggaagaggatggcttgaacccggggtgtggaggctgcaataagccgagatcacgccactgcactacagcctgggtgacaaagtgagaccctttctcaaaaaaaaaagaagggagataatgatgtgatggcatattttctatggccttcccaagaataccccatattcagcatgtgggcctgtctgcttggtccaaaatggctccgttcaaaatttttaagcagtgatgctgagagaagtcattttctgttttttacctaacataaagcttttctccctaggtggatgatgactttacagcccaagattacaggctccagtttcgtaaatgtacttcaaatcattttgaggatgtatatgtaggttctgaaactgaattcatagtattgcacatagaccccaacgttgattaccagttcagagtctgcgcccgaggagatggccgacaggagtggagtccttggagtgtcccccagataggtcattccacattggtgcctcatgagtggacagctggttttgaggggtacagtctgagcagtcgaagaaatatagcacttcggaacgattctgaatcatcgggtgttctctactccagagctccgacttatttctgtgggcagacattaacattcaggcaagtagatattaaaacatctcacctgcctcaggaagcagagtgaagtgcatagagcatacataagctttgaattcaaaacatcctgagtttattccgtcatttataggcagtgttactgtgggaaggcttctttatttcctgtagctgtagttttctcatctgtattcacagggttattacgtagattaactgggaaatgtatataaaatgcttgttatttaatatgtttatatctcttttcctcttggtaagtagaggtaagtagagtatctctcaaaagtcaatcttaggctgggcatagtggttcacacctgtaaccccagcactttggtaggccgaggcaggtggatcacctgaggtcgggagttcgagaccaacctgagcaacatggagaaaccccatctctactaaaaatacaaaatcagccgggcaggtggcacatatgcctgtaatcccagctacttgggaggctgaggcaggagaattgcttgaacccaagaggcagaggttgcagtgagctgagatcatgccactgcactccagcctgggcaacaagagcgaaactctgtctcaaacacacacacaaaattaaaaagta

SEQ ID NO: 281349 - DNA, 2106 bp, Homo sapiens
ttttttataaacatgctgttgttattttctaacaggactgtcattccatttttattatttttcctatcagtggacctagttatttccagttttttgctataagtatttttacttgtgtttctttatggacatatgtgaagtttgtaaaatattaatatttacctaggtgtaaaattatgaggtcttcttagagtattggatccatacgctgataggtaataacaaactttccacaagatgattctatcaatttagccttccaaggagtatatgagtttctgttattccatatcttgaccaataattggcattgtgagactttatatttttgcctaaatgtaccttgttgtggttttatttatttgtttgtttttgagacagggtctcactctgtcacccaggctggagtacagtggcacaatcatgtctccagtctcaatctcctgggctcaagtgatcctcccgcctcagcccccaagtaattgggacttcaggcatgtgcttccacagccagctaagttttgtaattctttgcagagatggggttttgctgtgttgcctaggctggcctcaaattcctgggctcaagtgctccacccgcttcggcctctcaaagtgttaggattataggcatgagccatcatgtctggccttgttgtggttttagatcgtatttgccatattacaaattaggtacaaattaggttgaatattcataatatacatttttggctatttatgtttcttctcctgtagaacgcttatttatgtcttttacccatttttctattgggtggctaattaacatacagaatatatgcaggacccctaaaaattaatgggggttctgtatactgtatgttaattatctcttggttattatgaatgatgtatggttgtgggagacttactgaatcttgaatgttttatctttggcattgattaaaaaacatgccatttcttcaaaggaggcagacttttttatatcagactgggaaatacagaacacatggttcaataaagaaaagaagggagcccaggcgcagtgtctcacgcctatagtcctagcactttgagaggctgagacgagaagattgcttgagctcaggagttaaagatctgagatatggtgaagcccagtctctacaaaaaatacaaaaaattagccggacatggtggtgtgcacctgaaatcccagctacttgtggggtggaaggaagaggatggcttgaacccggggtgtggaggctgcaataagccgagatcacgccactgcactacagcctgggtgacaaagtgagaccctttctcaaaaaaaaaagaagggagataatgatgtgatggcatattttctatggccttcccaagaataccccatattcagcatgtgggcctgtctgcttggtccaaaatggctccgttcaaaatttttaagcagtgatgctgagagaagtcattttctgttttttacctaacataaagcttttctccctaggtggatgatgactttacagcccaagattacaggctccagtttcgtaaatgtacttcaaatcattttgaggatgtatatgtaggttctgaaactgaattcatagtattgcacatagaccccaacgttgattaccagttcagagtctgcgcccgaggagatggccgacaggagtggagtccttggagtgtcccccagataggtcattccacattggtgcctcatgagtggacagctggttttgaggggtacagtctgagcagtcgaagaaatatagcacttcggaacgattctgaatcatcgggtgttctctactccagagctccgacttatttctgtgggcagacattaacattcagagttgaaactgtgagacagccagggagtaaacactgttggctctgtgggctgtatggtctctgccataaatagtacagagatgtggctgcgtctagtacaactttttgacacagaaatctgaatgacatatattgttctgtgtcaagaaacttagattttttttttaactatttaaaacgtgtaacctattcttacgctccagaccattgtagacagcagttgcgtatcaccaggttactctgaacagctgcacg

SEQ ID NO: 281350 - DNA, 2277 bp, Homo sapiens
ttttttataaacatgctgttgttattttctaacaggactgtcattccatttttattatttttcctatcagtggacctagttatttccagttttttgctataagtatttttacttgtgtttctttatggacatatgtgaagtttgtaaaatattaatatttacctaggtgtaaaattatgaggtcttcttagagtattggatccatacgctgataggtaataacaaactttccacaagatgattctatcaatttagccttccaaggagtatatgagtttctgttattccatatcttgaccaataattggcattgtgagactttatatttttgcctaaatgtaccttgttgtggttttatttatttgtttgtttttgagacagggtctcactctgtcacccaggctggagtacagtggcacaatcatgtctccagtctcaatctcctgggctcaagtgatcctcccgcctcagcccccaagtaattgggacttcaggcatgtgcttccacagccagctaagttttgtaattctttgcagagatggggttttgctgtgttgcctaggctggcctcaaattcctgggctcaagtgctccacccgcttcggcctctcaaagtgttaggattataggcatgagccatcatgtctggccttgttgtggttttagatcgtatttgccatattacaaattaggtacaaattaggttgaatattcataatatacatttttggctatttatgtttcttctcctgtagaacgcttatttatgtcttttacccatttttctattgggtggctaattaacatacagaatatatgcaggacccctaaaaattaatgggggttctgtatactgtatgttaattatctcttggttattatgaatgatgtatggttgtgggagacttactgaatcttgaatgttttatctttggcattgattaaaaaacatgccatttcttcaaaggaggcagacttttttatatcagactgggaaatacagaacacatggttcaataaagaaaagaagggagcccaggcgcagtgtctcacgcctatagtcctagcactttgagaggctgagacgagaagattgcttgagctcaggagttaaagatctgagatatggtgaagcccagtctctacaaaaaatacaaaaaattagccggacatggtggtgtgcacctgaaatcccagctacttgtggggtggaaggaagaggatggcttgaacccggggtgtggaggctgcaataagccgagatcacgccactgcactacagcctgggtgacaaagtgagaccctttctcaaaaaaaaaagaagggagataatgatgtgatggcatattttctatggccttcccaagaataccccatattcagcatgtgggcctgtctgcttggtccaaaatggctccgttcaaaatttttaagcagtgatgctgagagaagtcattttctgttttttacctaacataaagcttttctccctaggtggatgatgactttacagcccaagattacaggctccagtttcgtaaatgtacttcaaatcattttgaggatgtatatgtaggttctgaaactgaattcatagtattgcacatagaccccaacgttgattaccagttcagagtctgcgcccgaggagatggccgacaggagtggagtccttggagtgtcccccagataggtcattccacattggtgcctcatgagtggacagctggttttgaggggtacagtctgagcagtcgaagaaatatagcacttcggaacgattctgaatcatcgggtgttctctactccagagctccgacttatttctgtgggcagacattaacattcagagttgaaactgtgggacagccagacagaagagatagcataggagtgtgtgcagaaaaacaggatggatatgactctctgcagcgggatcaagctgtgtgcattagtacaaatggtgcagtttttgtcaatggaaaagaaatgacaaatcagttacccgcagttacttctgggtccactgtcacgtttgacattgaagccgtgactctaggaaccaccagtaataatgaaggtggacacttcaagcttcgaagaatgagggtcttgctgtgttgtccagactggtctcaaactcctggcctcaagcagtcctccccagccttggccttccaaagtgttaggggttacagagtctcactgtcaccaggctggactgcagtggcacgatctcgactcactgtaaccccgcctcctgatttccaacttgc

SEQ ID NO: 281351 - DNA, 483 bp, Homo sapiens
aatcatgaccttttctacttgtctttttatatataagtagtagatttccacttgtttagggattaagaagatgttctagaatgtagataccttgtccagccataggaatcaaaataaaaaactaaaaaagttcagtgtgtgtacttttttcttctgtgagatttggtgaatccagttttaacctacttttcatttgaagggaaaacaggcttcttgtggctccaggcattttagtaagatatcactgtgacttgtgaaagggtatgtgtaccttcttgtactttcttttaaaaacttttttaaaaatattttttgtagagaatgagggtcttgctgtgttgtccagactggtctcaaactcctggcctcaagcagtcctccccagccttggccttccaaagtgctgggattataggcatgagtgaccacacccagctggttacttgtactttcctatattctgtgtctgatactgagcatctt

SEQ ID NO: 281352 - DNA, 2920 bp, Homo sapiens
ttccgcctgcgcgaggccgcgccgggccgcttggaggcgcccggtgcagtcgggaacccgcgctaggtttcgccggccgcgcggccagatgaggggggcgatggagctggagcctgagctgctgttgcaggaggcccgcgagaacgtggaggcagcgcagagctaccggcgggagctgggtcaccggcttgaggggctgcgtgaggcgcggaggcagatcaaagaaagtgcatcacagacaagggatgttctcaaacagcattttaatgatttaaagggaacccttggaaagctcctggatgagcgattggtgacccttttgcaagaggtggacaccattgaacaggagaccattaaaccactagatgactgccagaagctcatagaacacggagtcaacactgcagaggacttagtccgagaaggtgaaatcgccatgcttggtggtgtgggagaagagaatgagaaactgtggagctttaccaaaaaggcctcgcacattcagttggacagcttaccagaagtacctttactggttgatgtgccttgtttatctgctcagttggatgactcaattcttaacatagtgaaagaccacatttttaagcatggaacagtagcatctcgcccaccagtacagatagaagaactaatagagaaacctggaggcatcattgtacgatggtgtaaggtggatgatgactttacagcccaagattacaggctccagtttcgtaaatgtacttcaaatcattttgaggatgtatatgtaggttctgaaactgaattcatagtattgcacatagaccccaacgttgattaccagttcagagtctgcgcccgaggagatggccgacaggagtggagtccttggagtgtcccccagataggtcattccacattggtgcctcatgagtggacagctggttttgaggggtacagtctgagcagtcgaagaaatatagcacttcggaacgattctgaatcatcgggtgttctctactccagagctccgacttatttctgtgggcagacattaacattcagagttgaaactgtgggacagccagacagaagagatagcataggagtgtgtgcagaaaaacaggatggatatgactctctgcagcgggatcaagctgtgtgcattagtacaaatggtgcagtttttgtcaatggaaaagaaatgacaaatcagttacccgcagttacttctgggtccactgtcacgtttgacattgaagccgtgactctaggaaccaccagtaataatgaaggtggacacttcaagcttcgagtaactataagttcaaataatagagaagtggtttttgactggttacttgatcagtcttgtggttctctttactttggatgctcatttttctatcctggatggaaagtgttagtgttttagatgtttgggtgcttggctttggttttcagggtctaacgtagctgtcctcagcccagcgtagttgtaattgctttaaaaaaaaagttgaattcatctctaacttaggccattggaaagtgtttactggattcattttgtaatattttagcaaaaagagacttcaatgttgtggacaaaatcatacaattcagtcaattttatttttagcatactgttaaatatcacatcacaataaaaatcaaattggcattaaaagtatagaagatataggaagttctatacccttccactgtacttctcaaagttggttattagaccaggaaaacttaatgtaatattatttttaaaatcatcttaaaggatccaagtccatgtaactctttagaacaagaggaataggtcagatagaagaagctgtgtaatgtattaatacatccgttcatgtgctgtccacatgaatgtgttgactgtgctctccatgttcaggtatttgtaagcagtgttgacttttatcccctcttcagtaatctttaagtccccaaaacattataactttttctttttttgttgagacggagtctcactcttgtcactcaggctggagtgcagtggtgtgatctcagttcactgcaacctctgcctcccacgttcaagcgatcctcctgcctcagcctcctgagtagctgggattacaggcgtcggccaccacacctggctaatttttgtatttttagtagagacagggtttcaccatgttggccaggctggtcttgaactcctgacctcaggtgttccacccacctcagccttccaaagtgctaggattacaggcgtgagccactgcagtgggccaatttttgtatttttttaaatgcttgaccaagtgtctaaaataggcaagtagtaccttttgttctttcattgcaatttgatacagtataggctacagtatttttacagggtaaaactagttatggcagtagtatgcacagcagtgttagccatttcatatgtatgtaatatgcacgtgtgtatccaatctgcctgtgacatgcattttactctttgcagagaatgagctgcagtccagtttaatgtcagtttaataagtggtctctttttagcagagcaaaaaaatatagcgtaaatacttattttttttaaaaacttacttaaatttgtgtgtaaaatatttatttgaaggactttaatatgtaaaaataattgtcttctatgccaccctacagattttattttaatgtgaattatttttttcatttcatttttaccagtatagtaaaaaagtagaaaagcaagtatgatatttttgtaagataatttatttggggattcatgttccctgttagacaatcatgaccttttctacttgtctttttatatataagtagtagatttccacttgtttagggattaagaagatgttctagaatgtagataccttgtccagccataggaatcaaaataaaaaactaaaaaagttca

SEQ ID NO: 281353 - DNA, 814 bp, Homo sapiens
ttccgcctgcgcgaggccgcgccgggccgcttggaggcgcccggtgcagtcgggaacccgcgctaggtttcgccggccgcgcggccagatgaggggggcgatggagctggagcctgagctgctgttgcaggaggcccgcgagaacgtggaggcagcgcagagctaccggcgggagctgggtcaccggcttgaggggctgcgtgaggcgcggaggcagatcaaagaaagtgcatcacagacaagggatgttctcaaacagcattttaatgatttaaagggaacccttggaaagctcctggatgagcgattggtgacccttttgcaagaggtggacaccattgaacaggagaccattaaaccactagatgactgccagaagctcatagaacacggagtcaacactgcagaggacttagtccgagaaggtgaaatcgccatgcttggtggtgtgggagaagagaatgagaaactgtggagctttaccaaaaaggcctcgcacattcagttggacagcttaccagaagtacctttactggttgatgtgccttgtttatctgctcagttggatgactcaattcttaacatagtgaaagaccacatttttaagcatggaacagtagcatctcgcccaccagtacagatagaagaactaatagagaaacctggaggcatcattgtacgatggtgtaaggtatgtaattcagaattctagaaatgacttccacattatgggtttgcgatttggaggcctttcagattttttcgttgactacttttaaatacattcttttcttctcaaacaaaaatctctttt

SEQ ID NO: 281354 - DNA, 7389 bp, Homo sapiens
  misc_feature (1754)..(1754): n is a, c, g, or t
  misc_feature (1811)..(1811): n is a, c, g, or t
gctgcgcagcgctggctgctggctggcctcgcggagacgccgaacggacgcggccggcgccggcttgtgggctcgccgcctgcagccatgaccctcgcagcctgtccctcggcctcggcccgggacgtctaaaatcccacacagtcgcgcgcagctgctggagagccggccgctgccccctcgtcgccgcatcacactcccgtcccgggagctgggagcagcgcgggcagccggcgcccccgtgcaaactgggggtgtctgccagagcagccccagccgctgccgctgctacccccgatgctggccatggcctggcggggcgcagggccgagcgtcccgggggcgcccgggggcgtcggtctcagtctggggttgctcctgcagttgctgctgctcctggggccggcgcggggcttcggggacgaggaagagcggcgctgcgaccccatccgcatctccatgtgccagaacctcggctacaacgtgaccaagatgcccaacctggttgggcacgagctgcagacggacgccgagctgcagctgacaactttcacaccgctcatccagtacggctgctccagccagctgcttttccagttcttcctttgttctgtttatgtgccaatgtgcacagagaagatcaacatccccattggcccatgcggcggcatgtgtctttcagtcaagagacgctgtgaacccgtcctgaaggaatttggatttgcctggccagagagtctgaactgcagcaaattcccaccacagaacgaccacaaccacatgtgcatggaagggccaggtgatgaagaggtgcccttacctcacaaaacccccatccagcctggggaagagtgtcactctgtgggaaccaattctgatcagtacatctgggtgaaaaggagcctgaactgtgtgctcaagtgtggctatgatgctggcttatacagccgctcagccaaggagttcactgatatctggatggctgtgtgggccagcctgtgtttcatctccactgccttcacagtactgaccttcctgatcgattcttctaggttttcctaccctgagcgccccatcatatttctcagtatgtgctataatatttatagcattgcttatattgtcaggctgactgtaggccgggaaaggatatcctgtgattttgaagaggcagcagaacctgttctcatccaagaaggacttaagaacacaggatgtgcaataattttcttgctgatgtacttttttggaatggccagctccatttggtgggttattctgacactcacttggtttttggcagcaggactcaaatggggtcatgaagccattgaaatgcacagctcttatttccacattgcagcctgggccatccccgcagtgaaaaccattgtcatcttgattatgagactggtggatgcagatgaactgactggcttgtgctatgttggaaaccaaaatctcgatgccctcaccgggttcgtggtggctcccctctttacttatttggtcattggaactttgttcattgctgcaggtttggtggccttgttcaaaattcggtcaaatcttcaaaaggatgggacaaagacagacaagttagaaagactgatggtcaagattggggtgttctcagtactgtacacagttcctgcaacgtgtgtgattgcctgttatttttatgaaatctccaactgggcactttttcggtattctgcagatgattccaacatggctgttgaaatgttgaaaanttttatgtctttgttggtgggcatcacttcaggcatgtggatttggtctgccaaaantcttcacacgtggcagaagtgttccaacagattggtgaattctggaaaggtaaagagagagaagagaggaaatggttgggtgaagcctggaaaaggcagtgagactgtggtataaggctagtcagcctccatgctttcttcattttgaaggggggaatgccagcattttggaggaaattctactaaaagttttatgcagtgaatctcagtttgaacaaactagcaacaattaagtgacccccgtcaacccactgcctcccaccccgaccccagcatcaaaaaaccaatgattttgctgcagactttggaatgatccaaaatggaaaagccagttagaggctttcaaagctgtgaaaaatcaaaacgttgatcactttagcaggttgcagcttggagcgtggaggtcctgcctagattccaggaagtccagggcgatactgttttcccctgcagggtgggatttgagctgtgagttggtaactagcagggagaaatattaacttttttaaccctttaccattttaaatactaactgggtctttcagatagcaaagcaatctataaacactggaaacgctgggttcagaaaagtgttacaagagttttatagtttggctgatgtaacataaacatcttctgtggtgcgctgtctgctgtttagaactttgtggactgcactcccaagaagtggtgttagaatctttcagtgcctttgtcataaaacagttatttgaacaaacaaaagtactgtactcacacacataaggtatccagtggatttttcttctctgtcttcctctcttaaatttcaacatctctcttcttggctgctgctgttttcttcattttatgttaatgactcaaaaaaggtatttttatagaatttttgtactgcagcatgcttaaagaggggaaaaggaagggtgattcactttctgacaatcacttaattcagaggaaaatgagatttactaagttgacttacctgacggaccccagagacctattgcattgagcagtggggacttaatatattttacttgtgtgattgcatctatgcagacgccagtctggaagagctgaaatgttaagtttcttggcaactttgcattcacacagattagctgtgtaatttttgtgtgtcaattacaattaaaagcacattgttggaccatgacatagtatactcaactgactttaaaactatggtcaacttcaacttgcattctcagaatgatagtgcctttaaaaatttttttattttttaaagcataagaatgttatcagaatctggtctacttaggacaatggagactttttcagttttataaagggaactgaggacagctaatccaactacttggtgcgtaattgtttcctagtaattggcaaaggctccttgtaagatttcactggaggcagtgtggcctggagtatttatatggtgcttaatgaatctccagaatgccagccagaagcctgattggttagtagggaataaagtgtagaccatatgaaatgaactgcaaactctaatagcccaggtcttaattgcctttagcagaggtatccaaagcttttaaaatttatgcatacgttcttcacaagggggtacccccagcagcctctcgaaaattgcacttctcttaaaactgtaactggcctttctcttaccttgccttaggccttctaatcatgagatcttggggacaaattgactatgtcacaggttgctctccttgtaactcatacctgtctgcttcagcaactgctttgcaatgacatttatttattaattcatgccttaaaaaaataggaagggaagcttttttttttctttttttttttttcaatcacactttgtggaaaaacatttccagggactcaaaattccaaaaaggtggtcaaattctggaagtaagcatttcctcttttttaaaaatttggtttgagccttatgcccatagtttgacatttccctttcttctttcctttttgtttttgtgtggttcttgagctctctgacatcaagatgcatgtaaagtcgattgtatgttttggaaggcaaagtcttggcttttgagactgaagttaagtgggcacaggtggcccctgctgctgtgcccagtctgagtaccttggctagactctaggtcaggctccaggagcatgagaattgatccccagaagaaccattttaactccatctgatactccattgcctatgaaatgtaaaatgtgaactccctgtgctgcttgtagacagttcccataactgtccacggccctggagcacgcacccaggggcagagcctgcccttactcacgctctgctctggtgtcttgggagttgtgcagggactctggcccaggcaggggaaggaagaccaggcggtaggggactggtcttgctgttagagtatagaggtttgtaatgcagttttcttcataatgtgtcagtgattgtgtgaccaaggcagcatctagcagaaagccaggcatggagtaggtgatcgatacttgtcaatgactaaataataacaataaaagagcacttgggtgaatctgggcacctgatttctgagttttgagttctggagctagtgttttgacaatgctttgggttttgacatgccttttccacaaatctcttgccttttcagggcaaagtgtatttgatcagaagtggccatttggattagtagccttagcaatgctacagggttataggcctctcctttcacattccagacaatggagagtgtttatggtttcaggaaaagaactttgtggctgaggggtcagttaccagtgaccttcaatcaactccatcacttcttaaatcggtatttgttaaaaaaatcagttattttatttattgagtgccgactgtagtaaagccctgaaatagataatctctgttcttctaactgatctaggatggggacgcacccaggtctgctgaactttactgttcctctgggaaaggagcagggacctctggaattcccatctgtttcactgtctccattccataaatctcttcctgtgtgagccaccacacccagcctgggtctctctacttttaacacatctctcatccctttcccaggattccttccaagtcagttacaggtggttttaacagaaagcatcagctctgcttcgtgacagtctctggagaaatcccttaggaagactatgagagtaggccacaaggacatgggcccacacatctgctttggctttgccggcaattcagggcttggggtattccatgtgacttgtataggtatatttgaggacagcatcttgctagagaaaaggtgagggttgtttttctttctctgaaacctacagtaaatgggtatgattgtagcttcctcagaaatcccttggcctccagagattaaacatggtgcaatggcacctctgtccaacctcctttctggtagattcctttctcctgcttcatataggccaaacctcagggcaagggaacatgggggtagagtggtgctggccagaaccatctgcttgagctacttggttgattcatatcctctttcctttatggagacccatttcctgatctctgagactgttgctgaactggcaacttacttgggcctgaaactggagaaggggtgacatttttttaatttcagagatgctttctgattttcctctcccaggtcactgtctcacctgcactctccaaactcaggttccgggaagcttgtgtgtctagatactgaattgagattctgttcagcaccttttagctctatactctctggctcccctcatcctcatggtcactgaattaaatgcttattgtattgagaaccaagatgggacctgaggacacaaagatgagctcaacagtctcagccctagaggaatagactcagggatttcaccaggtcggtgcagtatttgatttctggtgaggtgaccacagctgcagttagggaagggagccattgagcacagactttggaaggaaccttttttttgttgtttgtttgtttgtttgtttgtttgtttgtttgagacagggtcttgctctgtcacccaggctggggcgcaatggcacgatcttggctcactgcaacctctgcctcctgggttcaagtgattctcctgccacagcctcctgaggagctgggactacaggtgcgtgctaccacgcccagctacttctgtatttttagtagagacggggtttcactgtgttggccaggctggtctcgaactcctgacctcatgatctgcccgcctcagcctcccaaagtgctgggattacaagtgtgagccaccacacctggcctggaaggaacctcttaaaatcagtttacgtcttgtattttgttctgtgatggaggacactggagagagttgctattccagtcaatcatgtcgagtcactggactctgaaaatcctattggttcctttattttatttgagtttagagttcccttctgggtttgtattatgtctggcaaatgacctgggttatcacttttcctccagggttagatcatagatcttggaaactccttagagagcattttgctcctaccaaggatcagatactggagccccacataatagatttcatttcactctagcctacatagagctttctgttgctgtctcttgccatgcacttgtgcggtgattacacacttgacagtaccaggagacaaatgacttacagatcccccgacatgcctcttccccttggcaagctcagttgccctgatagtagcatgtttctgtttctgatgtaccttttttctcttcttctttgcatcagccaattcccagaatttccccaggcaatttgtagaggacctttttggggtcctatatgagccatgtcctcaaagcttttaaacctccttgctctcctacaatattcagtacatgaccactgtcatcctagaaggcttctgaaaagaggggcaagagccactctgcgccacaaaggttgggtccatcttctctccgaggttgtgaaagttttcaaattgtactaataggctggggccctgacttggctgtgggctttgggaggggtaagctgctttctagatctctcccagtgaggcatggaggtgtttctgaattttgtctacctcacagggatgttgtgaggcttgaaaaggtcaaaaaatgatggccccttgagctctttgtaagaaaggtagatgaaatatcggatgtaatctgaaaaaaagataaaatgtgacttcccctgctctgtgcagcagtcgggctggatgctctgtggcctttcttgggtcctcatgccaccccacagctccaggaaccttgaagccaatctgggggactttcagatgtttgacaaagaggtaccaggcaaacttcctgctacacatgccctgaatgaattgctaaatttcaaaggaaatggaccctgcttttaaggatgtacaaaagtatgtctgcatcgatgtctgtactgtaaatttctaatttatcactgtacaaagaaaaccccttgctatttaattttgtattaaaggaaaataaagttttgtttgtta

SEQ ID NO: 281355 - DNA, 9713 bp, Homo sapiens
  misc_feature (4078)..(4078): n is a, c, g, or t
  misc_feature (4135)..(4135): n is a, c, g, or t
gctgcgcagcgctggctgctggctggcctcgcggagacgccgaacggacgcggccggcgccggcttgtgggctcgccgcctgcagccatgaccctcgcagcctgtccctcggcctcggcccgggacgtctaaaatcccacacagtcgcgcgcagctgctggagagccggccgctgccccctcgtcgccgcatcacactcccgtcccgggagctgggagcagcgcgggcagccggcgcccccgtgcaaactgggggtgtctgccagagcagccccagccgctgccgctgctacccccgatgctggccatggcctggcggggcgcagggccgagcgtcccgggggcgcccgggggcgtcggtctcagtctggggttgctcctgcagttgctgctgctcctggggccggcgcggggcttcggggacgaggaagagcggcgctgcgaccccatccgcatctccatgtgccagaacctcggctacaacgtgaccaagatgcccaacctggttgggcacgagctgcagacggacgccgagctgcagctgacaactttcacaccgctcatccagtacggctgctccagccagctgcaggtgggcgcccccacccccacccctggcgggaccccttggggagggacgctccaaactaactttgcagagcccatgccaagttgatcatcctagcccgaaggagacagctctcctggaaaagtgatttccatccccacccccactttctcagggactggaagccaaaacgttgtgtaagtcatctggcctgggaaagaacccactcttacaccccgcccttccgtttttctctcttgcccacccatgtctggcccagacccctaaccccagtggagctgagggttatctctgccaaggattctggccgccactgctcggtgggcgagtgggagggagccagctgcagctaagacttggagggagtgataaggagaccatccttcaccgaacttccttctccccactatttttggggtgttattaaatgaaacactactgcacctttttctgctgaatagccccttctcacgacgtcccgcagcgttttagaggtcatgcatgaaggagtggttgggttggcttgagttctttcttatcctcacagttgaaggcacgtttaatgcttggagggtgagaagaagctgcaggaaggtggttggtatattggaagaaatttttttgcagtcattaaaaaatgtaaagcatatctaatgatagagaaaatgtttattccacagtaataagaatttgcatatacagggtgattataatcctgcaaaataaaaaatttattgggataataaaagactgacaggaaaatttttaaagtgttaacattggttatgtttgggttggtgaggctgggtgatttttagaaatttagaaaagagagaagttgtgggaaaaagtagacgttagttgtccaggcttcagaaatctggtttctggccgggcgcagtggctcacgcctgtaatcccagcactttgggaggccgaggcaggtggctcacgaggttaggagttcgagaccagcctgaccaacatggcgaaatcctgtctctactaaaagtacaaaaattagccgggcgtggtggcgtgcgcctgtaatcccagctactcaggaggctgaggcaggagaatcgcttgaacccaggaggcagaggttgcagtgagcggggattgcaccattgcactctagcctgggccacaggagcgaaactccgtatcaaaaaaaaaaagaaaagaaaagaaatctgtggttctggctgtaacttctgagagataataaacagacatacagcttacttactaggtgcatgtttttacataggtcattttaaaacttggtttgtggttttggaaagatggtggggattagacctgttgctgctaaaatatccctttggaagtttcagaactttagaactaggttataaaagcttaagaaatgatcctccagctctcagtttggaaacagcacatatcctgacatcagtggcaatttgttggagaaacagcttttgcagggatatatatttttaattacatgtatcctggggaaagcggccaagctgttttgaaggacaagactggatccctttacatgctggaaaatagttacttgtaactctagacttcatagacaacatctgtaaggagccaagcagactgtttatcaatgctggaggaattgaggacagcaactggactctcccctgctggtactgcagtttcagcgacttaacatttacattttcctattgtgcttcattattattcattgaggaaacctggccaaacaaatccctagtgaccagagacctcaatctgcatcccatccttgagtctaacagtgtctcatttgggccattttttgtttcagtatgggactagtttaaacaaatttttaagggataaattagggagaagagaatactaacaggatctacatttttttttaacttttatttttaaaatgataaagaaacggggataaaaataaaccacctaaatgagtcatattagtttctttagctttttcaaatagtttctaaaatggaaggagattgaaagccagttttttaagatttatttcaagtgttgtgcaaagagggcttatgcaattcttcagaccctatttattttatttatttatttatgtacattcttctggaaaggattactaaagccaaactaagaaaagtatgtaagtgatggattatcaggcgcccttgtttgaggtcagagtaaacagacagactcccgataggttggtttaaaagtagatacctagattgcctggaagcattcaactcagctttgtgggagcatttggtcaaacttccaagtcattgttttttttgtgtgtgttcattttgttacttttccagttcttcctttgttctgtttatgtgccaatgtgcacagagaagatcaacatccccattggcccatgcggcggcatgtgtctttcagtcaagagacgctgtgaacccgtcctgaaggaatttggatttgcctggccagagagtctgaactgcagcaaattcccaccacagaacgaccacaaccacatgtgcatggaagggccaggtgatgaagaggtgcccttacctcacaaaacccccatccagcctggggaagagtgtcactctgtgggaaccaattctgatcagtacatctgggtgaaaaggagcctgaactgtgtgctcaagtgtggctatgatgctggcttatacagccgctcagccaaggagttcactgatatctggatggctgtgtgggccagcctgtgtttcatctccactgccttcacagtactgaccttcctgatcgattcttctaggttttcctaccctgagcgccccatcatatttctcagtatgtgctataatatttatagcattgcttatattgtcaggctgactgtaggccgggaaaggatatcctgtgattttgaagaggcagcagaacctgttctcatccaagaaggacttaagaacacaggatgtgcaataattttcttgctgatgtacttttttggaatggccagctccatttggtgggttattctgacactcacttggtttttggcagcaggactcaaatggggtcatgaagccattgaaatgcacagctcttatttccacattgcagcctgggccatccccgcagtgaaaaccattgtcatcttgattatgagactggtggatgcagatgaactgactggcttgtgctatgttggaaaccaaaatctcgatgccctcaccgggttcgtggtggctcccctctttacttatttggtcattggaactttgttcattgctgcaggtttggtggccttgttcaaaattcggtcaaatcttcaaaaggatgggacaaagacagacaagttagaaagactgatggtcaagattggggtgttctcagtactgtacacagttcctgcaacgtgtgtgattgcctgttatttttatgaaatctccaactgggcactttttcggtattctgcagatgattccaacatggctgttgaaatgttgaaaanttttatgtctttgttggtgggcatcacttcaggcatgtggatttggtctgccaaaantcttcacacgtggcagaagtgttccaacagattggtgaattctggaaaggtaaagagagagaagagaggaaatggttgggtgaagcctggaaaaggcagtgagactgtggtataaggctagtcagcctccatgctttcttcattttgaaggggggaatgccagcattttggaggaaattctactaaaagttttatgcagtgaatctcagtttgaacaaactagcaacaattaagtgacccccgtcaacccactgcctcccaccccgaccccagcatcaaaaaaccaatgattttgctgcagactttggaatgatccaaaatggaaaagccagttagaggctttcaaagctgtgaaaaatcaaaacgttgatcactttagcaggttgcagcttggagcgtggaggtcctgcctagattccaggaagtccagggcgatactgttttcccctgcagggtgggatttgagctgtgagttggtaactagcagggagaaatattaacttttttaaccctttaccattttaaatactaactgggtctttcagatagcaaagcaatctataaacactggaaacgctgggttcagaaaagtgttacaagagttttatagtttggctgatgtaacataaacatcttctgtggtgcgctgtctgctgtttagaactttgtggactgcactcccaagaagtggtgttagaatctttcagtgcctttgtcataaaacagttatttgaacaaacaaaagtactgtactcacacacataaggtatccagtggatttttcttctctgtcttcctctcttaaatttcaacatctctcttcttggctgctgctgttttcttcattttatgttaatgactcaaaaaaggtatttttatagaatttttgtactgcagcatgcttaaagaggggaaaaggaagggtgattcactttctgacaatcacttaattcagaggaaaatgagatttactaagttgacttacctgacggaccccagagacctattgcattgagcagtggggacttaatatattttacttgtgtgattgcatctatgcagacgccagtctggaagagctgaaatgttaagtttcttggcaactttgcattcacacagattagctgtgtaatttttgtgtgtcaattacaattaaaagcacattgttggaccatgacatagtatactcaactgactttaaaactatggtcaacttcaacttgcattctcagaatgatagtgcctttaaaaatttttttattttttaaagcataagaatgttatcagaatctggtctacttaggacaatggagactttttcagttttataaagggaactgaggacagctaatccaactacttggtgcgtaattgtttcctagtaattggcaaaggctccttgtaagatttcactggaggcagtgtggcctggagtatttatatggtgcttaatgaatctccagaatgccagccagaagcctgattggttagtagggaataaagtgtagaccatatgaaatgaactgcaaactctaatagcccaggtcttaattgcctttagcagaggtatccaaagcttttaaaatttatgcatacgttcttcacaagggggtacccccagcagcctctcgaaaattgcacttctcttaaaactgtaactggcctttctcttaccttgccttaggccttctaatcatgagatcttggggacaaattgactatgtcacaggttgctctccttgtaactcatacctgtctgcttcagcaactgctttgcaatgacatttatttattaattcatgccttaaaaaaataggaagggaagcttttttttttctttttttttttttcaatcacactttgtggaaaaacatttccagggactcaaaattccaaaaaggtggtcaaattctggaagtaagcatttcctcttttttaaaaatttggtttgagccttatgcccatagtttgacatttccctttcttctttcctttttgtttttgtgtggttcttgagctctctgacatcaagatgcatgtaaagtcgattgtatgttttggaaggcaaagtcttggcttttgagactgaagttaagtgggcacaggtggcccctgctgctgtgcccagtctgagtaccttggctagactctaggtcaggctccaggagcatgagaattgatccccagaagaaccattttaactccatctgatactccattgcctatgaaatgtaaaatgtgaactccctgtgctgcttgtagacagttcccataactgtccacggccctggagcacgcacccaggggcagagcctgcccttactcacgctctgctctggtgtcttgggagttgtgcagggactctggcccaggcaggggaaggaagaccaggcggtaggggactggtcttgctgttagagtatagaggtttgtaatgcagttttcttcataatgtgtcagtgattgtgtgaccaaggcagcatctagcagaaagccaggcatggagtaggtgatcgatacttgtcaatgactaaataataacaataaaagagcacttgggtgaatctgggcacctgatttctgagttttgagttctggagctagtgttttgacaatgctttgggttttgacatgccttttccacaaatctcttgccttttcagggcaaagtgtatttgatcagaagtggccatttggattagtagccttagcaatgctacagggttataggcctctcctttcacattccagacaatggagagtgtttatggtttcaggaaaagaactttgtggctgaggggtcagttaccagtgaccttcaatcaactccatcacttcttaaatcggtatttgttaaaaaaatcagttattttatttattgagtgccgactgtagtaaagccctgaaatagataatctctgttcttctaactgatctaggatggggacgcacccaggtctgctgaactttactgttcctctgggaaaggagcagggacctctggaattcccatctgtttcactgtctccattccataaatctcttcctgtgtgagccaccacacccagcctgggtctctctacttttaacacatctctcatccctttcccaggattccttccaagtcagttacaggtggttttaacagaaagcatcagctctgcttcgtgacagtctctggagaaatcccttaggaagactatgagagtaggccacaaggacatgggcccacacatctgctttggctttgccggcaattcagggcttggggtattccatgtgacttgtataggtatatttgaggacagcatcttgctagagaaaaggtgagggttgtttttctttctctgaaacctacagtaaatgggtatgattgtagcttcctcagaaatcccttggcctccagagattaaacatggtgcaatggcacctctgtccaacctcctttctggtagattcctttctcctgcttcatataggccaaacctcagggcaagggaacatgggggtagagtggtgctggccagaaccatctgcttgagctacttggttgattcatatcctctttcctttatggagacccatttcctgatctctgagactgttgctgaactggcaacttacttgggcctgaaactggagaaggggtgacatttttttaatttcagagatgctttctgattttcctctcccaggtcactgtctcacctgcactctccaaactcaggttccgggaagcttgtgtgtctagatactgaattgagattctgttcagcaccttttagctctatactctctggctcccctcatcctcatggtcactgaattaaatgcttattgtattgagaaccaagatgggacctgaggacacaaagatgagctcaacagtctcagccctagaggaatagactcagggatttcaccaggtcggtgcagtatttgatttctggtgaggtgaccacagctgcagttagggaagggagccattgagcacagactttggaaggaaccttttttttgttgtttgtttgtttgtttgtttgtttgtttgtttgagacagggtcttgctctgtcacccaggctggggcgcaatggcacgatcttggctcactgcaacctctgcctcctgggttcaagtgattctcctgccacagcctcctgaggagctgggactacaggtgcgtgctaccacgcccagctacttctgtatttttagtagagacggggtttcactgtgttggccaggctggtctcgaactcctgacctcatgatctgcccgcctcagcctcccaaagtgctgggattacaagtgtgagccaccacacctggcctggaaggaacctcttaaaatcagtttacgtcttgtattttgttctgtgatggaggacactggagagagttgctattccagtcaatcatgtcgagtcactggactctgaaaatcctattggttcctttattttatttgagtttagagttcccttctgggtttgtattatgtctggcaaatgacctgggttatcacttttcctccagggttagatcatagatcttggaaactccttagagagcattttgctcctaccaaggatcagatactggagccccacataatagatttcatttcactctagcctacatagagctttctgttgctgtctcttgccatgcacttgtgcggtgattacacacttgacagtaccaggagacaaatgacttacagatcccccgacatgcctcttccccttggcaagctcagttgccctgatagtagcatgtttctgtttctgatgtaccttttttctcttcttctttgcatcagccaattcccagaatttccccaggcaatttgtagaggacctttttggggtcctatatgagccatgtcctcaaagcttttaaacctccttgctctcctacaatattcagtacatgaccactgtcatcctagaaggcttctgaaaagaggggcaagagccactctgcgccacaaaggttgggtccatcttctctccgaggttgtgaaagttttcaaattgtactaataggctggggccctgacttggctgtgggctttgggaggggtaagctgctttctagatctctcccagtgaggcatggaggtgtttctgaattttgtctacctcacagggatgttgtgaggcttgaaaaggtcaaaaaatgatggccccttgagctctttgtaagaaaggtagatgaaatatcggatgtaatctgaaaaaaagataaaatgtgacttcccctgctctgtgcagcagtcgggctggatgctctgtggcctttcttgggtcctcatgccaccccacagctccaggaaccttgaagccaatctgggggactttcagatgtttgacaaagaggtaccaggcaaacttcctgctacacatgccctgaatgaattgctaaatttcaaaggaaatggaccctgcttttaaggatgtacaaaagtatgtctgcatcgatgtctgtactgtaaatttctaatttatcactgtacaaagaaaaccccttgctatttaattttgtattaaaggaaaataaagttttgtttgtta

SEQ ID NO: 281356 - DNA, 9510 bp, Homo sapiens
  misc_feature (4078)..(4078): n is a, c, g, or t
  misc_feature (4135)..(4135): n is a, c, g, or t
gctgcgcagcgctggctgctggctggcctcgcggagacgccgaacggacgcggccggcgccggcttgtgggctcgccgcctgcagccatgaccctcgcagcctgtccctcggcctcggcccgggacgtctaaaatcccacacagtcgcgcgcagctgctggagagccggccgctgccccctcgtcgccgcatcacactcccgtcccgggagctgggagcagcgcgggcagccggcgcccccgtgcaaactgggggtgtctgccagagcagccccagccgctgccgctgctacccccgatgctggccatggcctggcggggcgcagggccgagcgtcccgggggcgcccgggggcgtcggtctcagtctggggttgctcctgcagttgctgctgctcctggggccggcgcggggcttcggggacgaggaagagcggcgctgcgaccccatccgcatctccatgtgccagaacctcggctacaacgtgaccaagatgcccaacctggttgggcacgagctgcagacggacgccgagctgcagctgacaactttcacaccgctcatccagtacggctgctccagccagctgcaggtgggcgcccccacccccacccctggcgggaccccttggggagggacgctccaaactaactttgcagagcccatgccaagttgatcatcctagcccgaaggagacagctctcctggaaaagtgatttccatccccacccccactttctcagggactggaagccaaaacgttgtgtaagtcatctggcctgggaaagaacccactcttacaccccgcccttccgtttttctctcttgcccacccatgtctggcccagacccctaaccccagtggagctgagggttatctctgccaaggattctggccgccactgctcggtgggcgagtgggagggagccagctgcagctaagacttggagggagtgataaggagaccatccttcaccgaacttccttctccccactatttttggggtgttattaaatgaaacactactgcacctttttctgctgaatagccccttctcacgacgtcccgcagcgttttagaggtcatgcatgaaggagtggttgggttggcttgagttctttcttatcctcacagttgaaggcacgtttaatgcttggagggtgagaagaagctgcaggaaggtggttggtatattggaagaaatttttttgcagtcattaaaaaatgtaaagcatatctaatgatagagaaaatgtttattccacagtaataagaatttgcatatacagggtgattataatcctgcaaaataaaaaatttattgggataataaaagactgacaggaaaatttttaaagtgttaacattggttatgtttgggttggtgaggctgggtgatttttagaaatttagaaaagagagaagttgtgggaaaaagtagacgttagttgtccaggcttcagaaatctggtttctggccgggcgcagtggctcacgcctgtaatcccagcactttgggaggccgaggcaggtggctcacgaggttaggagttcgagaccagcctgaccaacatggcgaaatcctgtctctactaaaagtacaaaaattagccgggcgtggtggcgtgcgcctgtaatcccagctactcaggaggctgaggcaggagaatcgcttgaacccaggaggcagaggttgcagtgagcggggattgcaccattgcactctagcctgggccacaggagcgaaactccgtatcaaaaaaaaaaagaaaagaaaagaaatctgtggttctggctgtaacttctgagagataataaacagacatacagcttacttactaggtgcatgtttttacataggtcattttaaaacttggtttgtggttttggaaagatggtggggattagacctgttgctgctaaaatatccctttggaagtttcagaactttagaactaggttataaaagcttaagaaatgatcctccagctctcagtttggaaacagcacatatcctgacatcagtggcaatttgttggagaaacagcttttgcagggatatatatttttaattacatgtatcctggggaaagcggccaagctgttttgaaggacaagactggatccctttacatgctggaaaatagttacttgtaactctagacttcatagacaacatctgtaaggagccaagcagactgtttatcaatgctggaggaattgaggacagcaactggactctcccctgctggtactgcagtttcagcgacttaacatttacattttcctattgtgcttcattattattcattgaggaaacctggccaaacaaatccctagtgaccagagacctcaatctgcatcccatccttgagtctaacagtgtctcatttgggccattttttgtttcagtatgggactagtttaaacaaatttttaagggataaattagggagaagagaatactaacaggatctacatttttttttaacttttatttttaaaatgataaagaaacggggataaaaataaaccacctaaatgagtcatattagtttctttagctttttcaaatagtttctaaaatggaaggagattgaaagccagttttttaagatttatttcaagtgttgtgcaaagagggcttatgcaattcttcagaccctatttattttatttatttatttatgtacattcttctggaaaggattactaaagccaaactaagaaaagtatgtaagtgatggattatcaggcgcccttgtttgaggtcagagtaaacagacagactcccgataggttggtttaaaagtagatacctagattgcctggaagcattcaactcagctttgtgggagcatttggtcaaacttccaagtcattgttttttttgtgtgtgttcattttgttacttttccagttcttcctttgttctgtttatgtgccaatgtgcacagagaagatcaacatccccattggcccatgcggcggcatgtgtctttcagtcaagagacgctgtgaacccgtcctgaaggaatttggatttgcctggccagagagtctgaactgcagcaaattcccaccacagaacgaccacaaccacatgtgcatggaagggccaggtgatgaagaggtgcccttacctcacaaaacccccatccagcctggggaagagtgtcactctgtgggaaccaattctgatcagtacatctgggtgaaaaggagcctgaactgtgtgctcaagtgtggctatgatgctggcttatacagccgctcagccaaggagttcactgatatctggatggctgtgtgggccagcctgtgtttcatctccactgccttcacagtactgaccttcctgatcgattcttctaggttttcctaccctgagcgccccatcatatttctcagtatgtgctataatatttatagcattgcttatattgtcaggctgactgtaggccgggaaaggatatcctgtgattttgaagaggcagcagaacctgttctcatccaagaaggacttaagaacacaggatgtgcaataattttcttgctgatgtacttttttggaatggccagctccatttggtgggttattctgacactcacttggtttttggcagcaggactcaaatggggtcatgaagccattgaaatgcacagctcttatttccacattgcagcctgggccatccccgcagtgaaaaccattgtcatcttgattatgagactggtggatgcagatgaactgactggcttgtgctatgttggaaaccaaaatctcgatgccctcaccgggttcgtggtggctcccctctttacttatttggtcattggaactttgttcattgctgcaggtttggtggccttgttcaaaattcggtcaaatcttcaaaaggatgggacaaagacagacaagttagaaagactgatggtcaagattggggtgttctcagtactgtacacagttcctgcaacgtgtgtgattgcctgttatttttatgaaatctccaactgggcactttttcggtattctgcagatgattccaacatggctgttgaaatgttgaaaanttttatgtctttgttggtgggcatcacttcaggcatgtggatttggtctgccaaaantcttcacacgtggcagaagtgttccaacagattggtgaattctggaaaggtaaagagagagaagagaggaaatggttgggtgaagcctggaaaaggcagtgagactgtggtataaggctagtcagcctccatgctttcttcattttgaaggggggaatgccagcattttggaggaaattctactaaaagttttatgcagtgaatctcagtttgaacaaactagcaacaattaagtgacccccgtcaacccactgcctcccaccccgaccccagcatcaaaaaaccaatgattttgctgcagactttggaatgatccaaaatggaaaagccagttagaggctttcaaagctgtgaaaaatcaaaacgttgatcactttagcaggttgcagcttggagcgtggaggtcctgcctagattccaggaagtccagggcgatactgttttcccctgcagggtgggatttgagctgtgagttggtaactagcagggagaaatattaacttttttaaccctttaccattttaaatactaactgggtctttcagatagcaaagcaatctataaacactggaaacgctgggttcagaaaagtgttacaagagttttatagtttggctgatgtaacataaacatcttctgtggtgcgctgtctgctgtttagaactttgtggactgcactcccaagaagtggtgttagaatctttcagtgcctttgtcataaaacagttatttgaacaaacaaaagtactgtactcacacacataaggtatccagtggatttttcttctctgtcttcctctcttaaatttcaacatctctcttcttggctgctgctgttttcttcattttatgttaatgactcaaaaaaggtatttttatagaatttttgtactgcagcatgcttaaagaggggaaaaggaagggtgattcactttctgacaatcacttaattcagaggaaaatgagatttactaagttgacttacctgacggaccccagagacctattgcattgagcagtggggacttaatatattttacttgtgtgattgcatctatgcagacgccagtctggaagagctgaaatgttaagtttcttggcaactttgcattcacacagattagctgtgtaatttttgtgtgtcaattacaattaaaagcacattgttggaccatgacatagtatactcaactgactttaaaactatggtcaacttcaacttgcattctcagaatgatagtgcctttaaaaatttttttattttttaaagcataagaatgttatcagaatctggtctacttaggacaatggagactttttcagttttataaagggaactgaggacagctaatccaactacttggtgcgtaattgtttcctagtaattggcaaaggctccttgtaagatttcactggaggcagtgtggcctggagtatttatatggtgcttaatgaatctccagaatgccagccagaagcctgattggttagtagggaataaagtgtagaccatatgaaatgaactgcaaactctaatagcccaggtcttaattgcctttagcagaggtatccaaagcttttaaaatttatgcatacgttcttcacaagggggtacccccagcagcctctcgaaaattgcacttctcttaaaactgtaactggcctttctcttaccttgccttaggccttctaatcatgagatcttggggacaaattgactatgtcacaggttgctctccttgtaactcatacctgtctgcttcagcaactgctttgcaatgacatttatttattaattcatgccttaaaaaaataggaagggaagcttttttttttctttttttttttttcaatcacactttgtggaaaaacatttccagggactcaaaattccaaaaaggtggtcaaattctggaagtaagcatttcctcttttttaaaaatttggtttgagccttatgcccatagtttgacatttccctttcttctttcctttttgtttttgtgtggttcttgagctctctgacatcaagatgcatgtaaagtcgattgtatgttttggaaggcaaagtcttggcttttgagactgaagttaagtgggcacaggtggcccctgctgctgtgcccagtctgagtaccttggctagactctaggtcaggctccaggagcatgagaattgatccccagaagaaccattttaactccatctgatactccattgcctatgaaatgtaaaatgtgaactccctgtgctgcttgtagacagttcccataactgtccacggccctggagcacgcacccaggggcagagcctgcccttactcacgctctgctctggtgtcttgggagttgtgcagggactctggcccaggcaggggaaggaagaccaggcggtaggggactggtcttgctgttagagtatagaggtttgtaatgcagttttcttcataatgtgtcagtgattgtgtgaccaaggcagcatctagcagaaagccaggcatggagtaggtgatcgatacttgtcaatgactaaataataacaataaaagagcacttgggtgaatctgggcacctgatttctgagttttgagttctggagctagtgttttgacaatgctttgggttttgacatgccttttccacaaatctcttgccttttcagggcaaagtgtatttgatcagaagtggccatttggattagtagccttagcaatgctacagggttataggcctctcctttcacattccagacaatggagagtgtttatggtttcaggaaaagaactttgtggctgaggggtcagttaccagtgaccttcaatcaactccatcacttcttaaatcggtatttgttaaaaaaatcagttattttatttattgagtgccgactgtagtaaagccctgaaatagataatctctgttcttctaactgatctaggatggggacgcacccaggtctgctgaactttactgttcctctgggaaaggagcagggacctctggaattcccatctgtttcactgtctccattccataaatctcttcctgtgtgagccaccacacccagcctgggtctctctacttttaacacatctctcatccctttcccaggattccttccaagtcagttacaggtggttttaacagaaagcatcagctctgcttcgtgacagtctctggagaaatcccttaggaagactatgagagtaggccacaaggacatgggcccacacatctgctttggctttgccggcaattcagggcttggggtattccatgtgacttgtataggtatatttgaggacagcatcttgctagagaaaaggtgagggttgtttttctttctctgaaacctacagtaaatgggtatgattgtagcttcctcagaaatcccttggcctccagagattaaacatggtgcaatggcacctctgtccaacctcctttctggtagattcctttctcctgcttcatataggccaaacctcagggcaagggaacatgggggtagagtggtgctggccagaaccatctgcttgagctacttggttgattcatatcctctttcctttatggagacccatttcctgatctctgagactgttgctgaactggcaacttacttgggcctgaaactggagaaggggtgacatttttttaatttcagagatgctttctgattttcctctcccaggtcactgtctcacctgcactctccaaactcaggttccgggaagcttgtgtgtctagatactgaattgagattctgttcagcaccttttagctctatactctctggctcccctcatcctcatggtcactgaattaaatgcttattgtattgagaaccaagatgggacctgaggacacaaagatgagctcaacagtctcagccctagaggaatagactcagggatttcaccaggtcggtgcagtatttgatttctggtgaggtgaccacagctgcagttagggaagggagccattgagcacagactttggaaggaaccttttttttgttgtttgtttgtttgtttgtttgtttgtttgtttgagacagggtcttgctctgtcacccaggctggggcgcaatggcacgatcttggctcactgcaacctctgcctcctgggttcaagtgattctcctgccacagcctcctgaggagctgggactacaggtgcgtgctaccacgcccagctacttctgtatttttagtagagacggggtttcactgtgttggccaggctggtctcgaactcctgacctcatgatctgcccgcctcagcctcccaaagtgctgggattacaagtgtgagccaccacacctggcctggaaggaacctcttaaaatcagtttacgtcttgtattttgttctgtgatggaggacactggagagagttgctattccagtcaatcatgtcgagtcactggactctgaaaatcctattggttcctttattttatttgagtttagagttcccttctgggtttgtattatgtctggcaaatgacctgggttatcacttttcctccagggttagatcatagatcttggaaactccttagagagcattttgctcctaccaaggatcagatactggagccccacataatagatttcatttcactctagcctacatagagctttctgttgctgtctcttgccatgcacttgtgcggtgattacacacttgacagtaccaggagacaaatgacttacagatcccccgacatgcctcttccccttggcaagctcagttgccctgatagtagcatgtttctgtttctgatgtaccttttttctcttcttctttgcatcagccaattcccagaatttccccaggcaatttgtagaggacctttttggggtcctatatgagccatgtcctcaaagcttttaaacctccttgctctcctacaatattcagtacatgaccactgtcatcctagaaggcttctgaaaagaggggcaagagccactctgcgccacaaaggttgggtccatcttctctccgaggttgtgaaagttttcaaattaaaagataaaatgtgacttcccctgctctgtgcagcagtcgggctggatgctctgtggcctttcttgggtcctcatgccaccccacagctccaggaaccttgaagccaatctgggggactttcagatgtttgacaaagaggtaccaggcaaacttcctgctacacatgccctgaatgaattgctaaatttcaaaggaaatggaccctgcttttaaggatgtacaaaagtatgtctgcatcgatgtctgtactgtaaatttctaatttatcactgtacaaagaaaaccccttgctatttaattttgtattaaaggaaaataaagttttgtttgtta

SEQ ID NO: 281357 - DNA, 5767 bp, Homo sapiens
  misc_feature (4078)..(4078): n is a, c, g, or t
  misc_feature (4135)..(4135): n is a, c, g, or t
gctgcgcagcgctggctgctggctggcctcgcggagacgccgaacggacgcggccggcgccggcttgtgggctcgccgcctgcagccatgaccctcgcagcctgtccctcggcctcggcccgggacgtctaaaatcccacacagtcgcgcgcagctgctggagagccggccgctgccccctcgtcgccgcatcacactcccgtcccgggagctgggagcagcgcgggcagccggcgcccccgtgcaaactgggggtgtctgccagagcagccccagccgctgccgctgctacccccgatgctggccatggcctggcggggcgcagggccgagcgtcccgggggcgcccgggggcgtcggtctcagtctggggttgctcctgcagttgctgctgctcctggggccggcgcggggcttcggggacgaggaagagcggcgctgcgaccccatccgcatctccatgtgccagaacctcggctacaacgtgaccaagatgcccaacctggttgggcacgagctgcagacggacgccgagctgcagctgacaactttcacaccgctcatccagtacggctgctccagccagctgcaggtgggcgcccccacccccacccctggcgggaccccttggggagggacgctccaaactaactttgcagagcccatgccaagttgatcatcctagcccgaaggagacagctctcctggaaaagtgatttccatccccacccccactttctcagggactggaagccaaaacgttgtgtaagtcatctggcctgggaaagaacccactcttacaccccgcccttccgtttttctctcttgcccacccatgtctggcccagacccctaaccccagtggagctgagggttatctctgccaaggattctggccgccactgctcggtgggcgagtgggagggagccagctgcagctaagacttggagggagtgataaggagaccatccttcaccgaacttccttctccccactatttttggggtgttattaaatgaaacactactgcacctttttctgctgaatagccccttctcacgacgtcccgcagcgttttagaggtcatgcatgaaggagtggttgggttggcttgagttctttcttatcctcacagttgaaggcacgtttaatgcttggagggtgagaagaagctgcaggaaggtggttggtatattggaagaaatttttttgcagtcattaaaaaatgtaaagcatatctaatgatagagaaaatgtttattccacagtaataagaatttgcatatacagggtgattataatcctgcaaaataaaaaatttattgggataataaaagactgacaggaaaatttttaaagtgttaacattggttatgtttgggttggtgaggctgggtgatttttagaaatttagaaaagagagaagttgtgggaaaaagtagacgttagttgtccaggcttcagaaatctggtttctggccgggcgcagtggctcacgcctgtaatcccagcactttgggaggccgaggcaggtggctcacgaggttaggagttcgagaccagcctgaccaacatggcgaaatcctgtctctactaaaagtacaaaaattagccgggcgtggtggcgtgcgcctgtaatcccagctactcaggaggctgaggcaggagaatcgcttgaacccaggaggcagaggttgcagtgagcggggattgcaccattgcactctagcctgggccacaggagcgaaactccgtatcaaaaaaaaaaagaaaagaaaagaaatctgtggttctggctgtaacttctgagagataataaacagacatacagcttacttactaggtgcatgtttttacataggtcattttaaaacttggtttgtggttttggaaagatggtggggattagacctgttgctgctaaaatatccctttggaagtttcagaactttagaactaggttataaaagcttaagaaatgatcctccagctctcagtttggaaacagcacatatcctgacatcagtggcaatttgttggagaaacagcttttgcagggatatatatttttaattacatgtatcctggggaaagcggccaagctgttttgaaggacaagactggatccctttacatgctggaaaatagttacttgtaactctagacttcatagacaacatctgtaaggagccaagcagactgtttatcaatgctggaggaattgaggacagcaactggactctcccctgctggtactgcagtttcagcgacttaacatttacattttcctattgtgcttcattattattcattgaggaaacctggccaaacaaatccctagtgaccagagacctcaatctgcatcccatccttgagtctaacagtgtctcatttgggccattttttgtttcagtatgggactagtttaaacaaatttttaagggataaattagggagaagagaatactaacaggatctacatttttttttaacttttatttttaaaatgataaagaaacggggataaaaataaaccacctaaatgagtcatattagtttctttagctttttcaaatagtttctaaaatggaaggagattgaaagccagttttttaagatttatttcaagtgttgtgcaaagagggcttatgcaattcttcagaccctatttattttatttatttatttatgtacattcttctggaaaggattactaaagccaaactaagaaaagtatgtaagtgatggattatcaggcgcccttgtttgaggtcagagtaaacagacagactcccgataggttggtttaaaagtagatacctagattgcctggaagcattcaactcagctttgtgggagcatttggtcaaacttccaagtcattgttttttttgtgtgtgttcattttgttacttttccagttcttcctttgttctgtttatgtgccaatgtgcacagagaagatcaacatccccattggcccatgcggcggcatgtgtctttcagtcaagagacgctgtgaacccgtcctgaaggaatttggatttgcctggccagagagtctgaactgcagcaaattcccaccacagaacgaccacaaccacatgtgcatggaagggccaggtgatgaagaggtgcccttacctcacaaaacccccatccagcctggggaagagtgtcactctgtgggaaccaattctgatcagtacatctgggtgaaaaggagcctgaactgtgtgctcaagtgtggctatgatgctggcttatacagccgctcagccaaggagttcactgatatctggatggctgtgtgggccagcctgtgtttcatctccactgccttcacagtactgaccttcctgatcgattcttctaggttttcctaccctgagcgccccatcatatttctcagtatgtgctataatatttatagcattgcttatattgtcaggctgactgtaggccgggaaaggatatcctgtgattttgaagaggcagcagaacctgttctcatccaagaaggacttaagaacacaggatgtgcaataattttcttgctgatgtacttttttggaatggccagctccatttggtgggttattctgacactcacttggtttttggcagcaggactcaaatggggtcatgaagccattgaaatgcacagctcttatttccacattgcagcctgggccatccccgcagtgaaaaccattgtcatcttgattatgagactggtggatgcagatgaactgactggcttgtgctatgttggaaaccaaaatctcgatgccctcaccgggttcgtggtggctcccctctttacttatttggtcattggaactttgttcattgctgcaggtttggtggccttgttcaaaattcggtcaaatcttcaaaaggatgggacaaagacagacaagttagaaagactgatggtcaagattggggtgttctcagtactgtacacagttcctgcaacgtgtgtgattgcctgttatttttatgaaatctccaactgggcactttttcggtattctgcagatgattccaacatggctgttgaaatgttgaaaanttttatgtctttgttggtgggcatcacttcaggcatgtggatttggtctgccaaaantcttcacacgtggcagaagtgttccaacagattggtgaattctggaaaggtaaagagagagaagagaggaaatggttgggtgaagcctggaaaaggcagtgagactgtggtataaggctagtcagcctccatgctttcttcattttgaaggggggaatgccagcattttggaggaaattctactaaaagttttatgcagtgaatctcagtttgaacaaactagcaacaattaagtgacccccgtcaacccactgcctcccaccccgaccccagcatcaaaaaaccaatgattttgctgcagactttggaatgatccaaaatggaaaagccagttagaggctttcaaagctgtgaaaaatcaaaacgttgatcactttagcaggttgcagcttggagcgtggaggtcctgcctagattccaggaagtccagggcgatactgttttcccctgcagggtgggatttgagctgtgagttggtaactagcagggagaaatattaacttttttaaccctttaccattttaaatactaactgggtctttcagatagcaaagcaatctataaacactggaaacgctgggttcagaaaagtgttacaagagttttatagtttggctgatgtaacataaacatcttctgtggtgcgctgtctgctgtttagaactttgtggactgcactcccaagaagtggtgttagaatctttcagtgcctttgtcataaaacagttatttgaacaaacaaaagtactgtactcacacacataaggtatccagtggatttttcttctctgtcttcctctcttaaatttcaacatctctcttcttggctgctgctgttttcttcattttatgttaatgactcaaaaaaggtatttttatagaatttttgtactgcagcatgcttaaagaggggaaaaggaagggtgattcactttctgacaatcacttaattcagaggaaaatgagatttactaagttgacttacctgacggaccccagagacctattgcattgagcagtggggacttaatatattttacttgtgtgattgcatctatgcagacgccagtctggaagagctgaaatgttaagtttcttggcaactttgcattcacacagattagctgtgtaatttttgtgtgtcaattacaattaaaagcacattgttggaccatgacatagtatactcaactgactttaaaactatggtcaacttcaacttgcattctcagaatgatagtgcctttaaaaatttttttattttttaaagcataagaatgttatcagaatctggtctacttaggacaatggagactttttcagttttataaagggaactgaggacagctaatccaactacttggtgcgtaattgtttcctagtaattggcaaaggctccttgtaagatttcactggaggcagtgtggcctggagtatttatatggtgcttaatgaatctccagaatgccagccagaagcctgattggttagtagggaataaagtgtagaccatatgaaatgaactgcaaactctaatagcccaggtcttaattgcctttagcagaggttgcagtgagcggggattgcaccattgcactcgagcctgggcaacagagcgagactccgtctcaa

SEQ ID NO: 281358 - DNA, 4918 bp, Homo sapiens
  misc_feature (4078)..(4078): n is a, c, g, or t
  misc_feature (4135)..(4135): n is a, c, g, or t
gctgcgcagcgctggctgctggctggcctcgcggagacgccgaacggacgcggccggcgccggcttgtgggctcgccgcctgcagccatgaccctcgcagcctgtccctcggcctcggcccgggacgtctaaaatcccacacagtcgcgcgcagctgctggagagccggccgctgccccctcgtcgccgcatcacactcccgtcccgggagctgggagcagcgcgggcagccggcgcccccgtgcaaactgggggtgtctgccagagcagccccagccgctgccgctgctacccccgatgctggccatggcctggcggggcgcagggccgagcgtcccgggggcgcccgggggcgtcggtctcagtctggggttgctcctgcagttgctgctgctcctggggccggcgcggggcttcggggacgaggaagagcggcgctgcgaccccatccgcatctccatgtgccagaacctcggctacaacgtgaccaagatgcccaacctggttgggcacgagctgcagacggacgccgagctgcagctgacaactttcacaccgctcatccagtacggctgctccagccagctgcaggtgggcgcccccacccccacccctggcgggaccccttggggagggacgctccaaactaactttgcagagcccatgccaagttgatcatcctagcccgaaggagacagctctcctggaaaagtgatttccatccccacccccactttctcagggactggaagccaaaacgttgtgtaagtcatctggcctgggaaagaacccactcttacaccccgcccttccgtttttctctcttgcccacccatgtctggcccagacccctaaccccagtggagctgagggttatctctgccaaggattctggccgccactgctcggtgggcgagtgggagggagccagctgcagctaagacttggagggagtgataaggagaccatccttcaccgaacttccttctccccactatttttggggtgttattaaatgaaacactactgcacctttttctgctgaatagccccttctcacgacgtcccgcagcgttttagaggtcatgcatgaaggagtggttgggttggcttgagttctttcttatcctcacagttgaaggcacgtttaatgcttggagggtgagaagaagctgcaggaaggtggttggtatattggaagaaatttttttgcagtcattaaaaaatgtaaagcatatctaatgatagagaaaatgtttattccacagtaataagaatttgcatatacagggtgattataatcctgcaaaataaaaaatttattgggataataaaagactgacaggaaaatttttaaagtgttaacattggttatgtttgggttggtgaggctgggtgatttttagaaatttagaaaagagagaagttgtgggaaaaagtagacgttagttgtccaggcttcagaaatctggtttctggccgggcgcagtggctcacgcctgtaatcccagcactttgggaggccgaggcaggtggctcacgaggttaggagttcgagaccagcctgaccaacatggcgaaatcctgtctctactaaaagtacaaaaattagccgggcgtggtggcgtgcgcctgtaatcccagctactcaggaggctgaggcaggagaatcgcttgaacccaggaggcagaggttgcagtgagcggggattgcaccattgcactctagcctgggccacaggagcgaaactccgtatcaaaaaaaaaaagaaaagaaaagaaatctgtggttctggctgtaacttctgagagataataaacagacatacagcttacttactaggtgcatgtttttacataggtcattttaaaacttggtttgtggttttggaaagatggtggggattagacctgttgctgctaaaatatccctttggaagtttcagaactttagaactaggttataaaagcttaagaaatgatcctccagctctcagtttggaaacagcacatatcctgacatcagtggcaatttgttggagaaacagcttttgcagggatatatatttttaattacatgtatcctggggaaagcggccaagctgttttgaaggacaagactggatccctttacatgctggaaaatagttacttgtaactctagacttcatagacaacatctgtaaggagccaagcagactgtttatcaatgctggaggaattgaggacagcaactggactctcccctgctggtactgcagtttcagcgacttaacatttacattttcctattgtgcttcattattattcattgaggaaacctggccaaacaaatccctagtgaccagagacctcaatctgcatcccatccttgagtctaacagtgtctcatttgggccattttttgtttcagtatgggactagtttaaacaaatttttaagggataaattagggagaagagaatactaacaggatctacatttttttttaacttttatttttaaaatgataaagaaacggggataaaaataaaccacctaaatgagtcatattagtttctttagctttttcaaatagtttctaaaatggaaggagattgaaagccagttttttaagatttatttcaagtgttgtgcaaagagggcttatgcaattcttcagaccctatttattttatttatttatttatgtacattcttctggaaaggattactaaagccaaactaagaaaagtatgtaagtgatggattatcaggcgcccttgtttgaggtcagagtaaacagacagactcccgataggttggtttaaaagtagatacctagattgcctggaagcattcaactcagctttgtgggagcatttggtcaaacttccaagtcattgttttttttgtgtgtgttcattttgttacttttccagttcttcctttgttctgtttatgtgccaatgtgcacagagaagatcaacatccccattggcccatgcggcggcatgtgtctttcagtcaagagacgctgtgaacccgtcctgaaggaatttggatttgcctggccagagagtctgaactgcagcaaattcccaccacagaacgaccacaaccacatgtgcatggaagggccaggtgatgaagaggtgcccttacctcacaaaacccccatccagcctggggaagagtgtcactctgtgggaaccaattctgatcagtacatctgggtgaaaaggagcctgaactgtgtgctcaagtgtggctatgatgctggcttatacagccgctcagccaaggagttcactgatatctggatggctgtgtgggccagcctgtgtttcatctccactgccttcacagtactgaccttcctgatcgattcttctaggttttcctaccctgagcgccccatcatatttctcagtatgtgctataatatttatagcattgcttatattgtcaggctgactgtaggccgggaaaggatatcctgtgattttgaagaggcagcagaacctgttctcatccaagaaggacttaagaacacaggatgtgcaataattttcttgctgatgtacttttttggaatggccagctccatttggtgggttattctgacactcacttggtttttggcagcaggactcaaatggggtcatgaagccattgaaatgcacagctcttatttccacattgcagcctgggccatccccgcagtgaaaaccattgtcatcttgattatgagactggtggatgcagatgaactgactggcttgtgctatgttggaaaccaaaatctcgatgccctcaccgggttcgtggtggctcccctctttacttatttggtcattggaactttgttcattgctgcaggtttggtggccttgttcaaaattcggtcaaatcttcaaaaggatgggacaaagacagacaagttagaaagactgatggtcaagattggggtgttctcagtactgtacacagttcctgcaacgtgtgtgattgcctgttatttttatgaaatctccaactgggcactttttcggtattctgcagatgattccaacatggctgttgaaatgttgaaaanttttatgtctttgttggtgggcatcacttcaggcatgtggatttggtctgccaaaantcttcacacgtggcagaagtgttccaacagattggtgaattctggaaaggtaaagagagagaagagaggaaatggttgggtgaagcctggaaaaggcagtgagactgtggtataaggctagtcagcctccatgctttcttcattttgaaggggggaatgccagcattttggaggaaattctactaaaagttttatgcagtgaatctcagtttgaacaaactagcaacaattaagtgacccccgtcaacccactgcctcccaccccgaccccagcatcaaaaaaccaatgattttgctgcagactttggaatgatccaaaatggaaaagccagttagaggctttcaaagctgtgaaaaatcaaaacgttgatcactttagcaggttgcagcttggagcgtggaggtcctgcctagattccaggaagtccagggcgatactgttttcccctgcagggtgggatttgagctgtgagttggtaactagcagggagaaatattaacttttttaaccctttaccattttaaatactaactgggtctttcagatagcaaaccaatctgggggactttcagatgtttgacaaagaggtaccaggcaaacttcctgctacacatgccctgaatgaattgctaaatttcaaaggaaatggaccctgcttttaaggatgtacaaaagtatgtctgcatcgatgtctgtactgtaaatttctaatttatcactgtacaaagaaaaccccttgctatttaattttgtattaaaggaaaataaagttttgtttgtta

SEQ ID NO: 281359 - DNA, 9653 bp, Homo sapiens
  misc_feature (4078)..(4078): n is a, c, g, or t
  misc_feature (4135)..(4135): n is a, c, g, or t
gctgcgcagcgctggctgctggctggcctcgcggagacgccgaacggacgcggccggcgccggcttgtgggctcgccgcctgcagccatgaccctcgcagcctgtccctcggcctcggcccgggacgtctaaaatcccacacagtcgcgcgcagctgctggagagccggccgctgccccctcgtcgccgcatcacactcccgtcccgggagctgggagcagcgcgggcagccggcgcccccgtgcaaactgggggtgtctgccagagcagccccagccgctgccgctgctacccccgatgctggccatggcctggcggggcgcagggccgagcgtcccgggggcgcccgggggcgtcggtctcagtctggggttgctcctgcagttgctgctgctcctggggccggcgcggggcttcggggacgaggaagagcggcgctgcgaccccatccgcatctccatgtgccagaacctcggctacaacgtgaccaagatgcccaacctggttgggcacgagctgcagacggacgccgagctgcagctgacaactttcacaccgctcatccagtacggctgctccagccagctgcaggtgggcgcccccacccccacccctggcgggaccccttggggagggacgctccaaactaactttgcagagcccatgccaagttgatcatcctagcccgaaggagacagctctcctggaaaagtgatttccatccccacccccactttctcagggactggaagccaaaacgttgtgtaagtcatctggcctgggaaagaacccactcttacaccccgcccttccgtttttctctcttgcccacccatgtctggcccagacccctaaccccagtggagctgagggttatctctgccaaggattctggccgccactgctcggtgggcgagtgggagggagccagctgcagctaagacttggagggagtgataaggagaccatccttcaccgaacttccttctccccactatttttggggtgttattaaatgaaacactactgcacctttttctgctgaatagccccttctcacgacgtcccgcagcgttttagaggtcatgcatgaaggagtggttgggttggcttgagttctttcttatcctcacagttgaaggcacgtttaatgcttggagggtgagaagaagctgcaggaaggtggttggtatattggaagaaatttttttgcagtcattaaaaaatgtaaagcatatctaatgatagagaaaatgtttattccacagtaataagaatttgcatatacagggtgattataatcctgcaaaataaaaaatttattgggataataaaagactgacaggaaaatttttaaagtgttaacattggttatgtttgggttggtgaggctgggtgatttttagaaatttagaaaagagagaagttgtgggaaaaagtagacgttagttgtccaggcttcagaaatctggtttctggccgggcgcagtggctcacgcctgtaatcccagcactttgggaggccgaggcaggtggctcacgaggttaggagttcgagaccagcctgaccaacatggcgaaatcctgtctctactaaaagtacaaaaattagccgggcgtggtggcgtgcgcctgtaatcccagctactcaggaggctgaggcaggagaatcgcttgaacccaggaggcagaggttgcagtgagcggggattgcaccattgcactctagcctgggccacaggagcgaaactccgtatcaaaaaaaaaaagaaaagaaaagaaatctgtggttctggctgtaacttctgagagataataaacagacatacagcttacttactaggtgcatgtttttacataggtcattttaaaacttggtttgtggttttggaaagatggtggggattagacctgttgctgctaaaatatccctttggaagtttcagaactttagaactaggttataaaagcttaagaaatgatcctccagctctcagtttggaaacagcacatatcctgacatcagtggcaatttgttggagaaacagcttttgcagggatatatatttttaattacatgtatcctggggaaagcggccaagctgttttgaaggacaagactggatccctttacatgctggaaaatagttacttgtaactctagacttcatagacaacatctgtaaggagccaagcagactgtttatcaatgctggaggaattgaggacagcaactggactctcccctgctggtactgcagtttcagcgacttaacatttacattttcctattgtgcttcattattattcattgaggaaacctggccaaacaaatccctagtgaccagagacctcaatctgcatcccatccttgagtctaacagtgtctcatttgggccattttttgtttcagtatgggactagtttaaacaaatttttaagggataaattagggagaagagaatactaacaggatctacatttttttttaacttttatttttaaaatgataaagaaacggggataaaaataaaccacctaaatgagtcatattagtttctttagctttttcaaatagtttctaaaatggaaggagattgaaagccagttttttaagatttatttcaagtgttgtgcaaagagggcttatgcaattcttcagaccctatttattttatttatttatttatgtacattcttctggaaaggattactaaagccaaactaagaaaagtatgtaagtgatggattatcaggcgcccttgtttgaggtcagagtaaacagacagactcccgataggttggtttaaaagtagatacctagattgcctggaagcattcaactcagctttgtgggagcatttggtcaaacttccaagtcattgttttttttgtgtgtgttcattttgttacttttccagttcttcctttgttctgtttatgtgccaatgtgcacagagaagatcaacatccccattggcccatgcggcggcatgtgtctttcagtcaagagacgctgtgaacccgtcctgaaggaatttggatttgcctggccagagagtctgaactgcagcaaattcccaccacagaacgaccacaaccacatgtgcatggaagggccaggtgatgaagaggtgcccttacctcacaaaacccccatccagcctggggaagagtgtcactctgtgggaaccaattctgatcagtacatctgggtgaaaaggagcctgaactgtgtgctcaagtgtggctatgatgctggcttatacagccgctcagccaaggagttcactgatatctggatggctgtgtgggccagcctgtgtttcatctccactgccttcacagtactgaccttcctgatcgattcttctaggttttcctaccctgagcgccccatcatatttctcagtatgtgctataatatttatagcattgcttatattgtcaggctgactgtaggccgggaaaggatatcctgtgattttgaagaggcagcagaacctgttctcatccaagaaggacttaagaacacaggatgtgcaataattttcttgctgatgtacttttttggaatggccagctccatttggtgggttattctgacactcacttggtttttggcagcaggactcaaatggggtcatgaagccattgaaatgcacagctcttatttccacattgcagcctgggccatccccgcagtgaaaaccattgtcatcttgattatgagactggtggatgcagatgaactgactggcttgtgctatgttggaaaccaaaatctcgatgccctcaccgggttcgtggtggctcccctctttacttatttggtcattggaactttgttcattgctgcaggtttggtggccttgttcaaaattcggtcaaatcttcaaaaggatgggacaaagacagacaagttagaaagactgatggtcaagattggggtgttctcagtactgtacacagttcctgcaacgtgtgtgattgcctgttatttttatgaaatctccaactgggcactttttcggtattctgcagatgattccaacatggctgttgaaatgttgaaaanttttatgtctttgttggtgggcatcacttcaggcatgtggatttggtctgccaaaantcttcacacgtggcagaagtgttccaacagattggtgaattctggaaaggtaaagagagagaagagaggaaatggttgggtgaagcctggaaaaggcagtgagactgtggtataaggctagtcagcctccatgctttcttcattttgaaggggggaatgccagcattttggaggaaattctactaaaagttttatgcagtgaatctcagtttgaacaaactagcaacaattaagtgacccccgtcaacccactgcctcccaccccgaccccagcatcaaaaaaccaatgattttgctgcagactttggaatgatccaaaatggaaaagccagttagaggctttcaaagctgtgaaaaatcaaaacgttgatcactttagcaggttgcagcttggagcgtggaggtcctgcctagattccaggaagtccagggcgatactgttttcccctgcagggtgggatttgagctgtgagttggtaactagcagggagaaatattaacttttttaaccctttaccattttaaatactaactgggtctttcagatagcaaagcaatctataaacactggaaacgctgggttcagaaaagtgttacaagagttttatagtttggctgatgtaacataaacatcttctgtggtgcgctgtctgctgtttagaactttgtggactgcactcccaagaagtggtgttagaatctttcagtgcctttgtcataaaacagttatttgaacaaacaaaagtactgtactcacacacataaggtatccagtggatttttcttctctgtcttcctctcttaaatttcaacatctctcttcttggctgctgctgttttcttcattttatgttaatgactcaaaaaaggtatttttatagaatttttgtactgcagcatgcttaaagaggggaaaaggaagggtgattcactttctgacaatcacttaattcagaggaaaatgagatttactaagttgacttacctgacggaccccagagacctattgcattgagcagtggggacttaatatattttacttgtgtgattgcatctatgcagacgccagtctggaagagctgaaatgttaagtttcttggcaactttgcattcacacagattagctgtgtaatttttgtgtgtcaattacaattaaaagcacattgttggaccatgacatagtatactcaactgactttaaaactatggtcaacttcaacttgcattctcagaatgatagtgcctttaaaaatttttttattttttaaagcataagaatgttatcagaatctggtctacttaggacaatggagactttttcagttttataaagggaactgaggacagctaatccaactacttggtgcgtaattgtttcctagtaattggcaaaggctccttgtaagatttcactggaggcagtgtggcctggagtatttatatggtgcttaatgaatctccagaatgccagccagaagcctgattggttagtagggaataaagtgtagaccatatgaaatgaactgcaaactctaatagcccaggtcttaattgcctttagcagaggtatccaaagcttttaaaatttatgcatacgttcttcacaagggggtacccccagcagcctctcgaaaattgcacttctcttaaaactgtaactggcctttctcttaccttgccttaggccttctaatcatgagatcttggggacaaattgactatgtcacaggttgctctccttgtaactcatacctgtctgcttcagcaactgctttgcaatgacatttatttattaattcatgccttaaaaaaataggaagggaagcttttttttttctttttttttttttcaatcacactttgtggaaaaacatttccagggactcaaaattccaaaaaggtggtcaaattctggaagtaagcatttcctcttttttaaaaatttggtttgagccttatgcccatagtttgacatttccctttcttctttcctttttgtttttgtgtggttcttgagctctctgacatcaagatgcatgtaaagtcgattgtatgttttggaaggcaaagtcttggcttttgagactgaagttaagtgggcacaggtggcccctgctgctgtgcccagtctgagtaccttggctagactctaggtcaggctccaggagcatgagaattgatccccagaagaaccattttaactccatctgatactccattgcctatgaaatgtaaaatgtgaactccctgtgctgcttgtagacagttcccataactgtccacggccctggagcacgcacccaggggcagagcctgcccttactcacgctctgctctggtgtcttgggagttgtgcagggactctggcccaggcaggggaaggaagaccaggcggtaggggactggtcttgctgttagagtatagaggtttgtaatgcagttttcttcataatgtgtcagtgattgtgtgaccaaggcagcatctagcagaaagccaggcatggagtaggtgatcgatacttgtcaatgactaaataataacaataaaagagcacttgggtgaatctgggcacctgatttctgagttttgagttctggagctagtgttttgacaatgctttgggttttgacatgccttttccacaaatctcttgccttttcagggcaaagtgtatttgatcagaagtggccatttggattagtagccttagcaatgctacagggttataggcctctcctttcacattccagacaatggagagtgtttatggtttcaggaaaagaactttgtggctgaggggtcagttaccagtgaccttcaatcaactccatcacttcttaaatcggtatttgttaaaaaaatcagttattttatttattgagtgccgactgtagtaaagccctgaaatagataatctctgttcttctaactgatctaggatggggacgcacccaggtctgctgaactttactgttcctctgggaaaggagcagggacctctggaattcccatctgtttcactgtctccattccataaatctcttcctgtgtgagccaccacacccagcctgggtctctctacttttaacacatctctcatccctttcccaggattccttccaagtcagttacaggtggttttaacagaaagcatcagctctgcttcgtgacagtctctggagaaatcccttaggaagactatgagagtaggccacaaggacatgggcccacacatctgctttggctttgccggcaattcagggcttggggtattccatgtgacttgtataggtatatttgaggacagcatcttgctagagaaaaggtgagggttgtttttctttctctgaaacctacagtaaatgggtatgattgtagcttcctcagaaatcccttggcctccagagattaaacatggtgcaatggcacctctgtccaacctcctttctggtagattcctttctcctgcttcatataggccaaacctcagggcaagggaacatgggggtagagtggtgctggccagaaccatctgcttgagctacttggttgattcatatcctctttcctttatggagacccatttcctgatctctgagactgttgctgaactggcaacttacttgggcctgaaactggagaaggggtgacatttttttaatttcagagatgctttctgattttcctctcccaggtcactgtctcacctgcactctccaaactcaggttccgggaagcttgtgtgtctagatactgaattgagattctgttcagcaccttttagctctatactctctggctcccctcatcctcatggtcactgaattaaatgcttattgtattgagaaccaagatgggacctgaggacacaaagatgagctcaacagtctcagccctagaggaatagactcagggatttcaccaggtcggtgcagtatttgatttctggtgaggtgaccacagctgcagttagggaagggagccattgagcacagactttggaaggaaccttttttttgttgtttgtttgtttgtttgtttgtttgtttgtttgagacagggtcttgctctgtcacccaggctggggcgcaatggcacgatcttggctcactgcaacctctgcctcctgggttcaagtgattctcctgccacagcctcctgaggagctgggactacaggtgcgtgctaccacgcccagctacttctgtatttttagtagagacggggtttcactgtgttggccaggctggtctcgaactcctgacctcatgatctgcccgcctcagcctcccaaagtgctgggattacaagtgtgagccaccacacctggcctggaaggaacctcttaaaatcagtttacgtcttgtattttgttctgtgatggaggacactggagagagttgctattccagtcaatcatgtcgagtcactggactctgaaaatcctattggttcctttattttatttgagtttagagttcccttctgggtttgtattatgtctggcaaatgacctgggttatcacttttcctccagggttagatcatagatcttggaaactccttagagagcattttgctcctaccaaggatcagatactggagccccacataatagatttcatttcactctagcctacatagagctttctgttgctgtctcttgccatgcacttgtgcggtgattacacacttgacagtaccaggagacaaatgacttacagatcccccgacatgcctcttccccttggcaagctcagttgccctgatagtagcatgtttctgtttctgatgtaccttttttctcttcttctttgcatcagccaattcccagaatttccccaggcaatttgtagaggacctttttggggtcctatatgagccatgtcctcaaagcttttaaacctccttgctctcctacaatattcagtacatgaccactgtcatcctagaaggcttctgaaaagaggggcaagagccactctgcgccacaaaggttgggtccatcttctctccgaggttgtgaaagttttcaaattgtactaataggctggggccctgacttggctgtgggctttgggaggggtaagctgctttctagatctctcccagtgaggcatggaggtgtttctgaattttgtctacctcacagggatgttgtgaggcttgaaaaggtcaaaaaatgatggccccttgagctctttgtaagaaaggtagatgaaatatcggatgtaatctgaaatttcttgggtcctcatgccaccccacagctccaggaaccttgaagccaatctgggggactttcagatgtttgacaaagaggtaccaggcaaacttcctgctacacatgccctgaatgaattgctaaatttcaaaggaaatggaccctgcttttaaggatgtacaaaagtatgtctgcatcgatgtctgtactgtaaatttctaatttatcactgtacaaagaaaaccccttgctatttaattttgtattaaaggaaaataaagttttgtttgtta

SEQ ID NO: 281360 - DNA, 8221 bp, Homo sapiens
  misc_feature (4078)..(4078): n is a, c, g, or t
  misc_feature (4135)..(4135): n is a, c, g, or t
gctgcgcagcgctggctgctggctggcctcgcggagacgccgaacggacgcggccggcgccggcttgtgggctcgccgcctgcagccatgaccctcgcagcctgtccctcggcctcggcccgggacgtctaaaatcccacacagtcgcgcgcagctgctggagagccggccgctgccccctcgtcgccgcatcacactcccgtcccgggagctgggagcagcgcgggcagccggcgcccccgtgcaaactgggggtgtctgccagagcagccccagccgctgccgctgctacccccgatgctggccatggcctggcggggcgcagggccgagcgtcccgggggcgcccgggggcgtcggtctcagtctggggttgctcctgcagttgctgctgctcctggggccggcgcggggcttcggggacgaggaagagcggcgctgcgaccccatccgcatctccatgtgccagaacctcggctacaacgtgaccaagatgcccaacctggttgggcacgagctgcagacggacgccgagctgcagctgacaactttcacaccgctcatccagtacggctgctccagccagctgcaggtgggcgcccccacccccacccctggcgggaccccttggggagggacgctccaaactaactttgcagagcccatgccaagttgatcatcctagcccgaaggagacagctctcctggaaaagtgatttccatccccacccccactttctcagggactggaagccaaaacgttgtgtaagtcatctggcctgggaaagaacccactcttacaccccgcccttccgtttttctctcttgcccacccatgtctggcccagacccctaaccccagtggagctgagggttatctctgccaaggattctggccgccactgctcggtgggcgagtgggagggagccagctgcagctaagacttggagggagtgataaggagaccatccttcaccgaacttccttctccccactatttttggggtgttattaaatgaaacactactgcacctttttctgctgaatagccccttctcacgacgtcccgcagcgttttagaggtcatgcatgaaggagtggttgggttggcttgagttctttcttatcctcacagttgaaggcacgtttaatgcttggagggtgagaagaagctgcaggaaggtggttggtatattggaagaaatttttttgcagtcattaaaaaatgtaaagcatatctaatgatagagaaaatgtttattccacagtaataagaatttgcatatacagggtgattataatcctgcaaaataaaaaatttattgggataataaaagactgacaggaaaatttttaaagtgttaacattggttatgtttgggttggtgaggctgggtgatttttagaaatttagaaaagagagaagttgtgggaaaaagtagacgttagttgtccaggcttcagaaatctggtttctggccgggcgcagtggctcacgcctgtaatcccagcactttgggaggccgaggcaggtggctcacgaggttaggagttcgagaccagcctgaccaacatggcgaaatcctgtctctactaaaagtacaaaaattagccgggcgtggtggcgtgcgcctgtaatcccagctactcaggaggctgaggcaggagaatcgcttgaacccaggaggcagaggttgcagtgagcggggattgcaccattgcactctagcctgggccacaggagcgaaactccgtatcaaaaaaaaaaagaaaagaaaagaaatctgtggttctggctgtaacttctgagagataataaacagacatacagcttacttactaggtgcatgtttttacataggtcattttaaaacttggtttgtggttttggaaagatggtggggattagacctgttgctgctaaaatatccctttggaagtttcagaactttagaactaggttataaaagcttaagaaatgatcctccagctctcagtttggaaacagcacatatcctgacatcagtggcaatttgttggagaaacagcttttgcagggatatatatttttaattacatgtatcctggggaaagcggccaagctgttttgaaggacaagactggatccctttacatgctggaaaatagttacttgtaactctagacttcatagacaacatctgtaaggagccaagcagactgtttatcaatgctggaggaattgaggacagcaactggactctcccctgctggtactgcagtttcagcgacttaacatttacattttcctattgtgcttcattattattcattgaggaaacctggccaaacaaatccctagtgaccagagacctcaatctgcatcccatccttgagtctaacagtgtctcatttgggccattttttgtttcagtatgggactagtttaaacaaatttttaagggataaattagggagaagagaatactaacaggatctacatttttttttaacttttatttttaaaatgataaagaaacggggataaaaataaaccacctaaatgagtcatattagtttctttagctttttcaaatagtttctaaaatggaaggagattgaaagccagttttttaagatttatttcaagtgttgtgcaaagagggcttatgcaattcttcagaccctatttattttatttatttatttatgtacattcttctggaaaggattactaaagccaaactaagaaaagtatgtaagtgatggattatcaggcgcccttgtttgaggtcagagtaaacagacagactcccgataggttggtttaaaagtagatacctagattgcctggaagcattcaactcagctttgtgggagcatttggtcaaacttccaagtcattgttttttttgtgtgtgttcattttgttacttttccagttcttcctttgttctgtttatgtgccaatgtgcacagagaagatcaacatccccattggcccatgcggcggcatgtgtctttcagtcaagagacgctgtgaacccgtcctgaaggaatttggatttgcctggccagagagtctgaactgcagcaaattcccaccacagaacgaccacaaccacatgtgcatggaagggccaggtgatgaagaggtgcccttacctcacaaaacccccatccagcctggggaagagtgtcactctgtgggaaccaattctgatcagtacatctgggtgaaaaggagcctgaactgtgtgctcaagtgtggctatgatgctggcttatacagccgctcagccaaggagttcactgatatctggatggctgtgtgggccagcctgtgtttcatctccactgccttcacagtactgaccttcctgatcgattcttctaggttttcctaccctgagcgccccatcatatttctcagtatgtgctataatatttatagcattgcttatattgtcaggctgactgtaggccgggaaaggatatcctgtgattttgaagaggcagcagaacctgttctcatccaagaaggacttaagaacacaggatgtgcaataattttcttgctgatgtacttttttggaatggccagctccatttggtgggttattctgacactcacttggtttttggcagcaggactcaaatggggtcatgaagccattgaaatgcacagctcttatttccacattgcagcctgggccatccccgcagtgaaaaccattgtcatcttgattatgagactggtggatgcagatgaactgactggcttgtgctatgttggaaaccaaaatctcgatgccctcaccgggttcgtggtggctcccctctttacttatttggtcattggaactttgttcattgctgcaggtttggtggccttgttcaaaattcggtcaaatcttcaaaaggatgggacaaagacagacaagttagaaagactgatggtcaagattggggtgttctcagtactgtacacagttcctgcaacgtgtgtgattgcctgttatttttatgaaatctccaactgggcactttttcggtattctgcagatgattccaacatggctgttgaaatgttgaaaanttttatgtctttgttggtgggcatcacttcaggcatgtggatttggtctgccaaaantcttcacacgtggcagaagtgttccaacagattggtgaattctggaaaggtaaagagagagaagagaggaaatggttgggtgaagcctggaaaaggcagtgagactgtggtataaggctagtcagcctccatgctttcttcattttgaaggggggaatgccagcattttggaggaaattctactaaaagttttatgcagtgaatctcagtttgaacaaactagcaacaattaagtgacccccgtcaacccactgcctcccaccccgaccccagcatcaaaaaaccaatgattttgctgcagactttggaatgatccaaaatggaaaagccagttagaggctttcaaagctgtgaaaaatcaaaacgttgatcactttagcaggttgcagcttggagcgtggaggtcctgcctagattccaggaagtccagggcgatactgttttcccctgcagggtgggatttgagctgtgagttggtaactagcagggagaaatattaacttttttaaccctttaccattttaaatactaactgggtctttcagatagcaaagcaatctataaacactggaaacgctgggttcagaaaagtgttacaagagttttatagtttggctgatgtaacataaacatcttctgtggtgcgctgtctgctgtttagaactttgtggactgcactcccaagaagtggtgttagaatctttcagtgcctttgtcataaaacagttatttgaacaaacaaaagtactgtactcacacacataaggtatccagtggatttttcttctctgtcttcctctcttaaatttcaacatctctcttcttggctgctgctgttttcttcattttatgttaatgactcaaaaaaggtatttttatagaatttttgtactgcagcatgcttaaagaggggaaaaggaagggtgattcactttctgacaatcacttaattcagaggaaaatgagatttactaagttgacttacctgacggaccccagagacctattgcattgagcagtggggacttaatatattttacttgtgtgattgcatctatgcagacgccagtctggaagagctgaaatgttaagtttcttggcaactttgcattcacacagattagctgtgtaatttttgtgtgtcaattacaattaaaagcacattgttggaccatgacatagtatactcaactgactttaaaactatggtcaacttcaacttgcattctcagaatgatagtgcctttaaaaatttttttattttttaaagcataagaatgttatcagaatctggtctacttaggacaatggagactttttcagttttataaagggaactgaggacagctaatccaactacttggtgcgtaattgtttcctagtaattggcaaaggctccttgtaagatttcactggaggcagtgtggcctggagtatttatatggtgcttaatgaatctccagaatgccagccagaagcctgattggttagtagggaataaagtgtagaccatatgaaatgaactgcaaactctaatagcccaggtcttaattgcctttagcagaggtatccaaagcttttaaaatttatgcatacgttcttcacaagggggtacccccagcagcctctcgaaaattgcacttctcttaaaactgtaactggcctttctcttaccttgccttaggccttctaatcatgagatcttggggacaaattgactatgtcacaggttgctctccttgtaactcatacctgtctgcttcagcaactgctttgcaatgacatttatttattaattcatgccttaaaaaaataggaagggaagcttttttttttctttttttttttttcaatcacactttgtggaaaaacatttccagggactcaaaattccaaaaaggtggtcaaattctggaagtaagcatttcctcttttttaaaaatttggtttgagccttatgcccatagtttgacatttccctttcttctttcctttttgtttttgtgtggttcttgagctctctgacatcaagatgcatgtaaagtcgattgtatgttttggaaggcaaagtcttggcttttgagactgaagttaagtgggcacaggtggcccctgctgctgtgcccagtctgagtaccttggctagactctaggtcaggctccaggagcatgagaattgatccccagaagaaccattttaactccatctgatactccattgcctatgaaatgtaaaatgtgaactccctgtgctgcttgtagacagttcccataactgtccacggccctggagcacgcacccaggggcagagcctgcccttactcacgctctgctctggtgtcttgggagttgtgcagggactctggcccaggcaggggaaggaagaccaggcggtaggggactggtcttgctgttagagtatagaggtttgtaatgcagttttcttcataatgtgtcagtgattgtgtgaccaaggcagcatctagcagaaagccaggcatggagtaggtgatcgatacttgtcaatgactaaataataacaataaaagagcacttgggtgaatctgggcacctgatttctgagttttgagttctggagctagtgttttgacaatgctttgggttttgacatgccttttccacaaatctcttgccttttcagggcaaagtgtatttgatcagaagtggccatttggattagtagccttagcaatgctacagggttataggcctctcctttcacattccagacaatggagagtgtttatggtttcaggaaaagaactttgtggctgaggggtcagttaccagtgaccttcaatcaactccatcacttcttaaatcggtatttgttaaaaaaatcagttattttatttattgagtgccgactgtagtaaagccctgaaatagataatctctgttcttctaactgatctaggatggggacgcacccaggtctgctgaactttactgttcctctgggaaaggagcagggacctctggaattcccatctgtttcactgtctccattccataaatctcttcctgtgtgagccaccacacccagcctgggtctctctacttttaacacatctctcatccctttcccaggattccttccaagtcagttacaggtggttttaacagaaagcatcagctctgcttcgtgacagtctctggagaaatcccttaggaagactatgagagtaggccacaaggacatgggcccacacatctgctttggctttgccggcaattcagggcttggggtattccatgtgacttgtataggtatatttgaggacagcatcttgctagagaaaaggtgagggttgtttttctttctctgaaacctacagtaaatgggtatgattgtagcttcctcagaaatcccttggcctccagagattaaacatggtgcaatggcacctctgtccaacctcctttctggtagattcctttctcctgcttcatataggccaaacctcagggcaagggaacatgggggtagagtggtgctggccagaaccatctgcttgagctacttggttgattcatatcctctttcctttatggagacccatttcctgatctctgagactgttgctgaactggcaacttacttgggcctgaaactggagaaggggtgacatttttttaatttcagagatgctttctgattttcctctcccaggtcactgtctcacctgcactctccaaactcaggttccgggaagcttgtgtgtctagatactgaattgagattctgttcagcaccttttagctctatactctctggctcccctcatcctcatggtcactgaattaaatgcttattgtattgagaaccaagatgggacctgaggacacaaagatgagctcaacagtctcagccctagaggaatagactcagggatttcaccaggtcggtgcagtatttgatttctggtgaggtgaccacagctactcaggaggctgaggcaggagaatggcgtgaacctgggaggcagagcttgcagtgagccgagattgcgccactgcactccagcctgggcgacagaggagactgtgtctcaaaaaaaaaa

SEQ ID NO: 281361 - DNA, 2969 bp, Homo sapiens
gctgcgcagcgctggctgctggctggcctcgcggagacgccgaacggacgcggccggcgccggcttgtgggctcgccgcctgcagccatgaccctcgcagcctgtccctcggcctcggcccgggacgtctaaaatcccacacagtcgcgcgcagctgctggagagccggccgctgccccctcgtcgccgcatcacactcccgtcccgggagctgggagcagcgcgggcagccggcgcccccgtgcaaactgggggtgtctgccagagcagccccagccgctgccgctgctacccccgatgctggccatggcctggcggggcgcagggccgagcgtcccgggggcgcccgggggcgtcggtctcagtctggggttgctcctgcagttgctgctgctcctggggccggcgcggggcttcggggacgaggaagagcggcgctgcgaccccatccgcatctccatgtgccagaacctcggctacaacgtgaccaagatgcccaacctggttgggcacgagctgcagacggacgccgagctgcagctgacaactttcacaccgctcatccagtacggctgctccagccagctgcaggtgggcgcccccacccccacccctggcgggaccccttggggagggacgctccaaactaactttgcagagcccatgccaagttgatcatcctagcccgaaggagacagctctcctggaaaagtgatttccatccccacccccactttctcagggactggaagccaaaacgttgtgtaagtcatctggcctgggaaagaacccactcttacaccccgcccttccgtttttctctcttgcccacccatgtctggcccagacccctaaccccagtggagctgagggttatctctgccaaggattctggccgccactgctcggtgggcgagtgggagggagccagctgcagctaagacttggagggagtgataaggagaccatccttcaccgaacttccttctccccactatttttggggtgttattaaatgaaacactactgcacctttttctgctgaatagccccttctcacgacgtcccgcagcgttttagaggtcatgcatgaaggagtggttgggttggcttgagttctttcttatcctcacagttgaaggcacgtttaatgcttggagggtgagaagaagctgcaggaaggtggttggtatattggaagaaatttttttgcagtcattaaaaaatgtaaagcatatctaatgatagagaaaatgtttattccacagtaataagaatttgcatatacagggtgattataatcctgcaaaataaaaaatttattgggataataaaagactgacaggaaaatttttaaagtgttaacattggttatgtttgggttggtgaggctgggtgatttttagaaatttagaaaagagagaagttgtgggaaaaagtagacgttagttgtccaggcttcagaaatctggtttctggccgggcgcagtggctcacgcctgtaatcccagcactttgggaggccgaggcaggtggctcacgaggttaggagttcgagaccagcctgaccaacatggcgaaatcctgtctctactaaaagtacaaaaattagccgggcgtggtggcgtgcgcctgtaatcccagctactcaggaggctgaggcaggagaatcgcttgaacccaggaggcagaggttgcagtgagcggggattgcaccattgcactctagcctgggccacaggagcgaaactccgtatcaaaaaaaaaaagaaaagaaaagaaatctgtggttctggctgtaacttctgagagataataaacagacatacagcttacttactaggtgcatgtttttacataggtcattttaaaacttggtttgtggttttggaaagatggtggggattagacctgttgctgctaaaatatccctttggaagtttcagaactttagaactaggttataaaagcttaagaaatgatcctccagctctcagtttggaaacagcacatatcctgacatcagtggcaatttgttggagaaacagcttttgcagggatatatatttttaattacatgtatcctggggaaagcggccaagctgttttgaaggacaagactggatccctttacatgctggaaaatagttacttgtaactctagacttcatagacaacatctgtaaggagccaagcagactgtttatcaatgctggaggaattgaggacagcaactggactctcccctgctggtactgcagtttcagcgacttaacatttacattttcctattgtgcttcattattattcattgaggaaacctggccaaacaaatccctagtgaccagagacctcaatctgcatcccatccttgagtctaacagtgtctcatttgggccattttttgtttcagtatgggactagtttaaacaaatttttaagggataaattagggagaagagaatactaacaggatctacatttttttttaacttttatttttaaaatgataaagaaacggggataaaaataaaccacctaaatgagtcatattagtttctttagctttttcaaatagtttctaaaatggaaggagattgaaagccagttttttaagatttatttcaagtgttgtgcaaagagggcttatgcaattcttcagaccctatttattttatttatttatttatgtacattcttctggaaaggattactaaagccaaactaagaaaagtatgtaagtgatggattatcaggcgcccttgtttgaggtcagagtaaacagacagactcccgataggttggtttaaaagtagatacctagattgcctggaagcattcaactcagctttgtgggagcatttggtcaaacttccaagtcattgttttttttgtgtgtgttcattttgttaaaccttttttttttttccccccctaaaggggggggccttacaccattttttttccct

SEQ ID NO: 281362 - DNA, 391 bp, Homo sapiens
gatccccgggctgcaggaattcggcacgagcttcgtgttgccatcatcttgttgaatcagccattttatcgaggcacgtgatcagtgttgcaacataatgaaaaagatggctactgtgccttgtgttacttaatcatacagtaagctgacctggaaatgaatgaaactattactcctaagaattacattgtatagccccacagattaaatttaattaattaattcaaaacatgttaaacgttactttcatgtactatggaaaagtacaagtaggtttacattactgatttccagaagtaagtagtttcccctttcctagtcttctgtgtatgtgatgttgttaatttcttttattgcattataaaataaaaggattatgtatttttaacta

SEQ ID NO: 281363 - DNA, 1167 bp, Homo sapiens
aaccctcctgggggggggggtgcccagagggcttccggaagtcccaggtttattctttcgggtcacagacagcagaaactaaaaagagggattaccctttctgtccagtcgcaagatggcgaccgagcctggtgggactccgaggggccgcaggccacctcctcttcccaatggcccgtgcgccggcggcgacggcaagcgggagggaggcggggccggcgaaggaaggaggggcggagcgcggcgccctcccgcgcgtcttggccccgccccacgtccccgcgtcccggcctggagccctcgcccggccgggcggcgcgcgctgcctgccgggatactcggcccgcccagccagtcctcccgtcttgcgccgcggccgcgagatccgtgtgtctcccaagatggtggcgctgggctcggggtgactacaggagacgacggggccttttcccttcgccaggacccgacacaccaggcttcgctcgctcgcgcacccctccgccgcgtagccatccgccagcgcgggcgcccgccatccgccgcctacttacgcttcacctctgccgaccctgtgctgcgctctgtgctgcagtgtgctgtgctgtgctgcactcacttctgtgcatacctcctcgtgcaatatgctctgctgtgcactgtatgcccactgtgcatgtgatgtgtagcccctcatgccacccctgtgttgtgtggacatgtgcatgctgtgctgtgctttgtgtctgactgaactgcctgtggcatttctgtgctgtgcccgctgtgcttgcatcccctttcacctgtgccctctgattttccctgtgacttaagtgtgcaatgctgctggtgatccctgcagttgatgccccctgtgtctgtgttggctgtgcatgctgaaaatgatgaaactgactgtggctgtgttgtgctgtggcctgtgatggtgcggccgtggctgaaggggccgacttaccgaacccatgcttgatgagctgtgccgcacgaagcccccagtgcgcaggtgtgagctgaacagaacgcaggctttaaacaaaattctgtaaacgcagcccttgacttttatagggaaatttcacacaagactccctcagacagttagggccgcaaacatactgagctaatttaaaggccttacgctcccag

SEQ ID NO: 281364 - DNA, 10297 bp, Homo sapiens
  misc_feature (6298)..(6298): n is a, c, g, or t
  misc_feature (9478)..(9478): n is a, c, g, or t
aaccctcctgggggggggggtgcccagagggcttccggaagtcccaggtttattctttcgggtcacagacagcagaaactaaaaagagggattaccctttctgtccagtcgcaagatggcgaccgagcctggtgggactccgaggggccgcaggccacctcctcttcccaatggcccgtgcgccggcggcgacggcaagcgggagggaggcggggccggcgaaggaaggaggggcggagcgcggcgccctcccgcgcgtcttggccccgccccacgtccccgcgtcccggcctggagccctcgcccggccgggcggcgcgcgctgcctgccgggatactcggcccgcccagccagtcctcccgtcttgcgccgcggccgcgagatccgtgtgtctcccaagatggtggcgctgggctcggggtgactacaggagacgacggggccttttcccttcgccaggacccgacacaccaggcttcgctcgctcgcgcacccctccgccgcgtagccatccgccagcgcgggcgcccgccatccgccgcctacttacgcttcacctctgccgacccggcgcgctcggctgcgggcggcggcgcctccttcggctcctcctcggaatagctcgcggcctgtagcccctggcaggagggcccctcagccccccggtgtggacaggcagcggcggctggcgacgaacgccgggatttcggcggccccggcgctccctttcccggcctcgttttccggataaggaagcgcgggtcccgcatgagccccggcggtggcggcagcgaaagagaacgaggcggtggcgggcggaggcggcgggcgagggcgactacgaccagtgaggcggccgccgcagcccaggcgcgggggcgacgacaggttaaaaatctgtaagagcctgattttagaattcaccagctcctcagaagtttggcgaaatatgagttattaagcctacgctcagatcaaggtagcagctagactggtgtgacaacctgtttttaatcagtgactcaaagctgtgatcaccctgatgtcaccgaatggccacagcttgtaaaagagagttacagtggaggtaaaaggagtggcttgcaggatggagaagctgcaccagtgttattggaagtgagccaccatttgaatttgctagctcatgctgcagtattcagattatgccagcaggtttattttttgttttgcaagccagctctgcctccttacagtatgacatctgatgctggagggtcgcactttcaaaaatgagtcagctggtacatggggttatcatcaatttttagctcttctgtctgggagatacaagtttggaagcaatcttggggtacttacccacaaggctggtggagaccagatcaggagaacctcagtctgacgacattgaagctagccgaatgaagcgagcagctgcaaagcatctaatagaacgctactaccaccagttaactgagggctgtggaaatgaagcctgcacgaatgagttttgtgcttcctgtccaacttttcttcgtatggataataatgcagcagctattaaagccctcgagctttataagattaatgcaaaactctgtgatcctcatccctccaagaaaggagcaagctcagcttaccttgagaactcgaaaggtgcccccaacaactcctgctctgagataaaaatgaacaagaaaggcgctagaattgattttaaagatgtgacttacttaacagaagagaaggtatatgaaattcttgaattatgtagagaaagagaggattattcccctttaatccgtgttattggaagagttttttctagtgctgaggcattggtacagagcttccggaaagttaaacaacacaccaaggaagaactgaaatctcttcaagcaaaagatgaagacaaagatgaagatgaaaaggaaaaagctgcatgttctgctgctgctatggaagaagactcagaagcatcttcctcaaggataggtgatagctcacagggagacaacaatttgcaaaaattaggccctgatgatgtgtctgtggatattgatgccattagaagggtctacaccagattgctctctaatgaaaaaattgaaactgcctttctcaatgcacttgtatatttgtcacctaacgtggaatgtgacttgacgtatcacaatgtatactctcgagatcctaattatctgaatttgttcattatcgtaatggagaatagaaatctccacagtcctgaatatctggaaatggctttgccattattttgcaaagcgatgagcaagctaccccttgcagcccaaggaaaactgatcagactgtggtctaaatacaatgcagaccagattcggagaatgatggagacatttcagcaacttattacttataaagtcataagcaatgaatttaacagtcgaaatctagtgaatgatgatgatgccattgttgctgcttcgaagtgcttgaaaatggtttactatgcaaatgtagtgggaggggaagtggacacaaatcacaatgaagaagatgatgaagagcccatccctgagtccagcgagctgacacttcaggaacttttgggagaagaaagaagaaacaagaaaggtcctcgagtggaccccctggaaactgaacttggtgttaaaaccctggattgtcgaaaaccacttatcccttttgaagagtttattaatgaaccactgaatgaggttctagaaatggataaagattatacttttttcaaagtagaaacagagaacaaattctcttttatgacatgtccctttatattgaatgctgtcacaaagaatttgggattatattatgacaatagaattcgcatgtacagtgaacgaagaatcactgttctctacagcttagttcaaggacagcagttgaatccatatttgagactcaaagttagacgtgaccatatcatagatgatgcacttgtccggctagagatgatcgctatggaaaatcctgcagacttgaagaagcagttgtatgtggaatttgaaggagaacaaggagttgatgagggaggtgtttccaaagaattttttcagctggttgtggaggaaatcttcaatccagatattggtatgttcacatacgatgaatctacaaaattgttttggtttaatccatcttcttttgaaactgagggtcagtttactctgattggcatagtactgggtctggctatttacaataactgtatactggatgtacattttcccatggttgtctacaggaagctaatggggaaaaaaggaacttttcgtgacttgggagactctcacccagttctatatcagagtttaaaagatttattggagtatgaagggaatgtggaagatgacatgatgatcactttccagatatcacagacagatctttttggtaacccaatgatgtatgatctaaaggaaaatggtgataaaattccaattacaaatgaaaacaggaaggaatttgtcaatctttattctgactacattctcaataaatcagtagaaaaacagttcaaggcttttcggagaggttttcatatggtgaccaatgaatctcccttaaagtacttattcagaccagaagaaattgaattgcttatatgtggaagccggaatctagatttccaagcactagaagaaactacagaatatgacggtggctataccagggactctgttctgattagggagttctgggaaatcgttcattcatttacagatgaacagaaaagactcttcttgcagtttacaacgggcacagacagagcacctgtgggaggactaggaaaattaaagatgattatagccaaaaatggcccagacacagaaaggttacctacatctcatacttgctttaatgtgcttttacttccggaatactcaagcaaagaaaaacttaaagagagattgttgaaggccatcacgtatgccaaaggatttggcatgctgtaaaacaaaacaaaacaaaataaaacaaaaaaaaggaaggaaaaaaaaagaaaaaatttaaaaaattttaaaaatataacgagggataaatttttggtggtgatagtgtcccagtacaaaaaggctgtaagatagtcaaccacagtagtcacctatgtctgtgcctcccttctttattggggacatgtgggctggaacagcagatttcagctacatatatgaacaaatcctttattattattataattatttttttgcgtgaaagtgttacatattctttcacttgtatgtacagagaggtttttctgaatatttattttaagggttaaatcacttttgcttgtgtttattactgcttgaggttgagccttttgagtatttaaaaaatatataccaacagaactactctcccaaggaaaatattgccaccatttgtagaccacgtaaccttcaagtatgtgctacttttttgtccctgtatctaactcaaatcaggaactgtattttttttaatgatttgcttttgaaacttgaagtcttgaaaacagtgtgatgcaattactgctgttctagcccccaaagagttttctgtgcaaaatcttgagaatcaatcaataaagaaagatggaaggaagggagaaattggaatgttttaactgcagccctcagaactttagtaacagcacaacaaattaaaaacaaaaacaactcatgccacagtatgtcgtcttcatgtgtcttgcaatgaactgtttcagtagccaatcctctttcttagtatatgaaaggacagggattttgttcttgttgttctcgttgttgttttaagtttactggggaaagtgcatttggccaaatgaaatggtagtcaagcctattgcaacaaagttaggaagtttgttgtttgtttattataaacaaaaagcatgtgaaagtgcacttaagatagagtttttattaattacttacttattacctagattttaaatagacaatccaaagtctccccttcgtgttgccatcatcttgttgaatcagccattttatcgaggcacgtgatcagtgttgcaacataatgaaaaagatggctactgtgccttgtgttacttaatcatacagtaagctgacctggaaatgaatgaaactattactcctaagaattacattgtatagccccacagattaaatttaattaattaattcaaaacatgttaaacgttactttcatgtactatggaaaagtacaagtaggtttacattactgatttccagaagtaagtagtttcccctttcctagtcttctgtgtatgtgatgttgttaatttcttttattgcattataaaataaaaggattatgtatttttaactaaggtgagacattgatatatccttttgctacaagctatagctaatgtgctgagcttgtgccttggtgattgattgattgattgactgattgttttaactgattactgtagatcaacctgatgatttgtttgtttgaaattggcaggaaaaatgcagctttcaaatcattggggggagaaaaaggatgtctttcaggattattttaattaatttttttcataattgagacagaactgtttgttatgtaccataatgctaaataaaactgtggcacttttcaccataatttaatttagtggaaaaagaagacaatgctttccatattgtgataaggtaacatggggtttttctgggccagcctttagaacactgttagggtacatacgctaccttgatgaaagggaccttcgtgcaactgtagtcatcttaaaggcttctcatccactgtgcttcttaatgtgtaattaaagtgaggagaaattaaatactctgagggcgttttatataataaattcgtgaagaaatgtgtgctcttcagttctcaagttttattattatggtatttattaaagttctacaattgtaataacgtatccatatgacaagttttaaagtggtaattgaaataggttatcagatatagagttgttcacatcaagtagacttttaacagagtcagaatgaacctacccttaaaattttagagaaaaaaaatcgtcggttgcacagaatagctgctctagcttgcttaattatgccgggcatgttgtcactcctcttacttttgctgccttttcattactatttaatggaatgtccctgaacaataaggaagagcaaaacatagacattttgactacagtggatacttcctctaccccaaatgttatgttataaaagtactttttttgcccaggtactctattatatattttggttttctttgaattanacctcaatctccaggaagctctggagggaaaaaaaggaaccataaactaaagtaactggttttccaaataaatgtaaacttttttaaccttttattattatagaacatttcaaacatacataaaacatgaaaacagcctgcagccaaacttttctggaccttggcagctccagcaaatgagctggtcatcctaaccctggtttcctgagacaactacttttggggatgcttgcttgtatagggagatgatagatagatagatacatatcaaaaagaaacttgaaaaaggcttcgaacagaacttgccgatgttactcatccctcctcggtacagacattctgttagaacagatggttgtaatggggcagcatcactccctattcccattaaaaacatgaccattctgagatttcaggccccttcgaggaatttttctcaagaattccatacaaactgtcagaggaagaaatgtcgtcccaagactagtccctgtgtagtcttgatccctttacctgcttactgtaattttttttctctgactttccgccagtgtctaagggccatctgtacccctcccacccttccatgagccactgtataatccaaaaacacaccttccatttgctccctcacttgtctccttttacctcaacagtgttagtgtgtaaagaattgcctggggagggtagagggttttacaagtacagagtcccaagtcttttctcccctccccgttagtgggttggcatttattaataggcactgcaagattttgatgcaggtgtggggtagatatcactgtgaaaggctactaatgcatggtagtttcaccgaaagtacagtcttcaaggatccttataatctcctcattgccaaaatcagtaacatctataaccttgacaacaccctagcttgggctgttgcttctctggctacttgtttttccatcccagtttacccagattttagatggatactcctccaattctgcttaaagtccttacctgttcttgcccagttccctctagtcaacctcagtcactcccaaagattcttccccaatcccatatcttttgctcagacctctgtctctgggatttctttgttacctcatagtcagtagtcctaaaaacaaaattcttcatcttgcatctctatcgaccgaccattctttgtttctttttaagaaatgtaaccttcaccccaatcatcaaaatctctcattcctcaattgtcacaggttgtcacttctttccccctaaacctctcccatcattccttccttctttatactgcccttacaggtcctgatcctctgactcacccggacattcttagcagctgcctaatttcactccctgactctcatctccctcttccaatccttttcattgtgctagaacactatcttgctaattttaatatcctctgcattcagtgcctccacagattgccccctcactgacctttccaatttggccttgtgttacacactttcctcgctgcattcctacccagcatcttcacttgtcatatttctcaaatactcttcatgaccagatatttaaagtacctcatccatgaagacttcatcaacccccaaagtgcctccaatgcttccgtggtagcacagcataatggggtacatttcttagttgaacagtgaggagtcactgggattcttacagagtgtcttagggtctcctcttgatactctttccacatttcagttaaggaattttcttacatctttttttcttctaataacctttgcctggagtgtaagtaaattcatgatagagactgtcatttttaaaaaaaaaaaacaaaccattttgcctttcacatgttattacctccatctttctgttatcttgtcagtgttgccacctaaatgattgaaaatgaccgagcatgcagtagaatgtagtgaagtttcctatttcatccattttttgcataagtgcattggtatctgtatatccatctgcccaagcaccagttgttgaaaagactattatttccccatgaatggtcctggtacccttgtcaaagaacagttgaccataaatataagactttctggattctcagtcttactccattgccctatatgtctgtcgttataccagcaccgcactgtcttgattgctgtagcttggtagtaagtttagatttgggatgtgcaagtcctccattttttttttttttctccccaaaatcattttgtctgttttgggtcccttgcattgcatatgaatttttatatgatcattgtgtcaattcctgcaaaacagctgggatcttgatagggatttagttgaattggtagataaatttgagaaataactgctattttaatggtgttaggttttctgttccatgactgtgggatgtctttgcatttgcttaggtctttatttcagtgatgttttagagatttcagtgtgcaagtcttgacgtctttaatttttttctaagtattttactgatgccactttaattatatgattattttctaatttttatttttgtattcatcactggtgttagaaataaaattaatttttgtatattgattttgtatattgtagcttttctaaaattctttttttgtcacttagtattttttgcatatgagatcatgcatctgtgaacagaaatacttttacttcttcctttccagtctagattcctattatttcattttcttgccttagtgtgctggctagcacctccagtacaatattggatagaagtgacaagagcagacatctttttcttgttcctgattttaaggggaaagcattcagtctttcaccattgagtatgatgttagctagctgtgggtttgcttcaagttgaggaaattcttttattaaacctagtttactgagtgttttttaatcaaaaaaaaaaaaggaggggctgtgggttttgttaaatgcttcttctgtatcaagattttcatgttgttttgtcctttattaatatgttgtattaatggacttttgtatattgaattaactttgcattcctgggataatctcagttgtccatgctacataaaccttgttctatgctgctggatttggtttgctagtattttgtttagaatgtttgcatctatattcataaggaatattggtctgtagttttcatattatatatctgtccantttggggatgagagtcatactcctgacagaatgaattgggagctttccctgttcttaaacctactgaggtattttttaagtgaactacttggagaccttcacctgtgatcttcagatgctgggggacacagggatggtacctgactctgaaaaggctctcagggtaagacgtgtctgaactggcctgtggcagttaactaaagagtactcctaccaataatggagtcaagatgtatgtttcccataggccacgctggtcactgaaagagatgggctatgagccatcttgaaaactaccctgcacaaatggactgccggcctggagccaggcaccctgcagctgagtgccatataatgttgaagctgttgagggaggagaggttggaagctgccagcttagagaatctcagctgtggtttcccagcagggtgtattccccaggaaagaaagtcattcccccacccctggctcaaagtaataattaacagtgactgggtaaggcaggatctttttttcctaattccctcccctccagaaagggcagcaacagctcttgaatgggaaagaaggtggagggaggaaaagaaaaaccaattgccccaacactgctgtctttaagcttcccacccaaagacctcagtaagaggcagaattatgttttcaattaagagagagtttggcctcttggtgtttcaaaagtgtaggctttttaatacctagagaaactgatgatttgttgattaccaaaaagggaccagaaaagctacatagcctgagatttcatccccagaaaaacgaatccagagagcagacttgcaa

SEQ ID NO: 281365 - DNA, 10184 bp, Homo sapiens
  misc_feature (6185)..(6185): n is a, c, g, or t
  misc_feature (9365)..(9365): n is a, c, g, or t
aaccctcctgggggggggggtgcccagagggcttccggaagtcccaggtttattctttcgggtcacagacagcagaaactaaaaagagggattaccctttctgtccagtcgcaagatggcgaccgagcctggtgggactccgaggggccgcaggccacctcctcttcccaatggcccgtgcgccggcggcgacggcaagcgggagggaggcggggccggcgaaggaaggaggggcggagcgcggcgccctcccgcgcgtcttggccccgccccacgtccccgcgtcccggcctggagccctcgcccggccgggcggcgcgcgctgcctgccgggatactcggcccgcccagccagtcctcccgtcttgcgccgcggccgcgagatccgtgtgtctcccaagatggtggcgctgggctcggggtgactacaggagacgacggggccttttcccttcgccaggacccgacacaccaggcttcgctcgctcgcgcacccctccgccgcgtagccatccgccagcgcgggcgcccgccatccgccgcctacttacgcttcacctctgccgacccggcgcgctcggctgcgggcggcggcgcctccttcggctcctcctcggaatagctcgcggcctgtagcccctggcaggagggcccctcagccccccggtgtggacaggcagcggcggctggcgacgaacgccgggatttcggcggccccggcgctccctttcccggcctcgttttccggataaggaagcgcgggtcccgcatgagccccggcggtggcggcagcgaaagagaacgaggcggtggcgggcggaggcggcgggcgagggcgactacgaccagtgaggcggccgccgcagcccaggcgcgggggcgacgacaggttaaaaatctgtaagagcctgattttagaattcaccagctcctcagaagtttggcgaaatatgagttattaagcctacgctcagatcaaggtagcagctagactggtgtgacaacctgtttttaatcagtgactcaaagctgtgatcaccctgatgtcaccgaatggccacagcttgtaaaagtgccagcaggtttattttttgttttgcaagccagctctgcctccttacagtatgacatctgatgctggagggtcgcactttcaaaaatgagtcagctggtacatggggttatcatcaatttttagctcttctgtctgggagatacaagtttggaagcaatcttggggtacttacccacaaggctggtggagaccagatcaggagaacctcagtctgacgacattgaagctagccgaatgaagcgagcagctgcaaagcatctaatagaacgctactaccaccagttaactgagggctgtggaaatgaagcctgcacgaatgagttttgtgcttcctgtccaacttttcttcgtatggataataatgcagcagctattaaagccctcgagctttataagattaatgcaaaactctgtgatcctcatccctccaagaaaggagcaagctcagcttaccttgagaactcgaaaggtgcccccaacaactcctgctctgagataaaaatgaacaagaaaggcgctagaattgattttaaagatgtgacttacttaacagaagagaaggtatatgaaattcttgaattatgtagagaaagagaggattattcccctttaatccgtgttattggaagagttttttctagtgctgaggcattggtacagagcttccggaaagttaaacaacacaccaaggaagaactgaaatctcttcaagcaaaagatgaagacaaagatgaagatgaaaaggaaaaagctgcatgttctgctgctgctatggaagaagactcagaagcatcttcctcaaggataggtgatagctcacagggagacaacaatttgcaaaaattaggccctgatgatgtgtctgtggatattgatgccattagaagggtctacaccagattgctctctaatgaaaaaattgaaactgcctttctcaatgcacttgtatatttgtcacctaacgtggaatgtgacttgacgtatcacaatgtatactctcgagatcctaattatctgaatttgttcattatcgtaatggagaatagaaatctccacagtcctgaatatctggaaatggctttgccattattttgcaaagcgatgagcaagctaccccttgcagcccaaggaaaactgatcagactgtggtctaaatacaatgcagaccagattcggagaatgatggagacatttcagcaacttattacttataaagtcataagcaatgaatttaacagtcgaaatctagtgaatgatgatgatgccattgttgctgcttcgaagtgcttgaaaatggtttactatgcaaatgtagtgggaggggaagtggacacaaatcacaatgaagaagatgatgaagagcccatccctgagtccagcgagctgacacttcaggaacttttgggagaagaaagaagaaacaagaaaggtcctcgagtggaccccctggaaactgaacttggtgttaaaaccctggattgtcgaaaaccacttatcccttttgaagagtttattaatgaaccactgaatgaggttctagaaatggataaagattatacttttttcaaagtagaaacagagaacaaattctcttttatgacatgtccctttatattgaatgctgtcacaaagaatttgggattatattatgacaatagaattcgcatgtacagtgaacgaagaatcactgttctctacagcttagttcaaggacagcagttgaatccatatttgagactcaaagttagacgtgaccatatcatagatgatgcacttgtccggctagagatgatcgctatggaaaatcctgcagacttgaagaagcagttgtatgtggaatttgaaggagaacaaggagttgatgagggaggtgtttccaaagaattttttcagctggttgtggaggaaatcttcaatccagatattggtatgttcacatacgatgaatctacaaaattgttttggtttaatccatcttcttttgaaactgagggtcagtttactctgattggcatagtactgggtctggctatttacaataactgtatactggatgtacattttcccatggttgtctacaggaagctaatggggaaaaaaggaacttttcgtgacttgggagactctcacccagttctatatcagagtttaaaagatttattggagtatgaagggaatgtggaagatgacatgatgatcactttccagatatcacagacagatctttttggtaacccaatgatgtatgatctaaaggaaaatggtgataaaattccaattacaaatgaaaacaggaaggaatttgtcaatctttattctgactacattctcaataaatcagtagaaaaacagttcaaggcttttcggagaggttttcatatggtgaccaatgaatctcccttaaagtacttattcagaccagaagaaattgaattgcttatatgtggaagccggaatctagatttccaagcactagaagaaactacagaatatgacggtggctataccagggactctgttctgattagggagttctgggaaatcgttcattcatttacagatgaacagaaaagactcttcttgcagtttacaacgggcacagacagagcacctgtgggaggactaggaaaattaaagatgattatagccaaaaatggcccagacacagaaaggttacctacatctcatacttgctttaatgtgcttttacttccggaatactcaagcaaagaaaaacttaaagagagattgttgaaggccatcacgtatgccaaaggatttggcatgctgtaaaacaaaacaaaacaaaataaaacaaaaaaaaggaaggaaaaaaaaagaaaaaatttaaaaaattttaaaaatataacgagggataaatttttggtggtgatagtgtcccagtacaaaaaggctgtaagatagtcaaccacagtagtcacctatgtctgtgcctcccttctttattggggacatgtgggctggaacagcagatttcagctacatatatgaacaaatcctttattattattataattatttttttgcgtgaaagtgttacatattctttcacttgtatgtacagagaggtttttctgaatatttattttaagggttaaatcacttttgcttgtgtttattactgcttgaggttgagccttttgagtatttaaaaaatatataccaacagaactactctcccaaggaaaatattgccaccatttgtagaccacgtaaccttcaagtatgtgctacttttttgtccctgtatctaactcaaatcaggaactgtattttttttaatgatttgcttttgaaacttgaagtcttgaaaacagtgtgatgcaattactgctgttctagcccccaaagagttttctgtgcaaaatcttgagaatcaatcaataaagaaagatggaaggaagggagaaattggaatgttttaactgcagccctcagaactttagtaacagcacaacaaattaaaaacaaaaacaactcatgccacagtatgtcgtcttcatgtgtcttgcaatgaactgtttcagtagccaatcctctttcttagtatatgaaaggacagggattttgttcttgttgttctcgttgttgttttaagtttactggggaaagtgcatttggccaaatgaaatggtagtcaagcctattgcaacaaagttaggaagtttgttgtttgtttattataaacaaaaagcatgtgaaagtgcacttaagatagagtttttattaattacttacttattacctagattttaaatagacaatccaaagtctccccttcgtgttgccatcatcttgttgaatcagccattttatcgaggcacgtgatcagtgttgcaacataatgaaaaagatggctactgtgccttgtgttacttaatcatacagtaagctgacctggaaatgaatgaaactattactcctaagaattacattgtatagccccacagattaaatttaattaattaattcaaaacatgttaaacgttactttcatgtactatggaaaagtacaagtaggtttacattactgatttccagaagtaagtagtttcccctttcctagtcttctgtgtatgtgatgttgttaatttcttttattgcattataaaataaaaggattatgtatttttaactaaggtgagacattgatatatccttttgctacaagctatagctaatgtgctgagcttgtgccttggtgattgattgattgattgactgattgttttaactgattactgtagatcaacctgatgatttgtttgtttgaaattggcaggaaaaatgcagctttcaaatcattggggggagaaaaaggatgtctttcaggattattttaattaatttttttcataattgagacagaactgtttgttatgtaccataatgctaaataaaactgtggcacttttcaccataatttaatttagtggaaaaagaagacaatgctttccatattgtgataaggtaacatggggtttttctgggccagcctttagaacactgttagggtacatacgctaccttgatgaaagggaccttcgtgcaactgtagtcatcttaaaggcttctcatccactgtgcttcttaatgtgtaattaaagtgaggagaaattaaatactctgagggcgttttatataataaattcgtgaagaaatgtgtgctcttcagttctcaagttttattattatggtatttattaaagttctacaattgtaataacgtatccatatgacaagttttaaagtggtaattgaaataggttatcagatatagagttgttcacatcaagtagacttttaacagagtcagaatgaacctacccttaaaattttagagaaaaaaaatcgtcggttgcacagaatagctgctctagcttgcttaattatgccgggcatgttgtcactcctcttacttttgctgccttttcattactatttaatggaatgtccctgaacaataaggaagagcaaaacatagacattttgactacagtggatacttcctctaccccaaatgttatgttataaaagtactttttttgcccaggtactctattatatattttggttttctttgaattanacctcaatctccaggaagctctggagggaaaaaaaggaaccataaactaaagtaactggttttccaaataaatgtaaacttttttaaccttttattattatagaacatttcaaacatacataaaacatgaaaacagcctgcagccaaacttttctggaccttggcagctccagcaaatgagctggtcatcctaaccctggtttcctgagacaactacttttggggatgcttgcttgtatagggagatgatagatagatagatacatatcaaaaagaaacttgaaaaaggcttcgaacagaacttgccgatgttactcatccctcctcggtacagacattctgttagaacagatggttgtaatggggcagcatcactccctattcccattaaaaacatgaccattctgagatttcaggccccttcgaggaatttttctcaagaattccatacaaactgtcagaggaagaaatgtcgtcccaagactagtccctgtgtagtcttgatccctttacctgcttactgtaattttttttctctgactttccgccagtgtctaagggccatctgtacccctcccacccttccatgagccactgtataatccaaaaacacaccttccatttgctccctcacttgtctccttttacctcaacagtgttagtgtgtaaagaattgcctggggagggtagagggttttacaagtacagagtcccaagtcttttctcccctccccgttagtgggttggcatttattaataggcactgcaagattttgatgcaggtgtggggtagatatcactgtgaaaggctactaatgcatggtagtttcaccgaaagtacagtcttcaaggatccttataatctcctcattgccaaaatcagtaacatctataaccttgacaacaccctagcttgggctgttgcttctctggctacttgtttttccatcccagtttacccagattttagatggatactcctccaattctgcttaaagtccttacctgttcttgcccagttccctctagtcaacctcagtcactcccaaagattcttccccaatcccatatcttttgctcagacctctgtctctgggatttctttgttacctcatagtcagtagtcctaaaaacaaaattcttcatcttgcatctctatcgaccgaccattctttgtttctttttaagaaatgtaaccttcaccccaatcatcaaaatctctcattcctcaattgtcacaggttgtcacttctttccccctaaacctctcccatcattccttccttctttatactgcccttacaggtcctgatcctctgactcacccggacattcttagcagctgcctaatttcactccctgactctcatctccctcttccaatccttttcattgtgctagaacactatcttgctaattttaatatcctctgcattcagtgcctccacagattgccccctcactgacctttccaatttggccttgtgttacacactttcctcgctgcattcctacccagcatcttcacttgtcatatttctcaaatactcttcatgaccagatatttaaagtacctcatccatgaagacttcatcaacccccaaagtgcctccaatgcttccgtggtagcacagcataatggggtacatttcttagttgaacagtgaggagtcactgggattcttacagagtgtcttagggtctcctcttgatactctttccacatttcagttaaggaattttcttacatctttttttcttctaataacctttgcctggagtgtaagtaaattcatgatagagactgtcatttttaaaaaaaaaaaacaaaccattttgcctttcacatgttattacctccatctttctgttatcttgtcagtgttgccacctaaatgattgaaaatgaccgagcatgcagtagaatgtagtgaagtttcctatttcatccattttttgcataagtgcattggtatctgtatatccatctgcccaagcaccagttgttgaaaagactattatttccccatgaatggtcctggtacccttgtcaaagaacagttgaccataaatataagactttctggattctcagtcttactccattgccctatatgtctgtcgttataccagcaccgcactgtcttgattgctgtagcttggtagtaagtttagatttgggatgtgcaagtcctccattttttttttttttctccccaaaatcattttgtctgttttgggtcccttgcattgcatatgaatttttatatgatcattgtgtcaattcctgcaaaacagctgggatcttgatagggatttagttgaattggtagataaatttgagaaataactgctattttaatggtgttaggttttctgttccatgactgtgggatgtctttgcatttgcttaggtctttatttcagtgatgttttagagatttcagtgtgcaagtcttgacgtctttaatttttttctaagtattttactgatgccactttaattatatgattattttctaatttttatttttgtattcatcactggtgttagaaataaaattaatttttgtatattgattttgtatattgtagcttttctaaaattctttttttgtcacttagtattttttgcatatgagatcatgcatctgtgaacagaaatacttttacttcttcctttccagtctagattcctattatttcattttcttgccttagtgtgctggctagcacctccagtacaatattggatagaagtgacaagagcagacatctttttcttgttcctgattttaaggggaaagcattcagtctttcaccattgagtatgatgttagctagctgtgggtttgcttcaagttgaggaaattcttttattaaacctagtttactgagtgttttttaatcaaaaaaaaaaaaggaggggctgtgggttttgttaaatgcttcttctgtatcaagattttcatgttgttttgtcctttattaatatgttgtattaatggacttttgtatattgaattaactttgcattcctgggataatctcagttgtccatgctacataaaccttgttctatgctgctggatttggtttgctagtattttgtttagaatgtttgcatctatattcataaggaatattggtctgtagttttcatattatatatctgtccantttggggatgagagtcatactcctgacagaatgaattgggagctttccctgttcttaaacctactgaggtattttttaagtgaactacttggagaccttcacctgtgatcttcagatgctgggggacacagggatggtacctgactctgaaaaggctctcagggtaagacgtgtctgaactggcctgtggcagttaactaaagagtactcctaccaataatggagtcaagatgtatgtttcccataggccacgctggtcactgaaagagatgggctatgagccatcttgaaaactaccctgcacaaatggactgccggcctggagccaggcaccctgcagctgagtgccatataatgttgaagctgttgagggaggagaggttggaagctgccagcttagagaatctcagctgtggtttcccagcagggtgtattccccaggaaagaaagtcattcccccacccctggctcaaagtaataattaacagtgactgggtaaggcaggatctttttttcctaattccctcccctccagaaagggcagcaacagctcttgaatgggaaagaaggtggagggaggaaaagaaaaaccaattgccccaacactgctgtctttaagcttcccacccaaagacctcagtaagaggcagaattatgttttcaattaagagagagtttggcctcttggtgtttcaaaagtgtaggctttttaatacctagagaaactgatgatttgttgattaccaaaaagggaccagaaaagctacatagcctgagatttcatccccagaaaaacgaatccagagagcagacttgcaa

SEQ ID NO: 281366 - DNA, 10124 bp, Homo sapiens
  misc_feature (6125)..(6125): n is a, c, g, or t
  misc_feature (9305)..(9305): n is a, c, g, or t
aaccctcctgggggggggggtgcccagagggcttccggaagtcccaggtttattctttcgggtcacagacagcagaaactaaaaagagggattaccctttctgtccagtcgcaagatggcgaccgagcctggtgggactccgaggggccgcaggccacctcctcttcccaatggcccgtgcgccggcggcgacggcaagcgggagggaggcggggccggcgaaggaaggaggggcggagcgcggcgccctcccgcgcgtcttggccccgccccacgtccccgcgtcccggcctggagccctcgcccggccgggcggcgcgcgctgcctgccgggatactcggcccgcccagccagtcctcccgtcttgcgccgcggccgcgagatccgtgtgtctcccaagatggtggcgctgggctcggggtgactacaggagacgacggggccttttcccttcgccaggacccgacacaccaggcttcgctcgctcgcgcacccctccgccgcgtagccatccgccagcgcgggcgcccgccatccgccgcctacttacgcttcacctctgccgacccggcgcgctcggctgcgggcggcggcgcctccttcggctcctcctcggaatagctcgcggcctgtagcccctggcaggagggcccctcagccccccggtgtggacaggcagcggcggctggcgacgaacgccgggatttcggcggccccggcgctccctttcccggcctcgttttccggataaggaagcgcgggtcccgcatgagccccggcggtggcggcagcgaaagagaacgaggcggtggcgggcggaggcggcgggcgagggcgactacgaccagtgaggcggccgccgcagcccaggcgcgggggcgacgacaggttaaaaatctgtaagagcctgattttagaattcaccagctcctcagaagtttggcgaaatatgagttattaagcctacgctcagatcaaggtagcagctagactggtgtgacaacctgtttttaatcagtgactcaaagctgtgatcaccctgatgtcaccgaatggccacagcttgtaaaagagagttacagtggaggtaaaaggagtggcttgcaggatggagaagctgcaccagtgttattggaactcttctgtctgggagatacaagtttggaagcaatcttggggtacttacccacaaggctggtggagaccagatcaggagaacctcagtctgacgacattgaagctagccgaatgaagcgagcagctgcaaagcatctaatagaacgctactaccaccagttaactgagggctgtggaaatgaagcctgcacgaatgagttttgtgcttcctgtccaacttttcttcgtatggataataatgcagcagctattaaagccctcgagctttataagattaatgcaaaactctgtgatcctcatccctccaagaaaggagcaagctcagcttaccttgagaactcgaaaggtgcccccaacaactcctgctctgagataaaaatgaacaagaaaggcgctagaattgattttaaagatgtgacttacttaacagaagagaaggtatatgaaattcttgaattatgtagagaaagagaggattattcccctttaatccgtgttattggaagagttttttctagtgctgaggcattggtacagagcttccggaaagttaaacaacacaccaaggaagaactgaaatctcttcaagcaaaagatgaagacaaagatgaagatgaaaaggaaaaagctgcatgttctgctgctgctatggaagaagactcagaagcatcttcctcaaggataggtgatagctcacagggagacaacaatttgcaaaaattaggccctgatgatgtgtctgtggatattgatgccattagaagggtctacaccagattgctctctaatgaaaaaattgaaactgcctttctcaatgcacttgtatatttgtcacctaacgtggaatgtgacttgacgtatcacaatgtatactctcgagatcctaattatctgaatttgttcattatcgtaatggagaatagaaatctccacagtcctgaatatctggaaatggctttgccattattttgcaaagcgatgagcaagctaccccttgcagcccaaggaaaactgatcagactgtggtctaaatacaatgcagaccagattcggagaatgatggagacatttcagcaacttattacttataaagtcataagcaatgaatttaacagtcgaaatctagtgaatgatgatgatgccattgttgctgcttcgaagtgcttgaaaatggtttactatgcaaatgtagtgggaggggaagtggacacaaatcacaatgaagaagatgatgaagagcccatccctgagtccagcgagctgacacttcaggaacttttgggagaagaaagaagaaacaagaaaggtcctcgagtggaccccctggaaactgaacttggtgttaaaaccctggattgtcgaaaaccacttatcccttttgaagagtttattaatgaaccactgaatgaggttctagaaatggataaagattatacttttttcaaagtagaaacagagaacaaattctcttttatgacatgtccctttatattgaatgctgtcacaaagaatttgggattatattatgacaatagaattcgcatgtacagtgaacgaagaatcactgttctctacagcttagttcaaggacagcagttgaatccatatttgagactcaaagttagacgtgaccatatcatagatgatgcacttgtccggctagagatgatcgctatggaaaatcctgcagacttgaagaagcagttgtatgtggaatttgaaggagaacaaggagttgatgagggaggtgtttccaaagaattttttcagctggttgtggaggaaatcttcaatccagatattggtatgttcacatacgatgaatctacaaaattgttttggtttaatccatcttcttttgaaactgagggtcagtttactctgattggcatagtactgggtctggctatttacaataactgtatactggatgtacattttcccatggttgtctacaggaagctaatggggaaaaaaggaacttttcgtgacttgggagactctcacccagttctatatcagagtttaaaagatttattggagtatgaagggaatgtggaagatgacatgatgatcactttccagatatcacagacagatctttttggtaacccaatgatgtatgatctaaaggaaaatggtgataaaattccaattacaaatgaaaacaggaaggaatttgtcaatctttattctgactacattctcaataaatcagtagaaaaacagttcaaggcttttcggagaggttttcatatggtgaccaatgaatctcccttaaagtacttattcagaccagaagaaattgaattgcttatatgtggaagccggaatctagatttccaagcactagaagaaactacagaatatgacggtggctataccagggactctgttctgattagggagttctgggaaatcgttcattcatttacagatgaacagaaaagactcttcttgcagtttacaacgggcacagacagagcacctgtgggaggactaggaaaattaaagatgattatagccaaaaatggcccagacacagaaaggttacctacatctcatacttgctttaatgtgcttttacttccggaatactcaagcaaagaaaaacttaaagagagattgttgaaggccatcacgtatgccaaaggatttggcatgctgtaaaacaaaacaaaacaaaataaaacaaaaaaaaggaaggaaaaaaaaagaaaaaatttaaaaaattttaaaaatataacgagggataaatttttggtggtgatagtgtcccagtacaaaaaggctgtaagatagtcaaccacagtagtcacctatgtctgtgcctcccttctttattggggacatgtgggctggaacagcagatttcagctacatatatgaacaaatcctttattattattataattatttttttgcgtgaaagtgttacatattctttcacttgtatgtacagagaggtttttctgaatatttattttaagggttaaatcacttttgcttgtgtttattactgcttgaggttgagccttttgagtatttaaaaaatatataccaacagaactactctcccaaggaaaatattgccaccatttgtagaccacgtaaccttcaagtatgtgctacttttttgtccctgtatctaactcaaatcaggaactgtattttttttaatgatttgcttttgaaacttgaagtcttgaaaacagtgtgatgcaattactgctgttctagcccccaaagagttttctgtgcaaaatcttgagaatcaatcaataaagaaagatggaaggaagggagaaattggaatgttttaactgcagccctcagaactttagtaacagcacaacaaattaaaaacaaaaacaactcatgccacagtatgtcgtcttcatgtgtcttgcaatgaactgtttcagtagccaatcctctttcttagtatatgaaaggacagggattttgttcttgttgttctcgttgttgttttaagtttactggggaaagtgcatttggccaaatgaaatggtagtcaagcctattgcaacaaagttaggaagtttgttgtttgtttattataaacaaaaagcatgtgaaagtgcacttaagatagagtttttattaattacttacttattacctagattttaaatagacaatccaaagtctccccttcgtgttgccatcatcttgttgaatcagccattttatcgaggcacgtgatcagtgttgcaacataatgaaaaagatggctactgtgccttgtgttacttaatcatacagtaagctgacctggaaatgaatgaaactattactcctaagaattacattgtatagccccacagattaaatttaattaattaattcaaaacatgttaaacgttactttcatgtactatggaaaagtacaagtaggtttacattactgatttccagaagtaagtagtttcccctttcctagtcttctgtgtatgtgatgttgttaatttcttttattgcattataaaataaaaggattatgtatttttaactaaggtgagacattgatatatccttttgctacaagctatagctaatgtgctgagcttgtgccttggtgattgattgattgattgactgattgttttaactgattactgtagatcaacctgatgatttgtttgtttgaaattggcaggaaaaatgcagctttcaaatcattggggggagaaaaaggatgtctttcaggattattttaattaatttttttcataattgagacagaactgtttgttatgtaccataatgctaaataaaactgtggcacttttcaccataatttaatttagtggaaaaagaagacaatgctttccatattgtgataaggtaacatggggtttttctgggccagcctttagaacactgttagggtacatacgctaccttgatgaaagggaccttcgtgcaactgtagtcatcttaaaggcttctcatccactgtgcttcttaatgtgtaattaaagtgaggagaaattaaatactctgagggcgttttatataataaattcgtgaagaaatgtgtgctcttcagttctcaagttttattattatggtatttattaaagttctacaattgtaataacgtatccatatgacaagttttaaagtggtaattgaaataggttatcagatatagagttgttcacatcaagtagacttttaacagagtcagaatgaacctacccttaaaattttagagaaaaaaaatcgtcggttgcacagaatagctgctctagcttgcttaattatgccgggcatgttgtcactcctcttacttttgctgccttttcattactatttaatggaatgtccctgaacaataaggaagagcaaaacatagacattttgactacagtggatacttcctctaccccaaatgttatgttataaaagtactttttttgcccaggtactctattatatattttggttttctttgaattanacctcaatctccaggaagctctggagggaaaaaaaggaaccataaactaaagtaactggttttccaaataaatgtaaacttttttaaccttttattattatagaacatttcaaacatacataaaacatgaaaacagcctgcagccaaacttttctggaccttggcagctccagcaaatgagctggtcatcctaaccctggtttcctgagacaactacttttggggatgcttgcttgtatagggagatgatagatagatagatacatatcaaaaagaaacttgaaaaaggcttcgaacagaacttgccgatgttactcatccctcctcggtacagacattctgttagaacagatggttgtaatggggcagcatcactccctattcccattaaaaacatgaccattctgagatttcaggccccttcgaggaatttttctcaagaattccatacaaactgtcagaggaagaaatgtcgtcccaagactagtccctgtgtagtcttgatccctttacctgcttactgtaattttttttctctgactttccgccagtgtctaagggccatctgtacccctcccacccttccatgagccactgtataatccaaaaacacaccttccatttgctccctcacttgtctccttttacctcaacagtgttagtgtgtaaagaattgcctggggagggtagagggttttacaagtacagagtcccaagtcttttctcccctccccgttagtgggttggcatttattaataggcactgcaagattttgatgcaggtgtggggtagatatcactgtgaaaggctactaatgcatggtagtttcaccgaaagtacagtcttcaaggatccttataatctcctcattgccaaaatcagtaacatctataaccttgacaacaccctagcttgggctgttgcttctctggctacttgtttttccatcccagtttacccagattttagatggatactcctccaattctgcttaaagtccttacctgttcttgcccagttccctctagtcaacctcagtcactcccaaagattcttccccaatcccatatcttttgctcagacctctgtctctgggatttctttgttacctcatagtcagtagtcctaaaaacaaaattcttcatcttgcatctctatcgaccgaccattctttgtttctttttaagaaatgtaaccttcaccccaatcatcaaaatctctcattcctcaattgtcacaggttgtcacttctttccccctaaacctctcccatcattccttccttctttatactgcccttacaggtcctgatcctctgactcacccggacattcttagcagctgcctaatttcactccctgactctcatctccctcttccaatccttttcattgtgctagaacactatcttgctaattttaatatcctctgcattcagtgcctccacagattgccccctcactgacctttccaatttggccttgtgttacacactttcctcgctgcattcctacccagcatcttcacttgtcatatttctcaaatactcttcatgaccagatatttaaagtacctcatccatgaagacttcatcaacccccaaagtgcctccaatgcttccgtggtagcacagcataatggggtacatttcttagttgaacagtgaggagtcactgggattcttacagagtgtcttagggtctcctcttgatactctttccacatttcagttaaggaattttcttacatctttttttcttctaataacctttgcctggagtgtaagtaaattcatgatagagactgtcatttttaaaaaaaaaaaacaaaccattttgcctttcacatgttattacctccatctttctgttatcttgtcagtgttgccacctaaatgattgaaaatgaccgagcatgcagtagaatgtagtgaagtttcctatttcatccattttttgcataagtgcattggtatctgtatatccatctgcccaagcaccagttgttgaaaagactattatttccccatgaatggtcctggtacccttgtcaaagaacagttgaccataaatataagactttctggattctcagtcttactccattgccctatatgtctgtcgttataccagcaccgcactgtcttgattgctgtagcttggtagtaagtttagatttgggatgtgcaagtcctccattttttttttttttctccccaaaatcattttgtctgttttgggtcccttgcattgcatatgaatttttatatgatcattgtgtcaattcctgcaaaacagctgggatcttgatagggatttagttgaattggtagataaatttgagaaataactgctattttaatggtgttaggttttctgttccatgactgtgggatgtctttgcatttgcttaggtctttatttcagtgatgttttagagatttcagtgtgcaagtcttgacgtctttaatttttttctaagtattttactgatgccactttaattatatgattattttctaatttttatttttgtattcatcactggtgttagaaataaaattaatttttgtatattgattttgtatattgtagcttttctaaaattctttttttgtcacttagtattttttgcatatgagatcatgcatctgtgaacagaaatacttttacttcttcctttccagtctagattcctattatttcattttcttgccttagtgtgctggctagcacctccagtacaatattggatagaagtgacaagagcagacatctttttcttgttcctgattttaaggggaaagcattcagtctttcaccattgagtatgatgttagctagctgtgggtttgcttcaagttgaggaaattcttttattaaacctagtttactgagtgttttttaatcaaaaaaaaaaaaggaggggctgtgggttttgttaaatgcttcttctgtatcaagattttcatgttgttttgtcctttattaatatgttgtattaatggacttttgtatattgaattaactttgcattcctgggataatctcagttgtccatgctacataaaccttgttctatgctgctggatttggtttgctagtattttgtttagaatgtttgcatctatattcataaggaatattggtctgtagttttcatattatatatctgtccantttggggatgagagtcatactcctgacagaatgaattgggagctttccctgttcttaaacctactgaggtattttttaagtgaactacttggagaccttcacctgtgatcttcagatgctgggggacacagggatggtacctgactctgaaaaggctctcagggtaagacgtgtctgaactggcctgtggcagttaactaaagagtactcctaccaataatggagtcaagatgtatgtttcccataggccacgctggtcactgaaagagatgggctatgagccatcttgaaaactaccctgcacaaatggactgccggcctggagccaggcaccctgcagctgagtgccatataatgttgaagctgttgagggaggagaggttggaagctgccagcttagagaatctcagctgtggtttcccagcagggtgtattccccaggaaagaaagtcattcccccacccctggctcaaagtaataattaacagtgactgggtaaggcaggatctttttttcctaattccctcccctccagaaagggcagcaacagctcttgaatgggaaagaaggtggagggaggaaaagaaaaaccaattgccccaacactgctgtctttaagcttcccacccaaagacctcagtaagaggcagaattatgttttcaattaagagagagtttggcctcttggtgtttcaaaagtgtaggctttttaatacctagagaaactgatgatttgttgattaccaaaaagggaccagaaaagctacatagcctgagatttcatccccagaaaaacgaatccagagagcagacttgcaa

SEQ ID NO: 281367 - DNA, 10243 bp, Homo sapiens
  misc_feature (6244)..(6244): n is a, c, g, or t
  misc_feature (9424)..(9424): n is a, c, g, or t
aaccctcctgggggggggggtgcccagagggcttccggaagtcccaggtttattctttcgggtcacagacagcagaaactaaaaagagggattaccctttctgtccagtcgcaagatggcgaccgagcctggtgggactccgaggggccgcaggccacctcctcttcccaatggcccgtgcgccggcggcgacggcaagcgggagggaggcggggccggcgaaggaaggaggggcggagcgcggcgccctcccgcgcgtcttggccccgccccacgtccccgcgtcccggcctggagccctcgcccggccgggcggcgcgcgctgcctgccgggatactcggcccgcccagccagtcctcccgtcttgcgccgcggccgcgagatccgtgtgtctcccaagatggtggcgctgggctcggggtgactacaggagacgacggggccttttcccttcgccaggacccgacacaccaggcttcgctcgctcgcgcacccctccgccgcgtagccatccgccagcgcgggcgcccgccatccgccgcctacttacgcttcacctctgccgacccggcgcgctcggctgcgggcggcggcgcctccttcggctcctcctcggaatagctcgcggcctgtagcccctggcaggagggcccctcagccccccggtgtggacaggcagcggcggctggcgacgaacgccgggatttcggcggccccggcgctccctttcccggcctcgttttccggataaggaagcgcgggtcccgcatgagccccggcggtggcggcagcgaaagagaacgaggcggtggcgggcggaggcggcgggcgagggcgactacgaccagtgaggcggccgccgcagcccaggcgcgggggcgacgacaggttaaaaatctgtaagagcctgattttagaattcaccagctcctcagaagtttggcgaaatatgagttattaagcctacgctcagatcaaggtagcagctagactggtgtgacaacctgtttttaatcagtgactcaaagctgtgatcaccctgatgtcaccgaatggccacagcttgtaaaagagagttacagtggaggtaaaaggagtggcttgcaggatggagaagctgcaccagtgttattggaagtgagccaccatttgaatttgctagctcatgctgcagtattcagattatgccagcaggtttattttttgttttgcaagccagctctgcctccttacagtatgacatctgatgctggagggtcgcactttcaaaaatgagtcagctggtacatggggttatcatcaatttttagctcttctgtctgggagatacaagtttggaagcaatcttggggtacttacccacaaggctggtggagaccagatcaggagaacctcagtctgacgacattgaagctagccgaatgaagcgagcagctgcaaagcatctaatagaacgctactaccaccagttaactgagggctgtggaaatgaagcctgcacgaatgagttttgtgcttcctgtccaacttttcttcgtatggataataatgcagcagctattaaagccctcgagctttataagattaatgcaaaactctgtgatcctcatccctccaagaaaggagcaagctcagcttaccttgagaactcgaaaggtgcccccaacaactcctgctctgagataaaaatgaacaagaaaggcgctagaattgattttaaagatgtgacttacttaacagaagagaaggtatatgaaattcttgaattatgtagagaaagagaggattattcccctttaatccgtgttattggaagagttttttctagtgctgaggcattggtacagagcttccggaaagttaaacaacacaccaaggaagaactgaaatctcttcaagcaaaagatgaagacaaagatgaagatgaaaaggaaaaagctgcatgttctgctgctgctatggaagaagactcagaagcatcttcctcaaggataggtgatagctcacagggagacaacaatttgcaaaaattaggccctgatgatgtgtctgtggatattgatgccattagaagggtctacaccagattgctctctaatgaaaaaattgaaactgcctttctcaatgcacttgtatatttgtcacctaacgtggaatgtgacttgacgtatcacaatgtatactctcgagatcctaattatctgaatttgttcattatcgtaatggagaatagaaatctccacagtcctgaatatctggaaatggctttgccattattttgcaaagcgatgagcaagctaccccttgcagcccaaggaaaactgatcagactgtggtctaaatacaatgcagaccagattcggagaatgatggagacatttcagcaacttattacttataaagtcataagcaatgaatttaacagtcgaaatctagtgaatgatgatgatgccattgttgctgcttcgaagtgcttgaaaatggtttactatgcaaatgtagtgggaggggaagtggacacaaatcacaatgaagaagatgatgaagagcccatccctgagtccagcgagctgacacttcaggaacttttgggagaagaaagaagaaacaagaaaggtcctcgagtggaccccctggaaactgaacttggtgttaaaaccctggattgtcgaaaaccacttatcccttttgaagagtttattaatgaaccactgaatgaggttctagaaatggataaagattatacttttttcaaagtagaaacagagaacaaattctcttttatgacatgtccctttatattgaatgctgtcacaaagaatttgggattatattatgacaatagaattcgcatgtacagtgaacgaagaatcactgttctctacagcttagttcaaggacagcagttgaatccatatttgagactcaaagttagacgtgaccatatcatagatgatgcacttgtccggctagagatgatcgctatggaaaatcctgcagacttgaagaagcagttgtatgtggaatttgaaggagaacaaggagttgatgagggaggtgtttccaaagaattttttcagctggttgtggaggaaatcttcaatccagatattggtatgttcacatacgatgaatctacaaaattgttttggtttaatccatcttcttttgaaactgagggtcagtttactctgattggcatagtactgggtctggctatttacaataactgtatactggatgtacattttcccatggttgtctacaggaagctaatggggaaaaaaggaacttttcgtgacttgggagactctcacccagttctatatcagagtttaaaagatttattggagtatgaagggaatgtggaagatgacatgatgatcactttccagatatcacagacagatctttttggtaacccaatgatgtatgatctaaaggaaaatggtgataaaattccaattacaaatgaaaacaggaaggaatttgtcaatctttattctgactacattctcaataaatcagtagaaaaacagttcaaggcttttcggagaggttttcatatggtgaccaatgaatctcccttaaagtacttattcagaccagaagaaattgaattgcttatatgtggaagccggaatctagatttccaagcactagaagaaactacagaatatgacggtggctataccagggactctgttctgattagggagttctgggaaatcgttcattcatttacagatgaacagaaaagactcttcttgcagtttacaacgggcacagacagagcacctgtgggaggactaggaaaattaaagatgattatagccaaaaatggcccagacacagaaaggttacctacatctcatacttgctttaatgtgcttttacttccggaatactcaagcaaagaaaaacttaaagagagattgttgaaggccatcacgtatgccaaaggatttggcatgctgtaaaacaaaacaaaacaaaataaaacaaaaaaaaggaaggaaaaaaaaagaaaaaatttaaaaaattttaaaaatataacgagggataaatttttggtggtgatagtgtcccagtacatttattggggacatgtgggctggaacagcagatttcagctacatatatgaacaaatcctttattattattataattatttttttgcgtgaaagtgttacatattctttcacttgtatgtacagagaggtttttctgaatatttattttaagggttaaatcacttttgcttgtgtttattactgcttgaggttgagccttttgagtatttaaaaaatatataccaacagaactactctcccaaggaaaatattgccaccatttgtagaccacgtaaccttcaagtatgtgctacttttttgtccctgtatctaactcaaatcaggaactgtattttttttaatgatttgcttttgaaacttgaagtcttgaaaacagtgtgatgcaattactgctgttctagcccccaaagagttttctgtgcaaaatcttgagaatcaatcaataaagaaagatggaaggaagggagaaattggaatgttttaactgcagccctcagaactttagtaacagcacaacaaattaaaaacaaaaacaactcatgccacagtatgtcgtcttcatgtgtcttgcaatgaactgtttcagtagccaatcctctttcttagtatatgaaaggacagggattttgttcttgttgttctcgttgttgttttaagtttactggggaaagtgcatttggccaaatgaaatggtagtcaagcctattgcaacaaagttaggaagtttgttgtttgtttattataaacaaaaagcatgtgaaagtgcacttaagatagagtttttattaattacttacttattacctagattttaaatagacaatccaaagtctccccttcgtgttgccatcatcttgttgaatcagccattttatcgaggcacgtgatcagtgttgcaacataatgaaaaagatggctactgtgccttgtgttacttaatcatacagtaagctgacctggaaatgaatgaaactattactcctaagaattacattgtatagccccacagattaaatttaattaattaattcaaaacatgttaaacgttactttcatgtactatggaaaagtacaagtaggtttacattactgatttccagaagtaagtagtttcccctttcctagtcttctgtgtatgtgatgttgttaatttcttttattgcattataaaataaaaggattatgtatttttaactaaggtgagacattgatatatccttttgctacaagctatagctaatgtgctgagcttgtgccttggtgattgattgattgattgactgattgttttaactgattactgtagatcaacctgatgatttgtttgtttgaaattggcaggaaaaatgcagctttcaaatcattggggggagaaaaaggatgtctttcaggattattttaattaatttttttcataattgagacagaactgtttgttatgtaccataatgctaaataaaactgtggcacttttcaccataatttaatttagtggaaaaagaagacaatgctttccatattgtgataaggtaacatggggtttttctgggccagcctttagaacactgttagggtacatacgctaccttgatgaaagggaccttcgtgcaactgtagtcatcttaaaggcttctcatccactgtgcttcttaatgtgtaattaaagtgaggagaaattaaatactctgagggcgttttatataataaattcgtgaagaaatgtgtgctcttcagttctcaagttttattattatggtatttattaaagttctacaattgtaataacgtatccatatgacaagttttaaagtggtaattgaaataggttatcagatatagagttgttcacatcaagtagacttttaacagagtcagaatgaacctacccttaaaattttagagaaaaaaaatcgtcggttgcacagaatagctgctctagcttgcttaattatgccgggcatgttgtcactcctcttacttttgctgccttttcattactatttaatggaatgtccctgaacaataaggaagagcaaaacatagacattttgactacagtggatacttcctctaccccaaatgttatgttataaaagtactttttttgcccaggtactctattatatattttggttttctttgaattanacctcaatctccaggaagctctggagggaaaaaaaggaaccataaactaaagtaactggttttccaaataaatgtaaacttttttaaccttttattattatagaacatttcaaacatacataaaacatgaaaacagcctgcagccaaacttttctggaccttggcagctccagcaaatgagctggtcatcctaaccctggtttcctgagacaactacttttggggatgcttgcttgtatagggagatgatagatagatagatacatatcaaaaagaaacttgaaaaaggcttcgaacagaacttgccgatgttactcatccctcctcggtacagacattctgttagaacagatggttgtaatggggcagcatcactccctattcccattaaaaacatgaccattctgagatttcaggccccttcgaggaatttttctcaagaattccatacaaactgtcagaggaagaaatgtcgtcccaagactagtccctgtgtagtcttgatccctttacctgcttactgtaattttttttctctgactttccgccagtgtctaagggccatctgtacccctcccacccttccatgagccactgtataatccaaaaacacaccttccatttgctccctcacttgtctccttttacctcaacagtgttagtgtgtaaagaattgcctggggagggtagagggttttacaagtacagagtcccaagtcttttctcccctccccgttagtgggttggcatttattaataggcactgcaagattttgatgcaggtgtggggtagatatcactgtgaaaggctactaatgcatggtagtttcaccgaaagtacagtcttcaaggatccttataatctcctcattgccaaaatcagtaacatctataaccttgacaacaccctagcttgggctgttgcttctctggctacttgtttttccatcccagtttacccagattttagatggatactcctccaattctgcttaaagtccttacctgttcttgcccagttccctctagtcaacctcagtcactcccaaagattcttccccaatcccatatcttttgctcagacctctgtctctgggatttctttgttacctcatagtcagtagtcctaaaaacaaaattcttcatcttgcatctctatcgaccgaccattctttgtttctttttaagaaatgtaaccttcaccccaatcatcaaaatctctcattcctcaattgtcacaggttgtcacttctttccccctaaacctctcccatcattccttccttctttatactgcccttacaggtcctgatcctctgactcacccggacattcttagcagctgcctaatttcactccctgactctcatctccctcttccaatccttttcattgtgctagaacactatcttgctaattttaatatcctctgcattcagtgcctccacagattgccccctcactgacctttccaatttggccttgtgttacacactttcctcgctgcattcctacccagcatcttcacttgtcatatttctcaaatactcttcatgaccagatatttaaagtacctcatccatgaagacttcatcaacccccaaagtgcctccaatgcttccgtggtagcacagcataatggggtacatttcttagttgaacagtgaggagtcactgggattcttacagagtgtcttagggtctcctcttgatactctttccacatttcagttaaggaattttcttacatctttttttcttctaataacctttgcctggagtgtaagtaaattcatgatagagactgtcatttttaaaaaaaaaaaacaaaccattttgcctttcacatgttattacctccatctttctgttatcttgtcagtgttgccacctaaatgattgaaaatgaccgagcatgcagtagaatgtagtgaagtttcctatttcatccattttttgcataagtgcattggtatctgtatatccatctgcccaagcaccagttgttgaaaagactattatttccccatgaatggtcctggtacccttgtcaaagaacagttgaccataaatataagactttctggattctcagtcttactccattgccctatatgtctgtcgttataccagcaccgcactgtcttgattgctgtagcttggtagtaagtttagatttgggatgtgcaagtcctccattttttttttttttctccccaaaatcattttgtctgttttgggtcccttgcattgcatatgaatttttatatgatcattgtgtcaattcctgcaaaacagctgggatcttgatagggatttagttgaattggtagataaatttgagaaataactgctattttaatggtgttaggttttctgttccatgactgtgggatgtctttgcatttgcttaggtctttatttcagtgatgttttagagatttcagtgtgcaagtcttgacgtctttaatttttttctaagtattttactgatgccactttaattatatgattattttctaatttttatttttgtattcatcactggtgttagaaataaaattaatttttgtatattgattttgtatattgtagcttttctaaaattctttttttgtcacttagtattttttgcatatgagatcatgcatctgtgaacagaaatacttttacttcttcctttccagtctagattcctattatttcattttcttgccttagtgtgctggctagcacctccagtacaatattggatagaagtgacaagagcagacatctttttcttgttcctgattttaaggggaaagcattcagtctttcaccattgagtatgatgttagctagctgtgggtttgcttcaagttgaggaaattcttttattaaacctagtttactgagtgttttttaatcaaaaaaaaaaaaggaggggctgtgggttttgttaaatgcttcttctgtatcaagattttcatgttgttttgtcctttattaatatgttgtattaatggacttttgtatattgaattaactttgcattcctgggataatctcagttgtccatgctacataaaccttgttctatgctgctggatttggtttgctagtattttgtttagaatgtttgcatctatattcataaggaatattggtctgtagttttcatattatatatctgtccantttggggatgagagtcatactcctgacagaatgaattgggagctttccctgttcttaaacctactgaggtattttttaagtgaactacttggagaccttcacctgtgatcttcagatgctgggggacacagggatggtacctgactctgaaaaggctctcagggtaagacgtgtctgaactggcctgtggcagttaactaaagagtactcctaccaataatggagtcaagatgtatgtttcccataggccacgctggtcactgaaagagatgggctatgagccatcttgaaaactaccctgcacaaatggactgccggcctggagccaggcaccctgcagctgagtgccatataatgttgaagctgttgagggaggagaggttggaagctgccagcttagagaatctcagctgtggtttcccagcagggtgtattccccaggaaagaaagtcattcccccacccctggctcaaagtaataattaacagtgactgggtaaggcaggatctttttttcctaattccctcccctccagaaagggcagcaacagctcttgaatgggaaagaaggtggagggaggaaaagaaaaaccaattgccccaacactgctgtctttaagcttcccacccaaagacctcagtaagaggcagaattatgttttcaattaagagagagtttggcctcttggtgtttcaaaagtgtaggctttttaatacctagagaaactgatgatttgttgattaccaaaaagggaccagaaaagctacatagcctgagatttcatccccagaaaaacgaatccagagagcagacttgcaa

SEQ ID NO: 281368 - DNA, 5868 bp, Homo sapiens
aaccctcctgggggggggggtgcccagagggcttccggaagtcccaggtttattctttcgggtcacagacagcagaaactaaaaagagggattaccctttctgtccagtcgcaagatggcgaccgagcctggtgggactccgaggggccgcaggccacctcctcttcccaatggcccgtgcgccggcggcgacggcaagcgggagggaggcggggccggcgaaggaaggaggggcggagcgcggcgccctcccgcgcgtcttggccccgccccacgtccccgcgtcccggcctggagccctcgcccggccgggcggcgcgcgctgcctgccgggatactcggcccgcccagccagtcctcccgtcttgcgccgcggccgcgagatccgtgtgtctcccaagatggtggcgctgggctcggggtgactacaggagacgacggggccttttcccttcgccaggacccgacacaccaggcttcgctcgctcgcgcacccctccgccgcgtagccatccgccagcgcgggcgcccgccatccgccgcctacttacgcttcacctctgccgacccggcgcgctcggctgcgggcggcggcgcctccttcggctcctcctcggaatagctcgcggcctgtagcccctggcaggagggcccctcagccccccggtgtggacaggcagcggcggctggcgacgaacgccgggatttcggcggccccggcgctccctttcccggcctcgttttccggataaggaagcgcgggtcccgcatgagccccggcggtggcggcagcgaaagagaacgaggcggtggcgggcggaggcggcgggcgagggcgactacgaccagtgaggcggccgccgcagcccaggcgcgggggcgacgacaggttaaaaatctgtaagagcctgattttagaattcaccagctcctcagaagtttggcgaaatatgagttattaagcctacgctcagatcaaggtagcagctagactggtgtgacaacctgtttttaatcagtgactcaaagctgtgatcaccctgatgtcaccgaatggccacagcttgtaaaagagagttacagtggaggtaaaaggagtggcttgcaggatggagaagctgcaccagtgttattggaagtgagccaccatttgaatttgctagctcatgctgcagtattcagattatgccagcaggtttattttttgttttgcaagccagctctgcctccttacagtatgacatctgatgctggagggtcgcactttcaaaaatgagtcagctggtacatggggttatcatcaatttttagctcttctgtctgggagatacaagtttggaagcaatcttggggtacttacccacaaggctggtggagaccagatcaggagaacctcagtctgacgacattgaagctagccgaatgaagcgagcagctgcaaagcatctaatagaacgctactaccaccagttaactgagggctgtggaaatgaagcctgcacgaatgagttttgtgcttcctgtccaacttttcttcgtatggataataatgcagcagctattaaagccctcgagctttataagattaatgcaaaactctgtgatcctcatccctccaagaaaggagcaagctcagcttaccttgagaactcgaaaggtgcccccaacaactcctgctctgagataaaaatgaacaagaaaggcgctagaattgattttaaagatgtgacttacttaacagaagagaaggtatatgaaattcttgaattatgtagagaaagagaggattattcccctttaatccgtgttattggaagagttttttctagtgctgaggcattggtacagagcttccggaaagttaaacaacacaccaaggaagaactgaaatctcttcaagcaaaagatgaagacaaagatgaagatgaaaaggaaaaagctgcatgttctgctgctgctatggaagaagactcagaagcatcttcctcaaggataggtgatagctcacagggagacaacaatttgcaaaaattaggccctgatgatgtgtctgtggatattgatgccattagaagggtctacaccagattgctctctaatgaaaaaattgaaactgcctttctcaatgcacttgtatatttgtcacctaacgtggaatgtgacttgacgtatcacaatgtatactctcgagatcctaattatctgaatttgttcattatcgtaatggagaatagaaatctccacagtcctgaatatctggaaatggctttgccattattttgcaaagcgatgagcaagctaccccttgcagcccaaggaaaactgatcagactgtggtctaaatacaatgcagaccagattcggagaatgatggagacatttcagcaacttattacttataaagtcataagcaatgaatttaacagtcgaaatctagtgaatgatgatgatgccattgttgctgcttcgaagtgcttgaaaatggtttactatgcaaatgtagtgggaggggaagtggacacaaatcacaatgaagaagatgatgaagagcccatccctgagtccagcgagctgacacttcaggaacttttgggagaagaaagaagaaacaagaaaggtcctcgagtggaccccctggaaactgaacttggtgttaaaaccctggattgtcgaaaaccacttatcccttttgaagagtttattaatgaaccactgaatgaggttctagaaatggataaagattatacttttttcaaagtagaaacagagaacaaattctcttttatgacatgtccctttatattgaatgctgtcacaaagaatttgggattatattatgacaatagaattcgcatgtacagtgaacgaagaatcactgttctctacagcttagttcaaggacagcagttgaatccatatttgagactcaaagttagacgtgaccatatcatagatgatgcacttgtccggctagagatgatcgctatggaaaatcctgcagacttgaagaagcagttgtatgtggaatttgaaggagaacaaggagttgatgagggaggtgtttccaaagaattttttcagctggttgtggaggaaatcttcaatccagatattggtatgttcacatacgatgaatctacaaaattgttttggtttaatccatcttcttttgaaactgagggtcagtttactctgattggcatagtactgggtctggctatttacaataactgtatactggatgtacattttcccatggttgtctacaggaagctaatggggaaaaaaggaacttttcgtgacttgggagactctcacccagttctatatcagagtttaaaagatttattggagtatgaagggaatgtggaagatgacatgatgatcactttccagatatcacagacagatctttttggtaacccaatgatgtatgatctaaaggaaaatggtgataaaattccaattacaaatgaaaacaggaaggaatttgtcaatctttattctgactacattctcaataaatcagtagaaaaacagttcaaggcttttcggagaggttttcatatggtgaccaatgaatctcccttaaagtacttattcagaccagaagaaattgaattgcttatatgtggaagccggaatctagatttccaagcactagaagaaactacagaatatgacggtggctataccagggactctgttctgattagggagttctgggaaatcgttcattcatttacagatgaacagaaaagactcttcttgcagtttacaacgggcacagacagagcacctgtgggaggactaggaaaattaaagatgattatagccaaaaatggcccagacacagaaaggttacctacatctcatacttgctttaatgtgcttttacttccggaatactcaagcaaagaaaaacttaaagagagattgttgaaggccatcacgtatgccaaaggatttggcatgctgtaaaacaaaacaaaacaaaataaaacaaaaaaaaggaaggaaaaaaaaagaaaaaatttaaaaaattttaaaaatataacgagggataaatttttggtggtgatagtgtcccagtacaaaaaggctgtaagatagtcaaccacagtagtcacctatgtctgtgcctcccttctttattggggacatgtgggctggaacagcagatttcagctacatatatgaacaaatcctttattattattataattatttttttgcgtgaaagtgttacatattctttcacttgtatgtacagagaggtttttctgaatatttattttaagggttaaatcacttttgcttgtgtttattactgcttgaggttgagccttttgagtatttaaaaaatatataccaacagaactactctcccaaggaaaatattgccaccatttgtagaccacgtaaccttcaagtatgtgctacttttttgtccctgtatctaactcaaatcaggaactgtattttttttaatgatttgcttttgaaacttgaagtcttgaaaacagtgtgatgcaattactgctgttctagcccccaaagagttttctgtgcaaaatcttgagaatcaatcaataaagaaagatggaaggaagggagaaattggaatgttttaactgcagccctcagaactttagtaacagcacaacaaattaaaaacaaaaacaactcatgccacagtatgtcgtcttcatgtgtcttgcaatgaactgtttcagtagccaatcctctttcttagtatatgaaaggacagggattttgttcttgttgttctcgttgttgttttaagtttactggggaaagtgcatttggccaaatgaaatggtagtcaagcctattgcaacaaagttaggaagtttgttgtttgtttattataaacaaaaagcatgtgaaagtgcacttaagatagagtttttattaattacttacttattacctagattttaaatagacaatccaaagtctccccttcgtgttgccatcatcttgttgaatcagccattttatcgaggcacgtgatcagtgttgcaacataatgaaaaagatggctactgtgccttgtgttacttaatcatacagtaagctgacctggaaatgaatgaaactattactcctaagaattacattgtatagccccacagattaaatttaattaattaattcaaaacatgttaaacgttactttcatgtactatggaaaagtacaagtaggtttacattactgatttccagaagtaagtagtttcccctttcctagtcttctgtgtatgtgatgttgttaatttcttttattgcattataaaataaaaggattatgtatttttaactaaggtgagacattgatatatccttttgctacaagctatagctaatgtgctgagcttgtgccttggtgattgattgattgattgactgattgttttaactgattactgtagatcaacctgatgatttgtttgtttgaaattggcaggaaaaatgcagctttcaaatcattggggggagaaaaaggatgtctttcaggattattttaattaatttttttcataattgagacagaactgtttgttatgtaccataatgctaaataaaactgtggcacttttcaccataatttaatttagtggaaaaagaagacaatgctttccatattgtgataaggtaacatggggtttttctgggccagcctttagaacactgttagggtacatacgctaccttgatgaaagggaccttcgtgcaactgtagtcatcttaaaggcttctcatccactgtgcttcttaatgtgtaattaaagtgaggagaaattaaatactctgagggcgttttatataataaattcgtgaaga

SEQ ID NO: 281369 - DNA, 9988 bp, Homo sapiens
  misc_feature (5989)..(5989): n is a, c, g, or t
  misc_feature (9169)..(9169): n is a, c, g, or t
aaccctcctgggggggggggtgcccagagggcttccggaagtcccaggtttattctttcgggtcacagacagcagaaactaaaaagagggattaccctttctgtccagtcgcaagatggcgaccgagcctggtgggactccgaggggccgcaggccacctcctcttcccaatggcccgtgcgccggcggcgacggcaagcgggagggaggcggggccggcgaaggaaggaggggcggagcgcggcgccctcccgcgcgtcttggccccgccccacgtccccgcgtcccggcctggagccctcgcccggccgggcggcgcgcgctgcctgccgggatactcggcccgcccagccagtcctcccgtcttgcgccgcggccgcgagatccgtgtgtctcccaagatggtggcgctgggctcggggtgactacaggagacgacggggccttttcccttcgccaggacccgacacaccaggcttcgctcgctcgcgcacccctccgccgcgtagccatccgccagcgcgggcgcccgccatccgccgcctacttacgcttcacctctgccgacccggcgcgctcggctgcgggcggcggcgcctccttcggctcctcctcggaatagctcgcggcctgtagcccctggcaggagggcccctcagccccccggtgtggacaggcagcggcggctggcgacgaacgccgggatttcggcggccccggcgctccctttcccggcctcgttttccggataaggaagcgcgggtcccgcatgagccccggcggtggcggcagcgaaagagaacgaggcggtggcgggcggaggcggcgggcgagggcgactacgaccagtgaggcggccgccgcagcccaggcgcgggggcgacgacaggttaaaaatctgtaagagcctgattttagaattcaccagctcctcagaagtttggcgaaatatgagttattaagcctacgctcagatcaaggtagcagctagactggtgtgacaacctgtttttaatcagtgactcaaagctgtgatcaccctgatgtcaccgaatggccacagcttgtaaaagatcaggagaacctcagtctgacgacattgaagctagccgaatgaagcgagcagctgcaaagcatctaatagaacgctactaccaccagttaactgagggctgtggaaatgaagcctgcacgaatgagttttgtgcttcctgtccaacttttcttcgtatggataataatgcagcagctattaaagccctcgagctttataagattaatgcaaaactctgtgatcctcatccctccaagaaaggagcaagctcagcttaccttgagaactcgaaaggtgcccccaacaactcctgctctgagataaaaatgaacaagaaaggcgctagaattgattttaaagatgtgacttacttaacagaagagaaggtatatgaaattcttgaattatgtagagaaagagaggattattcccctttaatccgtgttattggaagagttttttctagtgctgaggcattggtacagagcttccggaaagttaaacaacacaccaaggaagaactgaaatctcttcaagcaaaagatgaagacaaagatgaagatgaaaaggaaaaagctgcatgttctgctgctgctatggaagaagactcagaagcatcttcctcaaggataggtgatagctcacagggagacaacaatttgcaaaaattaggccctgatgatgtgtctgtggatattgatgccattagaagggtctacaccagattgctctctaatgaaaaaattgaaactgcctttctcaatgcacttgtatatttgtcacctaacgtggaatgtgacttgacgtatcacaatgtatactctcgagatcctaattatctgaatttgttcattatcgtaatggagaatagaaatctccacagtcctgaatatctggaaatggctttgccattattttgcaaagcgatgagcaagctaccccttgcagcccaaggaaaactgatcagactgtggtctaaatacaatgcagaccagattcggagaatgatggagacatttcagcaacttattacttataaagtcataagcaatgaatttaacagtcgaaatctagtgaatgatgatgatgccattgttgctgcttcgaagtgcttgaaaatggtttactatgcaaatgtagtgggaggggaagtggacacaaatcacaatgaagaagatgatgaagagcccatccctgagtccagcgagctgacacttcaggaacttttgggagaagaaagaagaaacaagaaaggtcctcgagtggaccccctggaaactgaacttggtgttaaaaccctggattgtcgaaaaccacttatcccttttgaagagtttattaatgaaccactgaatgaggttctagaaatggataaagattatacttttttcaaagtagaaacagagaacaaattctcttttatgacatgtccctttatattgaatgctgtcacaaagaatttgggattatattatgacaatagaattcgcatgtacagtgaacgaagaatcactgttctctacagcttagttcaaggacagcagttgaatccatatttgagactcaaagttagacgtgaccatatcatagatgatgcacttgtccggctagagatgatcgctatggaaaatcctgcagacttgaagaagcagttgtatgtggaatttgaaggagaacaaggagttgatgagggaggtgtttccaaagaattttttcagctggttgtggaggaaatcttcaatccagatattggtatgttcacatacgatgaatctacaaaattgttttggtttaatccatcttcttttgaaactgagggtcagtttactctgattggcatagtactgggtctggctatttacaataactgtatactggatgtacattttcccatggttgtctacaggaagctaatggggaaaaaaggaacttttcgtgacttgggagactctcacccagttctatatcagagtttaaaagatttattggagtatgaagggaatgtggaagatgacatgatgatcactttccagatatcacagacagatctttttggtaacccaatgatgtatgatctaaaggaaaatggtgataaaattccaattacaaatgaaaacaggaaggaatttgtcaatctttattctgactacattctcaataaatcagtagaaaaacagttcaaggcttttcggagaggttttcatatggtgaccaatgaatctcccttaaagtacttattcagaccagaagaaattgaattgcttatatgtggaagccggaatctagatttccaagcactagaagaaactacagaatatgacggtggctataccagggactctgttctgattagggagttctgggaaatcgttcattcatttacagatgaacagaaaagactcttcttgcagtttacaacgggcacagacagagcacctgtgggaggactaggaaaattaaagatgattatagccaaaaatggcccagacacagaaaggttacctacatctcatacttgctttaatgtgcttttacttccggaatactcaagcaaagaaaaacttaaagagagattgttgaaggccatcacgtatgccaaaggatttggcatgctgtaaaacaaaacaaaacaaaataaaacaaaaaaaaggaaggaaaaaaaaagaaaaaatttaaaaaattttaaaaatataacgagggataaatttttggtggtgatagtgtcccagtacaaaaaggctgtaagatagtcaaccacagtagtcacctatgtctgtgcctcccttctttattggggacatgtgggctggaacagcagatttcagctacatatatgaacaaatcctttattattattataattatttttttgcgtgaaagtgttacatattctttcacttgtatgtacagagaggtttttctgaatatttattttaagggttaaatcacttttgcttgtgtttattactgcttgaggttgagccttttgagtatttaaaaaatatataccaacagaactactctcccaaggaaaatattgccaccatttgtagaccacgtaaccttcaagtatgtgctacttttttgtccctgtatctaactcaaatcaggaactgtattttttttaatgatttgcttttgaaacttgaagtcttgaaaacagtgtgatgcaattactgctgttctagcccccaaagagttttctgtgcaaaatcttgagaatcaatcaataaagaaagatggaaggaagggagaaattggaatgttttaactgcagccctcagaactttagtaacagcacaacaaattaaaaacaaaaacaactcatgccacagtatgtcgtcttcatgtgtcttgcaatgaactgtttcagtagccaatcctctttcttagtatatgaaaggacagggattttgttcttgttgttctcgttgttgttttaagtttactggggaaagtgcatttggccaaatgaaatggtagtcaagcctattgcaacaaagttaggaagtttgttgtttgtttattataaacaaaaagcatgtgaaagtgcacttaagatagagtttttattaattacttacttattacctagattttaaatagacaatccaaagtctccccttcgtgttgccatcatcttgttgaatcagccattttatcgaggcacgtgatcagtgttgcaacataatgaaaaagatggctactgtgccttgtgttacttaatcatacagtaagctgacctggaaatgaatgaaactattactcctaagaattacattgtatagccccacagattaaatttaattaattaattcaaaacatgttaaacgttactttcatgtactatggaaaagtacaagtaggtttacattactgatttccagaagtaagtagtttcccctttcctagtcttctgtgtatgtgatgttgttaatttcttttattgcattataaaataaaaggattatgtatttttaactaaggtgagacattgatatatccttttgctacaagctatagctaatgtgctgagcttgtgccttggtgattgattgattgattgactgattgttttaactgattactgtagatcaacctgatgatttgtttgtttgaaattggcaggaaaaatgcagctttcaaatcattggggggagaaaaaggatgtctttcaggattattttaattaatttttttcataattgagacagaactgtttgttatgtaccataatgctaaataaaactgtggcacttttcaccataatttaatttagtggaaaaagaagacaatgctttccatattgtgataaggtaacatggggtttttctgggccagcctttagaacactgttagggtacatacgctaccttgatgaaagggaccttcgtgcaactgtagtcatcttaaaggcttctcatccactgtgcttcttaatgtgtaattaaagtgaggagaaattaaatactctgagggcgttttatataataaattcgtgaagaaatgtgtgctcttcagttctcaagttttattattatggtatttattaaagttctacaattgtaataacgtatccatatgacaagttttaaagtggtaattgaaataggttatcagatatagagttgttcacatcaagtagacttttaacagagtcagaatgaacctacccttaaaattttagagaaaaaaaatcgtcggttgcacagaatagctgctctagcttgcttaattatgccgggcatgttgtcactcctcttacttttgctgccttttcattactatttaatggaatgtccctgaacaataaggaagagcaaaacatagacattttgactacagtggatacttcctctaccccaaatgttatgttataaaagtactttttttgcccaggtactctattatatattttggttttctttgaattanacctcaatctccaggaagctctggagggaaaaaaaggaaccataaactaaagtaactggttttccaaataaatgtaaacttttttaaccttttattattatagaacatttcaaacatacataaaacatgaaaacagcctgcagccaaacttttctggaccttggcagctccagcaaatgagctggtcatcctaaccctggtttcctgagacaactacttttggggatgcttgcttgtatagggagatgatagatagatagatacatatcaaaaagaaacttgaaaaaggcttcgaacagaacttgccgatgttactcatccctcctcggtacagacattctgttagaacagatggttgtaatggggcagcatcactccctattcccattaaaaacatgaccattctgagatttcaggccccttcgaggaatttttctcaagaattccatacaaactgtcagaggaagaaatgtcgtcccaagactagtccctgtgtagtcttgatccctttacctgcttactgtaattttttttctctgactttccgccagtgtctaagggccatctgtacccctcccacccttccatgagccactgtataatccaaaaacacaccttccatttgctccctcacttgtctccttttacctcaacagtgttagtgtgtaaagaattgcctggggagggtagagggttttacaagtacagagtcccaagtcttttctcccctccccgttagtgggttggcatttattaataggcactgcaagattttgatgcaggtgtggggtagatatcactgtgaaaggctactaatgcatggtagtttcaccgaaagtacagtcttcaaggatccttataatctcctcattgccaaaatcagtaacatctataaccttgacaacaccctagcttgggctgttgcttctctggctacttgtttttccatcccagtttacccagattttagatggatactcctccaattctgcttaaagtccttacctgttcttgcccagttccctctagtcaacctcagtcactcccaaagattcttccccaatcccatatcttttgctcagacctctgtctctgggatttctttgttacctcatagtcagtagtcctaaaaacaaaattcttcatcttgcatctctatcgaccgaccattctttgtttctttttaagaaatgtaaccttcaccccaatcatcaaaatctctcattcctcaattgtcacaggttgtcacttctttccccctaaacctctcccatcattccttccttctttatactgcccttacaggtcctgatcctctgactcacccggacattcttagcagctgcctaatttcactccctgactctcatctccctcttccaatccttttcattgtgctagaacactatcttgctaattttaatatcctctgcattcagtgcctccacagattgccccctcactgacctttccaatttggccttgtgttacacactttcctcgctgcattcctacccagcatcttcacttgtcatatttctcaaatactcttcatgaccagatatttaaagtacctcatccatgaagacttcatcaacccccaaagtgcctccaatgcttccgtggtagcacagcataatggggtacatttcttagttgaacagtgaggagtcactgggattcttacagagtgtcttagggtctcctcttgatactctttccacatttcagttaaggaattttcttacatctttttttcttctaataacctttgcctggagtgtaagtaaattcatgatagagactgtcatttttaaaaaaaaaaaacaaaccattttgcctttcacatgttattacctccatctttctgttatcttgtcagtgttgccacctaaatgattgaaaatgaccgagcatgcagtagaatgtagtgaagtttcctatttcatccattttttgcataagtgcattggtatctgtatatccatctgcccaagcaccagttgttgaaaagactattatttccccatgaatggtcctggtacccttgtcaaagaacagttgaccataaatataagactttctggattctcagtcttactccattgccctatatgtctgtcgttataccagcaccgcactgtcttgattgctgtagcttggtagtaagtttagatttgggatgtgcaagtcctccattttttttttttttctccccaaaatcattttgtctgttttgggtcccttgcattgcatatgaatttttatatgatcattgtgtcaattcctgcaaaacagctgggatcttgatagggatttagttgaattggtagataaatttgagaaataactgctattttaatggtgttaggttttctgttccatgactgtgggatgtctttgcatttgcttaggtctttatttcagtgatgttttagagatttcagtgtgcaagtcttgacgtctttaatttttttctaagtattttactgatgccactttaattatatgattattttctaatttttatttttgtattcatcactggtgttagaaataaaattaatttttgtatattgattttgtatattgtagcttttctaaaattctttttttgtcacttagtattttttgcatatgagatcatgcatctgtgaacagaaatacttttacttcttcctttccagtctagattcctattatttcattttcttgccttagtgtgctggctagcacctccagtacaatattggatagaagtgacaagagcagacatctttttcttgttcctgattttaaggggaaagcattcagtctttcaccattgagtatgatgttagctagctgtgggtttgcttcaagttgaggaaattcttttattaaacctagtttactgagtgttttttaatcaaaaaaaaaaaaggaggggctgtgggttttgttaaatgcttcttctgtatcaagattttcatgttgttttgtcctttattaatatgttgtattaatggacttttgtatattgaattaactttgcattcctgggataatctcagttgtccatgctacataaaccttgttctatgctgctggatttggtttgctagtattttgtttagaatgtttgcatctatattcataaggaatattggtctgtagttttcatattatatatctgtccantttggggatgagagtcatactcctgacagaatgaattgggagctttccctgttcttaaacctactgaggtattttttaagtgaactacttggagaccttcacctgtgatcttcagatgctgggggacacagggatggtacctgactctgaaaaggctctcagggtaagacgtgtctgaactggcctgtggcagttaactaaagagtactcctaccaataatggagtcaagatgtatgtttcccataggccacgctggtcactgaaagagatgggctatgagccatcttgaaaactaccctgcacaaatggactgccggcctggagccaggcaccctgcagctgagtgccatataatgttgaagctgttgagggaggagaggttggaagctgccagcttagagaatctcagctgtggtttcccagcagggtgtattccccaggaaagaaagtcattcccccacccctggctcaaagtaataattaacagtgactgggtaaggcaggatctttttttcctaattccctcccctccagaaagggcagcaacagctcttgaatgggaaagaaggtggagggaggaaaagaaaaaccaattgccccaacactgctgtctttaagcttcccacccaaagacctcagtaagaggcagaattatgttttcaattaagagagagtttggcctcttggtgtttcaaaagtgtaggctttttaatacctagagaaactgatgatttgttgattaccaaaaagggaccagaaaagctacatagcctgagatttcatccccagaaaaacgaatccagagagcagacttgcaa

SEQ ID NO: 281370 - DNA, 10563 bp, Homo sapiens
  misc_feature (6564)..(6564): n is a, c, g, or t
  misc_feature (9744)..(9744): n is a, c, g, or t
aataaaactagtatacttttctctcctagagagttacagtggaggtaaaaggagtggcttgcaggatggagaagctgcaccagtgttattggaagtgagccaccatttgaatttgctagctcatgctgcagtattcagattagtgggtgttttgtgatcatattttctgcgattcaaatcaagacctaaaattgattctcattctgagatttacattttattatccaatgttatttggttattgtttcagttttaaaatttctgacttgttattctgacacactttaggataacctaagtcaatagtttaatacaaaaatttccctttggttatatgttttgaattaggttatatgttctgcatttacaagcacatacaggattcttacttccagcaacttggcagtaaaagaataagtagactctttaggagccaaagtcaagcttgggaactgttgctaggtggtatatatttcatagtttatgtttgtttccaagacaaggtctcactccatcgcccaggctggagtgcagtggcacgatcacagttcactgcaactttgaccttctgggctcaagtgaccctcccacctcagcctcccaagttgctgggactaaaggcacccaccaccacacccggctaagagacgaggtttcatcatgttgcccaggttgaccttgaactcctgagctcaagtggtccttatgtcttgacctcccaaagtgctgagattacagacatgaactaccacacctggcatatgtcatagttttgagagtttgaattctaacctcgggacttttggtaacttatttataatattctagaaatatactgttattaggatgagtagaaattcattcagacagaaactattataaattactgcaagaaaaatgtctgctagttctgcatatattcatttttctcttgattaaaaaacaatttccaatttgagtagaacaactttgctatgtttaatagacccaggacagatttattttaaggtaataatctttcaatccttcttcttctatactggattggtttaaattacttagcttgtcttatcaatggtttttaatagcctactttaatatatgtaaaaagtagtaattaatatgttacagtttggtggcaaacattttgatgccaaagttcacatattctcttgcttagggaacagaaattgggaagatagatgtagttatcatttgataatgtatttaaactctatcccatttcaggatctcaaaactttgtaacagttacatattgtacttctaagacttagatttgtttttcttcttgtgtcttacctttttgcagtaatatttttattttcctatcatcatgtcctcattttttccctctcttctctttccctgttaattttgaaagttttgctgcctacgtgtttgaaaacttctaatctgcctctcttccctcagtgccagcaggtttattttttgttttgcaagccagctctgcctccttacagtatgacatctgatgctggagggtcgcactttcaaaaatgagtcagctggtacatggggttatcatcaatttttagctcttctgtctgggagatacaagtttggaagcaatcttggggtacttacccacaaggctggtggagaccagatcaggagaacctcagtctgacgacattgaagctagccgaatgaagcgagcagctgcaaagcatctaatagaacgctactaccaccagttaactgagggctgtggaaatgaagcctgcacgaatgagttttgtgcttcctgtccaacttttcttcgtatggataataatgcagcagctattaaagccctcgagctttataagattaatgcaaaactctgtgatcctcatccctccaagaaaggagcaagctcagcttaccttgagaactcgaaaggtgcccccaacaactcctgctctgagataaaaatgaacaagaaaggcgctagaattgattttaaagatgtgacttacttaacagaagagaaggtatatgaaattcttgaattatgtagagaaagagaggattattcccctttaatccgtgttattggaagagttttttctagtgctgaggcattggtacagagcttccggaaagttaaacaacacaccaaggaagaactgaaatctcttcaagcaaaagatgaagacaaagatgaagatgaaaaggaaaaagctgcatgttctgctgctgctatggaagaagactcagaagcatcttcctcaaggataggtgatagctcacagggagacaacaatttgcaaaaattaggccctgatgatgtgtctgtggatattgatgccattagaagggtctacaccagattgctctctaatgaaaaaattgaaactgcctttctcaatgcacttgtatatttgtcacctaacgtggaatgtgacttgacgtatcacaatgtatactctcgagatcctaattatctgaatttgttcattatcgtaatggagaatagaaatctccacagtcctgaatatctggaaatggctttgccattattttgcaaagcgatgagcaagctaccccttgcagcccaaggaaaactgatcagactgtggtctaaatacaatgcagaccagattcggagaatgatggagacatttcagcaacttattacttataaagtcataagcaatgaatttaacagtcgaaatctagtgaatgatgatgatgccattgttgctgcttcgaagtgcttgaaaatggtttactatgcaaatgtagtgggaggggaagtggacacaaatcacaatgaagaagatgatgaagagcccatccctgagtccagcgagctgacacttcaggaacttttgggagaagaaagaagaaacaagaaaggtcctcgagtggaccccctggaaactgaacttggtgttaaaaccctggattgtcgaaaaccacttatcccttttgaagagtttattaatgaaccactgaatgaggttctagaaatggataaagattatacttttttcaaagtagaaacagagaacaaattctcttttatgacatgtccctttatattgaatgctgtcacaaagaatttgggattatattatgacaatagaattcgcatgtacagtgaacgaagaatcactgttctctacagcttagttcaaggacagcagttgaatccatatttgagactcaaagttagacgtgaccatatcatagatgatgcacttgtccggctagagatgatcgctatggaaaatcctgcagacttgaagaagcagttgtatgtggaatttgaaggagaacaaggagttgatgagggaggtgtttccaaagaattttttcagctggttgtggaggaaatcttcaatccagatattggtatgttcacatacgatgaatctacaaaattgttttggtttaatccatcttcttttgaaactgagggtcagtttactctgattggcatagtactgggtctggctatttacaataactgtatactggatgtacattttcccatggttgtctacaggaagctaatggggaaaaaaggaacttttcgtgacttgggagactctcacccagttctatatcagagtttaaaagatttattggagtatgaagggaatgtggaagatgacatgatgatcactttccagatatcacagacagatctttttggtaacccaatgatgtatgatctaaaggaaaatggtgataaaattccaattacaaatgaaaacaggaaggaatttgtcaatctttattctgactacattctcaataaatcagtagaaaaacagttcaaggcttttcggagaggttttcatatggtgaccaatgaatctcccttaaagtacttattcagaccagaagaaattgaattgcttatatgtggaagccggaatctagatttccaagcactagaagaaactacagaatatgacggtggctataccagggactctgttctgattagggagttctgggaaatcgttcattcatttacagatgaacagaaaagactcttcttgcagtttacaacgggcacagacagagcacctgtgggaggactaggaaaattaaagatgattatagccaaaaatggcccagacacagaaaggttacctacatctcatacttgctttaatgtgcttttacttccggaatactcaagcaaagaaaaacttaaagagagattgttgaaggccatcacgtatgccaaaggatttggcatgctgtaaaacaaaacaaaacaaaataaaacaaaaaaaaggaaggaaaaaaaaagaaaaaatttaaaaaattttaaaaatataacgagggataaatttttggtggtgatagtgtcccagtacaaaaaggctgtaagatagtcaaccacagtagtcacctatgtctgtgcctcccttctttattggggacatgtgggctggaacagcagatttcagctacatatatgaacaaatcctttattattattataattatttttttgcgtgaaagtgttacatattctttcacttgtatgtacagagaggtttttctgaatatttattttaagggttaaatcacttttgcttgtgtttattactgcttgaggttgagccttttgagtatttaaaaaatatataccaacagaactactctcccaaggaaaatattgccaccatttgtagaccacgtaaccttcaagtatgtgctacttttttgtccctgtatctaactcaaatcaggaactgtattttttttaatgatttgcttttgaaacttgaagtcttgaaaacagtgtgatgcaattactgctgttctagcccccaaagagttttctgtgcaaaatcttgagaatcaatcaataaagaaagatggaaggaagggagaaattggaatgttttaactgcagccctcagaactttagtaacagcacaacaaattaaaaacaaaaacaactcatgccacagtatgtcgtcttcatgtgtcttgcaatgaactgtttcagtagccaatcctctttcttagtatatgaaaggacagggattttgttcttgttgttctcgttgttgttttaagtttactggggaaagtgcatttggccaaatgaaatggtagtcaagcctattgcaacaaagttaggaagtttgttgtttgtttattataaacaaaaagcatgtgaaagtgcacttaagatagagtttttattaattacttacttattacctagattttaaatagacaatccaaagtctccccttcgtgttgccatcatcttgttgaatcagccattttatcgaggcacgtgatcagtgttgcaacataatgaaaaagatggctactgtgccttgtgttacttaatcatacagtaagctgacctggaaatgaatgaaactattactcctaagaattacattgtatagccccacagattaaatttaattaattaattcaaaacatgttaaacgttactttcatgtactatggaaaagtacaagtaggtttacattactgatttccagaagtaagtagtttcccctttcctagtcttctgtgtatgtgatgttgttaatttcttttattgcattataaaataaaaggattatgtatttttaactaaggtgagacattgatatatccttttgctacaagctatagctaatgtgctgagcttgtgccttggtgattgattgattgattgactgattgttttaactgattactgtagatcaacctgatgatttgtttgtttgaaattggcaggaaaaatgcagctttcaaatcattggggggagaaaaaggatgtctttcaggattattttaattaatttttttcataattgagacagaactgtttgttatgtaccataatgctaaataaaactgtggcacttttcaccataatttaatttagtggaaaaagaagacaatgctttccatattgtgataaggtaacatggggtttttctgggccagcctttagaacactgttagggtacatacgctaccttgatgaaagggaccttcgtgcaactgtagtcatcttaaaggcttctcatccactgtgcttcttaatgtgtaattaaagtgaggagaaattaaatactctgagggcgttttatataataaattcgtgaagaaatgtgtgctcttcagttctcaagttttattattatggtatttattaaagttctacaattgtaataacgtatccatatgacaagttttaaagtggtaattgaaataggttatcagatatagagttgttcacatcaagtagacttttaacagagtcagaatgaacctacccttaaaattttagagaaaaaaaatcgtcggttgcacagaatagctgctctagcttgcttaattatgccgggcatgttgtcactcctcttacttttgctgccttttcattactatttaatggaatgtccctgaacaataaggaagagcaaaacatagacattttgactacagtggatacttcctctaccccaaatgttatgttataaaagtactttttttgcccaggtactctattatatattttggttttctttgaattanacctcaatctccaggaagctctggagggaaaaaaaggaaccataaactaaagtaactggttttccaaataaatgtaaacttttttaaccttttattattatagaacatttcaaacatacataaaacatgaaaacagcctgcagccaaacttttctggaccttggcagctccagcaaatgagctggtcatcctaaccctggtttcctgagacaactacttttggggatgcttgcttgtatagggagatgatagatagatagatacatatcaaaaagaaacttgaaaaaggcttcgaacagaacttgccgatgttactcatccctcctcggtacagacattctgttagaacagatggttgtaatggggcagcatcactccctattcccattaaaaacatgaccattctgagatttcaggccccttcgaggaatttttctcaagaattccatacaaactgtcagaggaagaaatgtcgtcccaagactagtccctgtgtagtcttgatccctttacctgcttactgtaattttttttctctgactttccgccagtgtctaagggccatctgtacccctcccacccttccatgagccactgtataatccaaaaacacaccttccatttgctccctcacttgtctccttttacctcaacagtgttagtgtgtaaagaattgcctggggagggtagagggttttacaagtacagagtcccaagtcttttctcccctccccgttagtgggttggcatttattaataggcactgcaagattttgatgcaggtgtggggtagatatcactgtgaaaggctactaatgcatggtagtttcaccgaaagtacagtcttcaaggatccttataatctcctcattgccaaaatcagtaacatctataaccttgacaacaccctagcttgggctgttgcttctctggctacttgtttttccatcccagtttacccagattttagatggatactcctccaattctgcttaaagtccttacctgttcttgcccagttccctctagtcaacctcagtcactcccaaagattcttccccaatcccatatcttttgctcagacctctgtctctgggatttctttgttacctcatagtcagtagtcctaaaaacaaaattcttcatcttgcatctctatcgaccgaccattctttgtttctttttaagaaatgtaaccttcaccccaatcatcaaaatctctcattcctcaattgtcacaggttgtcacttctttccccctaaacctctcccatcattccttccttctttatactgcccttacaggtcctgatcctctgactcacccggacattcttagcagctgcctaatttcactccctgactctcatctccctcttccaatccttttcattgtgctagaacactatcttgctaattttaatatcctctgcattcagtgcctccacagattgccccctcactgacctttccaatttggccttgtgttacacactttcctcgctgcattcctacccagcatcttcacttgtcatatttctcaaatactcttcatgaccagatatttaaagtacctcatccatgaagacttcatcaacccccaaagtgcctccaatgcttccgtggtagcacagcataatggggtacatttcttagttgaacagtgaggagtcactgggattcttacagagtgtcttagggtctcctcttgatactctttccacatttcagttaaggaattttcttacatctttttttcttctaataacctttgcctggagtgtaagtaaattcatgatagagactgtcatttttaaaaaaaaaaaacaaaccattttgcctttcacatgttattacctccatctttctgttatcttgtcagtgttgccacctaaatgattgaaaatgaccgagcatgcagtagaatgtagtgaagtttcctatttcatccattttttgcataagtgcattggtatctgtatatccatctgcccaagcaccagttgttgaaaagactattatttccccatgaatggtcctggtacccttgtcaaagaacagttgaccataaatataagactttctggattctcagtcttactccattgccctatatgtctgtcgttataccagcaccgcactgtcttgattgctgtagcttggtagtaagtttagatttgggatgtgcaagtcctccattttttttttttttctccccaaaatcattttgtctgttttgggtcccttgcattgcatatgaatttttatatgatcattgtgtcaattcctgcaaaacagctgggatcttgatagggatttagttgaattggtagataaatttgagaaataactgctattttaatggtgttaggttttctgttccatgactgtgggatgtctttgcatttgcttaggtctttatttcagtgatgttttagagatttcagtgtgcaagtcttgacgtctttaatttttttctaagtattttactgatgccactttaattatatgattattttctaatttttatttttgtattcatcactggtgttagaaataaaattaatttttgtatattgattttgtatattgtagcttttctaaaattctttttttgtcacttagtattttttgcatatgagatcatgcatctgtgaacagaaatacttttacttcttcctttccagtctagattcctattatttcattttcttgccttagtgtgctggctagcacctccagtacaatattggatagaagtgacaagagcagacatctttttcttgttcctgattttaaggggaaagcattcagtctttcaccattgagtatgatgttagctagctgtgggtttgcttcaagttgaggaaattcttttattaaacctagtttactgagtgttttttaatcaaaaaaaaaaaaggaggggctgtgggttttgttaaatgcttcttctgtatcaagattttcatgttgttttgtcctttattaatatgttgtattaatggacttttgtatattgaattaactttgcattcctgggataatctcagttgtccatgctacataaaccttgttctatgctgctggatttggtttgctagtattttgtttagaatgtttgcatctatattcataaggaatattggtctgtagttttcatattatatatctgtccantttggggatgagagtcatactcctgacagaatgaattgggagctttccctgttcttaaacctactgaggtattttttaagtgaactacttggagaccttcacctgtgatcttcagatgctgggggacacagggatggtacctgactctgaaaaggctctcagggtaagacgtgtctgaactggcctgtggcagttaactaaagagtactcctaccaataatggagtcaagatgtatgtttcccataggccacgctggtcactgaaagagatgggctatgagccatcttgaaaactaccctgcacaaatggactgccggcctggagccaggcaccctgcagctgagtgccatataatgttgaagctgttgagggaggagaggttggaagctgccagcttagagaatctcagctgtggtttcccagcagggtgtattccccaggaaagaaagtcattcccccacccctggctcaaagtaataattaacagtgactgggtaaggcaggatctttttttcctaattccctcccctccagaaagggcagcaacagctcttgaatgggaaagaaggtggagggaggaaaagaaaaaccaattgccccaacactgctgtctttaagcttcccacccaaagacctcagtaagaggcagaattatgttttcaattaagagagagtttggcctcttggtgtttcaaaagtgtaggctttttaatacctagagaaactgatgatttgttgattaccaaaaagggaccagaaaagctacatagcctgagatttcatccccagaaaaacgaatccagagagcagacttgcaa

SEQ ID NO: 281371 - DNA, 5347 bp, Homo sapiens
aaccctcctgggggggggggtgcccagagggcttccggaagtcccaggtttattctttcgggtcacagacagcagaaactaaaaagagggattaccctttctgtccagtcgcaagatggcgaccgagcctggtgggactccgaggggccgcaggccacctcctcttcccaatggcccgtgcgccggcggcgacggcaagcgggagggaggcggggccggcgaaggaaggaggggcggagcgcggcgccctcccgcgcgtcttggccccgccccacgtccccgcgtcccggcctggagccctcgcccggccgggcggcgcgcgctgcctgccgggatactcggcccgcccagccagtcctcccgtcttgcgccgcggccgcgagatccgtgtgtctcccaagatggtggcgctgggctcggggtgactacaggagacgacggggccttttcccttcgccaggacccgacacaccaggcttcgctcgctcgcgcacccctccgccgcgtagccatccgccagcgcgggcgcccgccatccgccgcctacttacgcttcacctctgccgacccggcgcgctcggctgcgggcggcggcgcctccttcggctcctcctcggaatagctcgcggcctgtagcccctggcaggagggcccctcagccccccggtgtggacaggcagcggcggctggcgacgaacgccgggatttcggcggccccggcgctccctttcccggcctcgttttccggataaggaagcgcgggtcccgcatgagccccggcggtggcggcagcgaaagagaacgaggcggtggcgggcggaggcggcgggcgagggcgactacgaccagtgaggcggccgccgcagcccaggcgcgggggcgacgacaggttaaaaatctgtaagagcctgattttagaattcaccagctcctcagaagtttggcgaaatatgagttattaagcctacgctcagatcaaggtagcagctagactggtgtgacaacctgtttttaatcagtgactcaaagctgtgatcaccctgatgtcaccgaatggccacagcttgtaaaagagagttacagtggaggtaaaaggagtggcttgcaggatggagaagctgcaccagtgttattggaagtgagccaccatttgaatttgctagctcatgctgcagtattcagattatgccagcaggtttattttttgttttgcaagccagctctgcctccttacagtatgacatctgatgctggagggtcgcactttcaaaaatgagtcagctggtacatggggttatcatcaatttttagctcttctgtctgggagatacaagtttggaagcaatcttggggtacttacccacaaggctggtggagaccagatcaggagaacctcagtctgacgacattgaagctagccgaatgaagcgagcagctgcaaagcatctaatagaacgctactaccaccagttaactgagggctgtggaaatgaagcctgcacgaatgagttttgtgcttcctgtccaacttttcttcgtatggataataatgcagcagctattaaagccctcgagctttataagattaatgcaaaactctgtgatcctcatccctccaagaaaggagcaagctcagcttaccttgagaactcgaaaggtgcccccaacaactcctgctctgagataaaaatgaacaagaaaggcgctagaattgattttaaagatgtgacttacttaacagaagagaaggtatatgaaattcttgaattatgtagagaaagagaggattattcccctttaatccgtgttattggaagagttttttctagtgctgaggcattggtacagagcttccggaaagttaaacaacacaccaaggaagaactgaaatctcttcaagcaaaagatgaagacaaagatgaagatgaaaaggaaaaagctgcatgttctgctgctgctatggaagaagactcagaagcatcttcctcaaggataggtgatagctcacagggagacaacaatttgcaaaaattaggccctgatgatgtgtctgtggatattgatgccattagaagggtctacaccagattgctctctaatgaaaaaattgaaactgcctttctcaatgcacttgtatatttgtcacctaacgtggaatgtgacttgacgtatcacaatgtatactctcgagatcctaattatctgaatttgttcattatcgtaatggagaatagaaatctccacagtcctgaatatctggaaatggctttgccattattttgcaaagcgatgagcaagctaccccttgcagcccaaggaaaactgatcagactgtggtctaaatacaatgcagaccagattcggagaatgatggagacatttcagcaacttattacttataaagtcataagcaatgaatttaacagtcgaaatctagtgaatgatgatgatgccattgttgctgcttcgaagtgcttgaaaatggtttactatgcaaatgtagtgggaggggaagtggacacaaatcacaatgaagaagatgatgaagagcccatccctgagtccagcgagctgacacttcaggaacttttgggagaagaaagaagaaacaagaaaggtcctcgagtggaccccctggaaactgaacttggtgttaaaaccctggattgtcgaaaaccacttatcccttttgaagagtttattaatgaaccactgaatgaggttctagaaatggataaagattatacttttttcaaagtagaaacagagaacaaattctcttttatgacatgtccctttatattgaatgctgtcacaaagaatttgggattatattatgacaatagaattcgcatgtacagtgaacgaagaatcactgttctctacagcttagttcaaggacagcagttgaatccatatttgagactcaaagttagacgtgaccatatcatagatgatgcacttgtccggctagagatgatcgctatggaaaatcctgcagacttgaagaagcagttgtatgtggaatttgaaggagaacaaggagttgatgagggaggtgtttccaaagaattttttcagctggttgtggaggaaatcttcaatccagatattggtatgttcacatacgatgaatctacaaaattgttttggtttaatccatcttcttttgaaactgagggtcagtttactctgattggcatagtactgggtctggctatttacaataactgtatactggatgtacattttcccatggttgtctacaggaagctaatggggaaaaaaggaacttttcgtgacttgggagactctcacccagttctatatcagagtttaaaagatttattggagtatgaagggaatgtggaagatgacatgatgatcactttccagatatcacagacagatctttttggtaacccaatgatgtatgatctaaaggaaaatggtgataaaattccaattacaaatgaaaacaggaaggaatttgtcaatctttattctgactacattctcaataaatcagtagaaaaacagttcaaggcttttcggagaggttttcatatggtgaccaatgaatctcccttaaagtacttattcagaccagaagaaattgaattgcttatatgtggaagccggaatctagatttccaagcactagaagaaactacagaatatgacggtggctataccagggactctgttctgattagggagttctgggaaatcgttcattcatttacagatgaacagaaaagactcttcttgcagtttacaacgggcacagacagagcacctgtgggaggactaggaaaattaaagatgattatagccaaaaatggcccagacacagaaaggttacctacatctcatacttgctttaatgtgcttttacttccggaatactcaagcaaagaaaaacttaaagagagattgttgaaggccatcacgtatgccaaaggatttggcatgctgtaaaacaaaacaaaacaaaataaaacaaaaaaaaggaaggaaaaaaaaagaaaaaatttaaaaaattttaaaaatataacgagggataaatttttggtggtgatagtgtcccagtacaaaaaggctgtaagatagtcaaccacagtagtcacctatgtctgtgcctcccttctttattggggacatgtgggctggaacagcagatttcagctacatatatgaacaaatcctttattattattataattatttttttgcgtgaaagtgttacatattctttcacttgtatgtacagagaggtttttctgaatatttattttaagggttaaatcacttttgcttgtgtttattactgcttgaggttgagccttttgagtatttaaaaaatatataccaacagaactactctcccaaggaaaatattgccaccatttgtagaccacgtaaccttcaagtatgtgctacttttttgtccctgtatctaactcaaatcaggaactgtattttttttaatgatttgcttttgaaacttgaagtcttgaaaacagtgtgatgcaattactgctgttctagcccccaaagagttttctgtgcaaaatcttgagaatcaatcaataaagaaagatggaaggaagggagaaattggaatgttttaactgcagccctcagaactttagtaacagcacaacaaattaaaaacaaaaacaactcatgccacagtatgtcgtcttcatgtgtcttgcaatgaactgtttcagtagccaatcctctttcttagtatatgaaaggacagggattttgttcttgttgttctcgttgttgttttaagtttactggggaaagtgcatttggccaaatgaaatggtagtcaagcctattgcaacaaagttaggaagtttgttgtttgtttattataaacaaaaagcatgtgaaagtgcacttaagatagagtttttattaattacttacttattacctagattttaaatagacaatccaaagtctccccttcgtgttgccatcatcttgttgaatcagccattttatcgaggcacgtgatcagtgttgcaacataatgaaaaagatggctactgtgccttgtgttacttaatcatacagtaagctgacctggaaatgaatgaaactattactcctaagaattacattgtatagccccacagattaaatttaattaattaattcaaaacatgttaaacgttactttcatgtactatggaaaagtacaagtaggtttacattactgatttccagaagtaagtagtttcccctttcctagtcttctgtgtatgtgatgttgttaatttcttttattgcattataaaataaaaggattatgtatttttaacta

SEQ ID NO: 281372 - DNA, 9804 bp, Homo sapiens
  misc_feature (5805)..(5805): n is a, c, g, or t
  misc_feature (8985)..(8985): n is a, c, g, or t
aaccctcctgggggggggggtgcccagagggcttccggaagtcccaggtttattctttcgggtcacagacagcagaaactaaaaagagggattaccctttctgtccagtcgcaagatggcgaccgagcctggtgggactccgaggggccgcaggccacctcctcttcccaatggcccgtgcgccggcggcgacggcaagcgggagggaggcggggccggcgaaggaaggaggggcggagcgcggcgccctcccgcgcgtcttggccccgccccacgtccccgcgtcccggcctggagccctcgcccggccgggcggcgcgcgctgcctgccgggatactcggcccgcccagccagtcctcccgtcttgcgccgcggccgcgagatccgtgtgtctcccaagatggtggcgctgggctcggggtgactacaggagacgacggggccttttcccttcgccaggacccgacacaccaggcttcgctcgctcgcgcacccctccgccgcgtagccatccgccagcgcgggcgcccgccatccgccgcctacttacgcttcacctctgccgacccggcgcgctcggctgcgggcggcggcgcctccttcggctcctcctcggaatagctcgcggcctgtagcccctggcaggagggcccctcagccccccggtgtggacaggcagcggcggctggcgacgaacgccgggatttcggcggccccggcgctccctttcccggcctcgttttccggataaggaagcgcgggtcccgcatgagccccggcggtggcggcagcgaaagagaacgaggcggtggcgggcggaggcggcgggcgagggcgactacgaccagtgaggcggccgccgcagcccaggcgcgggggcgacgacagatcaggagaacctcagtctgacgacattgaagctagccgaatgaagcgagcagctgcaaagcatctaatagaacgctactaccaccagttaactgagggctgtggaaatgaagcctgcacgaatgagttttgtgcttcctgtccaacttttcttcgtatggataataatgcagcagctattaaagccctcgagctttataagattaatgcaaaactctgtgatcctcatccctccaagaaaggagcaagctcagcttaccttgagaactcgaaaggtgcccccaacaactcctgctctgagataaaaatgaacaagaaaggcgctagaattgattttaaagatgtgacttacttaacagaagagaaggtatatgaaattcttgaattatgtagagaaagagaggattattcccctttaatccgtgttattggaagagttttttctagtgctgaggcattggtacagagcttccggaaagttaaacaacacaccaaggaagaactgaaatctcttcaagcaaaagatgaagacaaagatgaagatgaaaaggaaaaagctgcatgttctgctgctgctatggaagaagactcagaagcatcttcctcaaggataggtgatagctcacagggagacaacaatttgcaaaaattaggccctgatgatgtgtctgtggatattgatgccattagaagggtctacaccagattgctctctaatgaaaaaattgaaactgcctttctcaatgcacttgtatatttgtcacctaacgtggaatgtgacttgacgtatcacaatgtatactctcgagatcctaattatctgaatttgttcattatcgtaatggagaatagaaatctccacagtcctgaatatctggaaatggctttgccattattttgcaaagcgatgagcaagctaccccttgcagcccaaggaaaactgatcagactgtggtctaaatacaatgcagaccagattcggagaatgatggagacatttcagcaacttattacttataaagtcataagcaatgaatttaacagtcgaaatctagtgaatgatgatgatgccattgttgctgcttcgaagtgcttgaaaatggtttactatgcaaatgtagtgggaggggaagtggacacaaatcacaatgaagaagatgatgaagagcccatccctgagtccagcgagctgacacttcaggaacttttgggagaagaaagaagaaacaagaaaggtcctcgagtggaccccctggaaactgaacttggtgttaaaaccctggattgtcgaaaaccacttatcccttttgaagagtttattaatgaaccactgaatgaggttctagaaatggataaagattatacttttttcaaagtagaaacagagaacaaattctcttttatgacatgtccctttatattgaatgctgtcacaaagaatttgggattatattatgacaatagaattcgcatgtacagtgaacgaagaatcactgttctctacagcttagttcaaggacagcagttgaatccatatttgagactcaaagttagacgtgaccatatcatagatgatgcacttgtccggctagagatgatcgctatggaaaatcctgcagacttgaagaagcagttgtatgtggaatttgaaggagaacaaggagttgatgagggaggtgtttccaaagaattttttcagctggttgtggaggaaatcttcaatccagatattggtatgttcacatacgatgaatctacaaaattgttttggtttaatccatcttcttttgaaactgagggtcagtttactctgattggcatagtactgggtctggctatttacaataactgtatactggatgtacattttcccatggttgtctacaggaagctaatggggaaaaaaggaacttttcgtgacttgggagactctcacccagttctatatcagagtttaaaagatttattggagtatgaagggaatgtggaagatgacatgatgatcactttccagatatcacagacagatctttttggtaacccaatgatgtatgatctaaaggaaaatggtgataaaattccaattacaaatgaaaacaggaaggaatttgtcaatctttattctgactacattctcaataaatcagtagaaaaacagttcaaggcttttcggagaggttttcatatggtgaccaatgaatctcccttaaagtacttattcagaccagaagaaattgaattgcttatatgtggaagccggaatctagatttccaagcactagaagaaactacagaatatgacggtggctataccagggactctgttctgattagggagttctgggaaatcgttcattcatttacagatgaacagaaaagactcttcttgcagtttacaacgggcacagacagagcacctgtgggaggactaggaaaattaaagatgattatagccaaaaatggcccagacacagaaaggttacctacatctcatacttgctttaatgtgcttttacttccggaatactcaagcaaagaaaaacttaaagagagattgttgaaggccatcacgtatgccaaaggatttggcatgctgtaaaacaaaacaaaacaaaataaaacaaaaaaaaggaaggaaaaaaaaagaaaaaatttaaaaaattttaaaaatataacgagggataaatttttggtggtgatagtgtcccagtacaaaaaggctgtaagatagtcaaccacagtagtcacctatgtctgtgcctcccttctttattggggacatgtgggctggaacagcagatttcagctacatatatgaacaaatcctttattattattataattatttttttgcgtgaaagtgttacatattctttcacttgtatgtacagagaggtttttctgaatatttattttaagggttaaatcacttttgcttgtgtttattactgcttgaggttgagccttttgagtatttaaaaaatatataccaacagaactactctcccaaggaaaatattgccaccatttgtagaccacgtaaccttcaagtatgtgctacttttttgtccctgtatctaactcaaatcaggaactgtattttttttaatgatttgcttttgaaacttgaagtcttgaaaacagtgtgatgcaattactgctgttctagcccccaaagagttttctgtgcaaaatcttgagaatcaatcaataaagaaagatggaaggaagggagaaattggaatgttttaactgcagccctcagaactttagtaacagcacaacaaattaaaaacaaaaacaactcatgccacagtatgtcgtcttcatgtgtcttgcaatgaactgtttcagtagccaatcctctttcttagtatatgaaaggacagggattttgttcttgttgttctcgttgttgttttaagtttactggggaaagtgcatttggccaaatgaaatggtagtcaagcctattgcaacaaagttaggaagtttgttgtttgtttattataaacaaaaagcatgtgaaagtgcacttaagatagagtttttattaattacttacttattacctagattttaaatagacaatccaaagtctccccttcgtgttgccatcatcttgttgaatcagccattttatcgaggcacgtgatcagtgttgcaacataatgaaaaagatggctactgtgccttgtgttacttaatcatacagtaagctgacctggaaatgaatgaaactattactcctaagaattacattgtatagccccacagattaaatttaattaattaattcaaaacatgttaaacgttactttcatgtactatggaaaagtacaagtaggtttacattactgatttccagaagtaagtagtttcccctttcctagtcttctgtgtatgtgatgttgttaatttcttttattgcattataaaataaaaggattatgtatttttaactaaggtgagacattgatatatccttttgctacaagctatagctaatgtgctgagcttgtgccttggtgattgattgattgattgactgattgttttaactgattactgtagatcaacctgatgatttgtttgtttgaaattggcaggaaaaatgcagctttcaaatcattggggggagaaaaaggatgtctttcaggattattttaattaatttttttcataattgagacagaactgtttgttatgtaccataatgctaaataaaactgtggcacttttcaccataatttaatttagtggaaaaagaagacaatgctttccatattgtgataaggtaacatggggtttttctgggccagcctttagaacactgttagggtacatacgctaccttgatgaaagggaccttcgtgcaactgtagtcatcttaaaggcttctcatccactgtgcttcttaatgtgtaattaaagtgaggagaaattaaatactctgagggcgttttatataataaattcgtgaagaaatgtgtgctcttcagttctcaagttttattattatggtatttattaaagttctacaattgtaataacgtatccatatgacaagttttaaagtggtaattgaaataggttatcagatatagagttgttcacatcaagtagacttttaacagagtcagaatgaacctacccttaaaattttagagaaaaaaaatcgtcggttgcacagaatagctgctctagcttgcttaattatgccgggcatgttgtcactcctcttacttttgctgccttttcattactatttaatggaatgtccctgaacaataaggaagagcaaaacatagacattttgactacagtggatacttcctctaccccaaatgttatgttataaaagtactttttttgcccaggtactctattatatattttggttttctttgaattanacctcaatctccaggaagctctggagggaaaaaaaggaaccataaactaaagtaactggttttccaaataaatgtaaacttttttaaccttttattattatagaacatttcaaacatacataaaacatgaaaacagcctgcagccaaacttttctggaccttggcagctccagcaaatgagctggtcatcctaaccctggtttcctgagacaactacttttggggatgcttgcttgtatagggagatgatagatagatagatacatatcaaaaagaaacttgaaaaaggcttcgaacagaacttgccgatgttactcatccctcctcggtacagacattctgttagaacagatggttgtaatggggcagcatcactccctattcccattaaaaacatgaccattctgagatttcaggccccttcgaggaatttttctcaagaattccatacaaactgtcagaggaagaaatgtcgtcccaagactagtccctgtgtagtcttgatccctttacctgcttactgtaattttttttctctgactttccgccagtgtctaagggccatctgtacccctcccacccttccatgagccactgtataatccaaaaacacaccttccatttgctccctcacttgtctccttttacctcaacagtgttagtgtgtaaagaattgcctggggagggtagagggttttacaagtacagagtcccaagtcttttctcccctccccgttagtgggttggcatttattaataggcactgcaagattttgatgcaggtgtggggtagatatcactgtgaaaggctactaatgcatggtagtttcaccgaaagtacagtcttcaaggatccttataatctcctcattgccaaaatcagtaacatctataaccttgacaacaccctagcttgggctgttgcttctctggctacttgtttttccatcccagtttacccagattttagatggatactcctccaattctgcttaaagtccttacctgttcttgcccagttccctctagtcaacctcagtcactcccaaagattcttccccaatcccatatcttttgctcagacctctgtctctgggatttctttgttacctcatagtcagtagtcctaaaaacaaaattcttcatcttgcatctctatcgaccgaccattctttgtttctttttaagaaatgtaaccttcaccccaatcatcaaaatctctcattcctcaattgtcacaggttgtcacttctttccccctaaacctctcccatcattccttccttctttatactgcccttacaggtcctgatcctctgactcacccggacattcttagcagctgcctaatttcactccctgactctcatctccctcttccaatccttttcattgtgctagaacactatcttgctaattttaatatcctctgcattcagtgcctccacagattgccccctcactgacctttccaatttggccttgtgttacacactttcctcgctgcattcctacccagcatcttcacttgtcatatttctcaaatactcttcatgaccagatatttaaagtacctcatccatgaagacttcatcaacccccaaagtgcctccaatgcttccgtggtagcacagcataatggggtacatttcttagttgaacagtgaggagtcactgggattcttacagagtgtcttagggtctcctcttgatactctttccacatttcagttaaggaattttcttacatctttttttcttctaataacctttgcctggagtgtaagtaaattcatgatagagactgtcatttttaaaaaaaaaaaacaaaccattttgcctttcacatgttattacctccatctttctgttatcttgtcagtgttgccacctaaatgattgaaaatgaccgagcatgcagtagaatgtagtgaagtttcctatttcatccattttttgcataagtgcattggtatctgtatatccatctgcccaagcaccagttgttgaaaagactattatttccccatgaatggtcctggtacccttgtcaaagaacagttgaccataaatataagactttctggattctcagtcttactccattgccctatatgtctgtcgttataccagcaccgcactgtcttgattgctgtagcttggtagtaagtttagatttgggatgtgcaagtcctccattttttttttttttctccccaaaatcattttgtctgttttgggtcccttgcattgcatatgaatttttatatgatcattgtgtcaattcctgcaaaacagctgggatcttgatagggatttagttgaattggtagataaatttgagaaataactgctattttaatggtgttaggttttctgttccatgactgtgggatgtctttgcatttgcttaggtctttatttcagtgatgttttagagatttcagtgtgcaagtcttgacgtctttaatttttttctaagtattttactgatgccactttaattatatgattattttctaatttttatttttgtattcatcactggtgttagaaataaaattaatttttgtatattgattttgtatattgtagcttttctaaaattctttttttgtcacttagtattttttgcatatgagatcatgcatctgtgaacagaaatacttttacttcttcctttccagtctagattcctattatttcattttcttgccttagtgtgctggctagcacctccagtacaatattggatagaagtgacaagagcagacatctttttcttgttcctgattttaaggggaaagcattcagtctttcaccattgagtatgatgttagctagctgtgggtttgcttcaagttgaggaaattcttttattaaacctagtttactgagtgttttttaatcaaaaaaaaaaaaggaggggctgtgggttttgttaaatgcttcttctgtatcaagattttcatgttgttttgtcctttattaatatgttgtattaatggacttttgtatattgaattaactttgcattcctgggataatctcagttgtccatgctacataaaccttgttctatgctgctggatttggtttgctagtattttgtttagaatgtttgcatctatattcataaggaatattggtctgtagttttcatattatatatctgtccantttggggatgagagtcatactcctgacagaatgaattgggagctttccctgttcttaaacctactgaggtattttttaagtgaactacttggagaccttcacctgtgatcttcagatgctgggggacacagggatggtacctgactctgaaaaggctctcagggtaagacgtgtctgaactggcctgtggcagttaactaaagagtactcctaccaataatggagtcaagatgtatgtttcccataggccacgctggtcactgaaagagatgggctatgagccatcttgaaaactaccctgcacaaatggactgccggcctggagccaggcaccctgcagctgagtgccatataatgttgaagctgttgagggaggagaggttggaagctgccagcttagagaatctcagctgtggtttcccagcagggtgtattccccaggaaagaaagtcattcccccacccctggctcaaagtaataattaacagtgactgggtaaggcaggatctttttttcctaattccctcccctccagaaagggcagcaacagctcttgaatgggaaagaaggtggagggaggaaaagaaaaaccaattgccccaacactgctgtctttaagcttcccacccaaagacctcagtaagaggcagaattatgttttcaattaagagagagtttggcctcttggtgtttcaaaagtgtaggctttttaatacctagagaaactgatgatttgttgattaccaaaaagggaccagaaaagctacatagcctgagatttcatccccagaaaaacgaatccagagagcagacttgcaa

SEQ ID NO: 281373 - DNA, 9384 bp, Homo sapiens
  misc_feature (5385)..(5385): n is a, c, g, or t
  misc_feature (8565)..(8565): n is a, c, g, or t
tgcgcagaagtaggcccctggtggccgcggctgctgcagccgtaactgtcagtcctggctgagcgacggcgggagggttttgtcgcccgaggggacgcgagcgggcccggggcggggcgggacgtgcgaggcgtcgagatttgggcctcctaggagccaggctcttcgagccagccggggccccagacagggaagggcaggccctttccttcaaaggggagccctttctcggcgttttcaaggtttttggctctcttggggaagacatatttagccgtgtgcttggttaaaaatctgtaagagcctgattttagaattcaccagctcctcagaagtttggcgaaatatgagttattaagcctacgctcagatcaaggtagcagctagactggtgtgacaacctgtttttaatcagtgactcaaagctgtgatcaccctgatgtcaccgaatggccacagcttgtaaaagatcaggagaacctcagtctgacgacattgaagctagccgaatgaagcgagcagctgcaaagcatctaatagaacgctactaccaccagttaactgagggctgtggaaatgaagcctgcacgaatgagttttgtgcttcctgtccaacttttcttcgtatggataataatgcagcagctattaaagccctcgagctttataagattaatgcaaaactctgtgatcctcatccctccaagaaaggagcaagctcagcttaccttgagaactcgaaaggtgcccccaacaactcctgctctgagataaaaatgaacaagaaaggcgctagaattgattttaaagatgtgacttacttaacagaagagaaggtatatgaaattcttgaattatgtagagaaagagaggattattcccctttaatccgtgttattggaagagttttttctagtgctgaggcattggtacagagcttccggaaagttaaacaacacaccaaggaagaactgaaatctcttcaagcaaaagatgaagacaaagatgaagatgaaaaggaaaaagctgcatgttctgctgctgctatggaagaagactcagaagcatcttcctcaaggataggtgatagctcacagggagacaacaatttgcaaaaattaggccctgatgatgtgtctgtggatattgatgccattagaagggtctacaccagattgctctctaatgaaaaaattgaaactgcctttctcaatgcacttgtatatttgtcacctaacgtggaatgtgacttgacgtatcacaatgtatactctcgagatcctaattatctgaatttgttcattatcgtaatggagaatagaaatctccacagtcctgaatatctggaaatggctttgccattattttgcaaagcgatgagcaagctaccccttgcagcccaaggaaaactgatcagactgtggtctaaatacaatgcagaccagattcggagaatgatggagacatttcagcaacttattacttataaagtcataagcaatgaatttaacagtcgaaatctagtgaatgatgatgatgccattgttgctgcttcgaagtgcttgaaaatggtttactatgcaaatgtagtgggaggggaagtggacacaaatcacaatgaagaagatgatgaagagcccatccctgagtccagcgagctgacacttcaggaacttttgggagaagaaagaagaaacaagaaaggtcctcgagtggaccccctggaaactgaacttggtgttaaaaccctggattgtcgaaaaccacttatcccttttgaagagtttattaatgaaccactgaatgaggttctagaaatggataaagattatacttttttcaaagtagaaacagagaacaaattctcttttatgacatgtccctttatattgaatgctgtcacaaagaatttgggattatattatgacaatagaattcgcatgtacagtgaacgaagaatcactgttctctacagcttagttcaaggacagcagttgaatccatatttgagactcaaagttagacgtgaccatatcatagatgatgcacttgtccggctagagatgatcgctatggaaaatcctgcagacttgaagaagcagttgtatgtggaatttgaaggagaacaaggagttgatgagggaggtgtttccaaagaattttttcagctggttgtggaggaaatcttcaatccagatattggtatgttcacatacgatgaatctacaaaattgttttggtttaatccatcttcttttgaaactgagggtcagtttactctgattggcatagtactgggtctggctatttacaataactgtatactggatgtacattttcccatggttgtctacaggaagctaatggggaaaaaaggaacttttcgtgacttgggagactctcacccagttctatatcagagtttaaaagatttattggagtatgaagggaatgtggaagatgacatgatgatcactttccagatatcacagacagatctttttggtaacccaatgatgtatgatctaaaggaaaatggtgataaaattccaattacaaatgaaaacaggaaggaatttgtcaatctttattctgactacattctcaataaatcagtagaaaaacagttcaaggcttttcggagaggttttcatatggtgaccaatgaatctcccttaaagtacttattcagaccagaagaaattgaattgcttatatgtggaagccggaatctagatttccaagcactagaagaaactacagaatatgacggtggctataccagggactctgttctgattagggagttctgggaaatcgttcattcatttacagatgaacagaaaagactcttcttgcagtttacaacgggcacagacagagcacctgtgggaggactaggaaaattaaagatgattatagccaaaaatggcccagacacagaaaggttacctacatctcatacttgctttaatgtgcttttacttccggaatactcaagcaaagaaaaacttaaagagagattgttgaaggccatcacgtatgccaaaggatttggcatgctgtaaaacaaaacaaaacaaaataaaacaaaaaaaaggaaggaaaaaaaaagaaaaaatttaaaaaattttaaaaatataacgagggataaatttttggtggtgatagtgtcccagtacaaaaaggctgtaagatagtcaaccacagtagtcacctatgtctgtgcctcccttctttattggggacatgtgggctggaacagcagatttcagctacatatatgaacaaatcctttattattattataattatttttttgcgtgaaagtgttacatattctttcacttgtatgtacagagaggtttttctgaatatttattttaagggttaaatcacttttgcttgtgtttattactgcttgaggttgagccttttgagtatttaaaaaatatataccaacagaactactctcccaaggaaaatattgccaccatttgtagaccacgtaaccttcaagtatgtgctacttttttgtccctgtatctaactcaaatcaggaactgtattttttttaatgatttgcttttgaaacttgaagtcttgaaaacagtgtgatgcaattactgctgttctagcccccaaagagttttctgtgcaaaatcttgagaatcaatcaataaagaaagatggaaggaagggagaaattggaatgttttaactgcagccctcagaactttagtaacagcacaacaaattaaaaacaaaaacaactcatgccacagtatgtcgtcttcatgtgtcttgcaatgaactgtttcagtagccaatcctctttcttagtatatgaaaggacagggattttgttcttgttgttctcgttgttgttttaagtttactggggaaagtgcatttggccaaatgaaatggtagtcaagcctattgcaacaaagttaggaagtttgttgtttgtttattataaacaaaaagcatgtgaaagtgcacttaagatagagtttttattaattacttacttattacctagattttaaatagacaatccaaagtctccccttcgtgttgccatcatcttgttgaatcagccattttatcgaggcacgtgatcagtgttgcaacataatgaaaaagatggctactgtgccttgtgttacttaatcatacagtaagctgacctggaaatgaatgaaactattactcctaagaattacattgtatagccccacagattaaatttaattaattaattcaaaacatgttaaacgttactttcatgtactatggaaaagtacaagtaggtttacattactgatttccagaagtaagtagtttcccctttcctagtcttctgtgtatgtgatgttgttaatttcttttattgcattataaaataaaaggattatgtatttttaactaaggtgagacattgatatatccttttgctacaagctatagctaatgtgctgagcttgtgccttggtgattgattgattgattgactgattgttttaactgattactgtagatcaacctgatgatttgtttgtttgaaattggcaggaaaaatgcagctttcaaatcattggggggagaaaaaggatgtctttcaggattattttaattaatttttttcataattgagacagaactgtttgttatgtaccataatgctaaataaaactgtggcacttttcaccataatttaatttagtggaaaaagaagacaatgctttccatattgtgataaggtaacatggggtttttctgggccagcctttagaacactgttagggtacatacgctaccttgatgaaagggaccttcgtgcaactgtagtcatcttaaaggcttctcatccactgtgcttcttaatgtgtaattaaagtgaggagaaattaaatactctgagggcgttttatataataaattcgtgaagaaatgtgtgctcttcagttctcaagttttattattatggtatttattaaagttctacaattgtaataacgtatccatatgacaagttttaaagtggtaattgaaataggttatcagatatagagttgttcacatcaagtagacttttaacagagtcagaatgaacctacccttaaaattttagagaaaaaaaatcgtcggttgcacagaatagctgctctagcttgcttaattatgccgggcatgttgtcactcctcttacttttgctgccttttcattactatttaatggaatgtccctgaacaataaggaagagcaaaacatagacattttgactacagtggatacttcctctaccccaaatgttatgttataaaagtactttttttgcccaggtactctattatatattttggttttctttgaattanacctcaatctccaggaagctctggagggaaaaaaaggaaccataaactaaagtaactggttttccaaataaatgtaaacttttttaaccttttattattatagaacatttcaaacatacataaaacatgaaaacagcctgcagccaaacttttctggaccttggcagctccagcaaatgagctggtcatcctaaccctggtttcctgagacaactacttttggggatgcttgcttgtatagggagatgatagatagatagatacatatcaaaaagaaacttgaaaaaggcttcgaacagaacttgccgatgttactcatccctcctcggtacagacattctgttagaacagatggttgtaatggggcagcatcactccctattcccattaaaaacatgaccattctgagatttcaggccccttcgaggaatttttctcaagaattccatacaaactgtcagaggaagaaatgtcgtcccaagactagtccctgtgtagtcttgatccctttacctgcttactgtaattttttttctctgactttccgccagtgtctaagggccatctgtacccctcccacccttccatgagccactgtataatccaaaaacacaccttccatttgctccctcacttgtctccttttacctcaacagtgttagtgtgtaaagaattgcctggggagggtagagggttttacaagtacagagtcccaagtcttttctcccctccccgttagtgggttggcatttattaataggcactgcaagattttgatgcaggtgtggggtagatatcactgtgaaaggctactaatgcatggtagtttcaccgaaagtacagtcttcaaggatccttataatctcctcattgccaaaatcagtaacatctataaccttgacaacaccctagcttgggctgttgcttctctggctacttgtttttccatcccagtttacccagattttagatggatactcctccaattctgcttaaagtccttacctgttcttgcccagttccctctagtcaacctcagtcactcccaaagattcttccccaatcccatatcttttgctcagacctctgtctctgggatttctttgttacctcatagtcagtagtcctaaaaacaaaattcttcatcttgcatctctatcgaccgaccattctttgtttctttttaagaaatgtaaccttcaccccaatcatcaaaatctctcattcctcaattgtcacaggttgtcacttctttccccctaaacctctcccatcattccttccttctttatactgcccttacaggtcctgatcctctgactcacccggacattcttagcagctgcctaatttcactccctgactctcatctccctcttccaatccttttcattgtgctagaacactatcttgctaattttaatatcctctgcattcagtgcctccacagattgccccctcactgacctttccaatttggccttgtgttacacactttcctcgctgcattcctacccagcatcttcacttgtcatatttctcaaatactcttcatgaccagatatttaaagtacctcatccatgaagacttcatcaacccccaaagtgcctccaatgcttccgtggtagcacagcataatggggtacatttcttagttgaacagtgaggagtcactgggattcttacagagtgtcttagggtctcctcttgatactctttccacatttcagttaaggaattttcttacatctttttttcttctaataacctttgcctggagtgtaagtaaattcatgatagagactgtcatttttaaaaaaaaaaaacaaaccattttgcctttcacatgttattacctccatctttctgttatcttgtcagtgttgccacctaaatgattgaaaatgaccgagcatgcagtagaatgtagtgaagtttcctatttcatccattttttgcataagtgcattggtatctgtatatccatctgcccaagcaccagttgttgaaaagactattatttccccatgaatggtcctggtacccttgtcaaagaacagttgaccataaatataagactttctggattctcagtcttactccattgccctatatgtctgtcgttataccagcaccgcactgtcttgattgctgtagcttggtagtaagtttagatttgggatgtgcaagtcctccattttttttttttttctccccaaaatcattttgtctgttttgggtcccttgcattgcatatgaatttttatatgatcattgtgtcaattcctgcaaaacagctgggatcttgatagggatttagttgaattggtagataaatttgagaaataactgctattttaatggtgttaggttttctgttccatgactgtgggatgtctttgcatttgcttaggtctttatttcagtgatgttttagagatttcagtgtgcaagtcttgacgtctttaatttttttctaagtattttactgatgccactttaattatatgattattttctaatttttatttttgtattcatcactggtgttagaaataaaattaatttttgtatattgattttgtatattgtagcttttctaaaattctttttttgtcacttagtattttttgcatatgagatcatgcatctgtgaacagaaatacttttacttcttcctttccagtctagattcctattatttcattttcttgccttagtgtgctggctagcacctccagtacaatattggatagaagtgacaagagcagacatctttttcttgttcctgattttaaggggaaagcattcagtctttcaccattgagtatgatgttagctagctgtgggtttgcttcaagttgaggaaattcttttattaaacctagtttactgagtgttttttaatcaaaaaaaaaaaaggaggggctgtgggttttgttaaatgcttcttctgtatcaagattttcatgttgttttgtcctttattaatatgttgtattaatggacttttgtatattgaattaactttgcattcctgggataatctcagttgtccatgctacataaaccttgttctatgctgctggatttggtttgctagtattttgtttagaatgtttgcatctatattcataaggaatattggtctgtagttttcatattatatatctgtccantttggggatgagagtcatactcctgacagaatgaattgggagctttccctgttcttaaacctactgaggtattttttaagtgaactacttggagaccttcacctgtgatcttcagatgctgggggacacagggatggtacctgactctgaaaaggctctcagggtaagacgtgtctgaactggcctgtggcagttaactaaagagtactcctaccaataatggagtcaagatgtatgtttcccataggccacgctggtcactgaaagagatgggctatgagccatcttgaaaactaccctgcacaaatggactgccggcctggagccaggcaccctgcagctgagtgccatataatgttgaagctgttgagggaggagaggttggaagctgccagcttagagaatctcagctgtggtttcccagcagggtgtattccccaggaaagaaagtcattcccccacccctggctcaaagtaataattaacagtgactgggtaaggcaggatctttttttcctaattccctcccctccagaaagggcagcaacagctcttgaatgggaaagaaggtggagggaggaaaagaaaaaccaattgccccaacactgctgtctttaagcttcccacccaaagacctcagtaagaggcagaattatgttttcaattaagagagagtttggcctcttggtgtttcaaaagtgtaggctttttaatacctagagaaactgatgatttgttgattaccaaaaagggaccagaaaagctacatagcctgagatttcatccccagaaaaacgaatccagagagcagacttgcaa

SEQ ID NO: 281374 - DNA, 4654 bp, Homo sapiens
aaccctcctgggggggggggtgcccagagggcttccggaagtcccaggtttattctttcgggtcacagacagcagaaactaaaaagagggattaccctttctgtccagtcgcaagatggcgaccgagcctggtgggactccgaggggccgcaggccacctcctcttcccaatggcccgtgcgccggcggcgacggcaagcgggagggaggcggggccggcgaaggaaggaggggcggagcgcggcgccctcccgcgcgtcttggccccgccccacgtccccgcgtcccggcctggagccctcgcccggccgggcggcgcgcgctgcctgccgggatactcggcccgcccagccagtcctcccgtcttgcgccgcggccgcgagatccgtgtgtctcccaagatggtggcgctgggctcggggtgactacaggagacgacggggccttttcccttcgccaggacccgacacaccaggcttcgctcgctcgcgcacccctccgccgcgtagccatccgccagcgcgggcgcccgccatccgccgcctacttacgcttcacctctgccgacccggcgcgctcggctgcgggcggcggcgcctccttcggctcctcctcggaatagctcgcggcctgtagcccctggcaggagggcccctcagccccccggtgtggacaggcagcggcggctggcgacgaacgccgggatttcggcggccccggcgctccctttcccggcctcgttttccggataaggaagcgcgggtcccgcatgagccccggcggtggcggcagcgaaagagaacgaggcggtggcgggcggaggcggcgggcgagggcgactacgaccagtgaggcggccgccgcagcccaggcgcgggggcgacgacaggttaaaaatctgtaagagcctgattttagaattcaccagctcctcagaagtttggcgaaatatgagttattaagcctacgctcagatcaaggtagcagctagactggtgtgacaacctgtttttaatcagtgactcaaagctgtgatcaccctgatgtcaccgaatggccacagcttgtaaaagagagttacagtggaggtaaaaggagtggcttgcaggatggagaagctgcaccagtgttattggaagtgagccaccatttgaatttgctagctcatgctgcagtattcagattatgccagcaggtttattttttgttttgcaagccagctctgcctccttacagtatgacatctgatgctggagggtcgcactttcaaaaatgagtcagctggtacatggggttatcatcaatttttagctcttctgtctgggagatacaagtttggaagcaatcttggggtacttacccacaaggctggtggagaccagatcaggagaacctcagtctgacgacattgaagctagccgaatgaagcgagcagctgcaaagcatctaatagaacgctactaccaccagttaactgagggctgtggaaatgaagcctgcacgaatgagttttgtgcttcctgtccaacttttcttcgtatggataataatgcagcagctattaaagccctcgagctttataagattaatgcaaaactctgtgatcctcatccctccaagaaaggagcaagctcagcttaccttgagaactcgaaaggtgcccccaacaactcctgctctgagataaaaatgaacaagaaaggcgctagaattgattttaaagatgtgacttacttaacagaagagaaggtatatgaaattcttgaattatgtagagaaagagaggattattcccctttaatccgtgttattggaagagttttttctagtgctgaggcattggtacagagcttccggaaagttaaacaacacaccaaggaagaactgaaatctcttcaagcaaaagatgaagacaaagatgaagatgaaaaggaaaaagctgcatgttctgctgctgctatggaagaagactcagaagcatcttcctcaaggataggtgatagctcacagggagacaacaatttgcaaaaattaggccctgatgatgtgtctgtggatattgatgccattagaagggtctacaccagattgctctctaatgaaaaaattgaaactgcctttctcaatgcacttgtatatttgtcacctaacgtggaatgtgacttgacgtatcacaatgtatactctcgagatcctaattatctgaatttgttcattatcgtaatggagaatagaaatctccacagtcctgaatatctggaaatggctttgccattattttgcaaagcgatgagcaagctaccccttgcagcccaaggaaaactgatcagactgtggtctaaatacaatgcagaccagattcggagaatgatggagacatttcagcaacttattacttataaagtcataagcaatgaatttaacagtcgaaatctagtgaatgatgatgatgccattgttgctgcttcgaagtgcttgaaaatggtttactatgcaaatgtagtgggaggggaagtggacacaaatcacaatgaagaagatgatgaagagcccatccctgagtccagcgagctgacacttcaggaacttttgggagaagaaagaagaaacaagaaaggtcctcgagtggaccccctggaaactgaacttggtgttaaaaccctggattgtcgaaaaccacttatcccttttgaagagtttattaatgaaccactgaatgaggttctagaaatggataaagattatacttttttcaaagtagaaacagagaacaaattctcttttatgacatgtccctttatattgaatgctgtcacaaagaatttgggattatattatgacaatagaattcgcatgtacagtgaacgaagaatcactgttctctacagcttagttcaaggacagcagttgaatccatatttgagactcaaagttagacgtgaccatatcatagatgatgcacttgtccggctagagatgatcgctatggaaaatcctgcagacttgaagaagcagttgtatgtggaatttgaaggagaacaaggagttgatgagggaggtgtttccaaagaattttttcagctggttgtggaggaaatcttcaatccagatattggtatgttcacatacgatgaatctacaaaattgttttggtttaatccatcttcttttgaaactgagggtcagtttactctgattggcatagtactgggtctggctatttacaataactgtatactggatgtacattttcccatggttgtctacaggaagctaatggggaaaaaaggaacttttcgtgacttgggagactctcacccagttctatatcagagtttaaaagatttattggagtatgaagggaatgtggaagatgacatgatgatcactttccagatatcacagacagatctttttggtaacccaatgatgtatgatctaaaggaaaatggtgataaaattccaattacaaatgaaaacaggaaggaatttgtcaatctttattctgactacattctcaataaatcagtagaaaaacagttcaaggcttttcggagaggttttcatatggtgaccaatgaatctcccttaaagtacttattcagaccagaagaaattgaattgcttatatgtggaagccggaatctagatttccaagcactagaagaaactacagaatatgacggtggctataccagggactctgttctgattagggagttctgggaaatcgttcattcatttacagatgaacagaaaagactcttcttgcagtttacaacgggcacagacagagcacctgtgggaggactaggaaaattaaagatgattatagccaaaaatggcccagacacagaaaggttacctacatctcatacttgctttaatgtgcttttacttccggaatactcaagcaaagaaaaacttaaagagagattgttgaaggccatcacgtatgccaaaggatttggcatgctgtaaaacaaaacaaaacaaaataaaacaaaaaaaaggaaggaaaaaaaaagaaaaaatttaaaaaattttaaaaatataacgagggataaatttttggtggtgatagtgtcccagtacaaaaaggctgtaagatagtcaaccacagtagtcacctatgtctgtgcctcccttctttattggggacatgtgggctggaacagcagatttcagctacatatatgaacaaatcctttattattattataattatttttttgcgtgaaagtgttacatattctttcacttgtatgtacagagaggtttttctgaatatttattttaagggttaaatcacttttgcttgtgtttattactgcttgaggttgagccttttgagtatttaaaaaatatataccaacagaactactctcccaaggaaaatattgccaccatttgtagaccacgtaaccttcaagtatgtgctacttttttgtccctgtatctaactcaaatcaggaactgtattttttttaatgatttgcttttgaaacttgaagtcttgaaaacagtgtgatgcaattactgctgttctagcccccaaagagttttctgtgcaaaatcttgagaatcaatcaataaaggagtgtagcgacaagcttcttctcttcttttttaatattcttggcgcatttaccta

SEQ ID NO: 281375 - DNA, 9832 bp, Homo sapiens
  misc_feature (5833)..(5833): n is a, c, g, or t
  misc_feature (9013)..(9013): n is a, c, g, or t
aaccctcctgggggggggggtgcccagagggcttccggaagtcccaggtttattctttcgggtcacagacagcagaaactaaaaagagggattaccctttctgtccagtcgcaagatggcgaccgagcctggtgggactccgaggggccgcaggccacctcctcttcccaatggcccgtgcgccggcggcgacggcaagcgggagggaggcggggccggcgaaggaaggaggggcggagcgcggcgccctcccgcgcgtcttggccccgccccacgtccccgcgtcccggcctggagccctcgcccggccgggcggcgcgcgctgcctgccgggatactcggcccgcccagccagtcctcccgtcttgcgccgcggccgcgagatccgtgtgtctcccaagatggtggcgctgggctcggggtgactacaggagacgacggggccttttcccttcgccaggacccgacacaccaggcttcgctcgctcgcgcacccctccgccgcgtagccatccgccagcgcgggcgcccgccatccgccgcctacttacgcttcacctctgccgacccggcgcgctcggctgcgggcggcggcgcctccttcggctcctcctcggaatagctcgcggcctgtagcccctggcaggagggcccctcagccccccggtgtggacaggcagcggcggctggcgacgaacgccgggatttcggcggccccggcgctccctttcccggcctcgttttccggataaggaagcgcgggtcccgcatgagccccggcggtggcggcagcgaaagagaacgaggcggtggcgggcggaggcggcgggcgagggcgactacgaccagtgaggcggccgccgcagcccaggcgcgggggcgacgacaggttaaaaatctgtaagagcctgattttagaattcaccagctcctcagaagtttggcgaaatatgagttattaagcctacgctcagatcaaggtagcagctagactggtgtgacaacctgtttttaatcagtgactcaaagctgtgatcaccctgatgtcaccgaatggccacagcttgtaaaagatcaggagaacctcagtctgacgacattgaagctagccgaatgaagcgagcagctgcaaagcatctaatagaacgctactaccaccagttaactgagggctgtggaaatgaagcctgcacgaatgagttttgtgcttcctgtccaacttttcttcgtatggataataatgcagcagctattaaagccctcgagctttataagattaatgcaaaactctgtgatcctcatccctccaagaaaggagcaagctcagcttaccttgagaactcgaaaggtgcccccaacaactcctgctctgagataaaaatgaacaagaaaggcgctagaattgattttaaagatgtgacttacttaacagaagagaaggtatatgaaattcttgaattatgtagagaaagagaggattattcccctttaatccgtgttattggaagagttttttctagtgctgaggcattggtacagagcttccggaaagttaaacaacacaccaaggaagaactgaaatctcttcaagcaaaagatgaagacaaagatgaagatgaaaaggaaaaagctgcatgttctgctgctgctatggaagaagactcagaagcatcttcctcaaggataggtgatagctcacagggagacaacaatttgcaaaaattaggccctgatgatgtgtctgtggatattgatgccattagaagggtctacaccagattgctctctaatgaaaaaattgaaactgcctttctcaatgcacttgtatatttgtcacctaacgtggaatgtgacttgacgtatcacaatgtatactctcgagatcctaattatctgaatttgttcattatcgtaatggagaatagaaatctccacagtcctgaatatctggaaatggctttgccattattttgcaaagcgatgagcaagctaccccttgcagcccaaggaaaactgatcagactgtggtctaaatacaatgcagaccagattcggagaatgatggagacatttcagcaacttattacttataaagtcataagcaatgaatttaacagtcgaaatctagtgaatgatgatgatgccattgttgctgcttcgaagtgcttgaaaatggtttactatgcaaatgtagtgggaggggaagtggacacaaatcacaatgaagaagatgatgaagagcccatccctgagtccagcgagctgacacttcaggaacttttgggagaagaaagaagaaacaagaaaggtcctcgagtggaccccctggaaactgaacttggtgttaaaaccctggattgtcgaaaaccacttatcccttttgaagagtttattaatgaaccactgaatgaggttctagaaatggataaagattatacttttttcaaagtagaaacagagaacaaattctcttttatgacatgtccctttatattgaatgctgtcacaaagaatttgggattatattatgacaatagaattcgcatgtacagtgaacgaagaatcactgttctctacagcttagttcaaggacagcagttgaatccatatttgagactcaaagttagacgtgaccatatcatagatgatgcacttgtccggctagagatgatcgctatggaaaatcctgcagacttgaagaagcagttgtatgtggaatttgaaggagaacaaggagttgatgagggaggtgtttccaaagaattttttcagctggttgtggaggaaatcttcaatccagatattggtatgttcacatacgatgaatctacaaaattgttttggtttaatccatcttcttttgaaactgagggtcagtttactctgattggcatagtactgggtctggctatttacaataactgtatactggatgtacattttcccatggttgtctacaggaagctaatggggaaaaaaggaacttttcgtgacttgggagactctcacccagttctatatcagagtttaaaagatttattggagtatgaagggaatgtggaagatgacatgatgatcactttccagatatcacagacagatctttttggtaacccaatgatgtatgatctaaaggaaaatggtgataaaattccaattacaaatgaaaacaggaagaatctagatttccaagcactagaagaaactacagaatatgacggtggctataccagggactctgttctgattagggagttctgggaaatcgttcattcatttacagatgaacagaaaagactcttcttgcagtttacaacgggcacagacagagcacctgtgggaggactaggaaaattaaagatgattatagccaaaaatggcccagacacagaaaggttacctacatctcatacttgctttaatgtgcttttacttccggaatactcaagcaaagaaaaacttaaagagagattgttgaaggccatcacgtatgccaaaggatttggcatgctgtaaaacaaaacaaaacaaaataaaacaaaaaaaaggaaggaaaaaaaaagaaaaaatttaaaaaattttaaaaatataacgagggataaatttttggtggtgatagtgtcccagtacaaaaaggctgtaagatagtcaaccacagtagtcacctatgtctgtgcctcccttctttattggggacatgtgggctggaacagcagatttcagctacatatatgaacaaatcctttattattattataattatttttttgcgtgaaagtgttacatattctttcacttgtatgtacagagaggtttttctgaatatttattttaagggttaaatcacttttgcttgtgtttattactgcttgaggttgagccttttgagtatttaaaaaatatataccaacagaactactctcccaaggaaaatattgccaccatttgtagaccacgtaaccttcaagtatgtgctacttttttgtccctgtatctaactcaaatcaggaactgtattttttttaatgatttgcttttgaaacttgaagtcttgaaaacagtgtgatgcaattactgctgttctagcccccaaagagttttctgtgcaaaatcttgagaatcaatcaataaagaaagatggaaggaagggagaaattggaatgttttaactgcagccctcagaactttagtaacagcacaacaaattaaaaacaaaaacaactcatgccacagtatgtcgtcttcatgtgtcttgcaatgaactgtttcagtagccaatcctctttcttagtatatgaaaggacagggattttgttcttgttgttctcgttgttgttttaagtttactggggaaagtgcatttggccaaatgaaatggtagtcaagcctattgcaacaaagttaggaagtttgttgtttgtttattataaacaaaaagcatgtgaaagtgcacttaagatagagtttttattaattacttacttattacctagattttaaatagacaatccaaagtctccccttcgtgttgccatcatcttgttgaatcagccattttatcgaggcacgtgatcagtgttgcaacataatgaaaaagatggctactgtgccttgtgttacttaatcatacagtaagctgacctggaaatgaatgaaactattactcctaagaattacattgtatagccccacagattaaatttaattaattaattcaaaacatgttaaacgttactttcatgtactatggaaaagtacaagtaggtttacattactgatttccagaagtaagtagtttcccctttcctagtcttctgtgtatgtgatgttgttaatttcttttattgcattataaaataaaaggattatgtatttttaactaaggtgagacattgatatatccttttgctacaagctatagctaatgtgctgagcttgtgccttggtgattgattgattgattgactgattgttttaactgattactgtagatcaacctgatgatttgtttgtttgaaattggcaggaaaaatgcagctttcaaatcattggggggagaaaaaggatgtctttcaggattattttaattaatttttttcataattgagacagaactgtttgttatgtaccataatgctaaataaaactgtggcacttttcaccataatttaatttagtggaaaaagaagacaatgctttccatattgtgataaggtaacatggggtttttctgggccagcctttagaacactgttagggtacatacgctaccttgatgaaagggaccttcgtgcaactgtagtcatcttaaaggcttctcatccactgtgcttcttaatgtgtaattaaagtgaggagaaattaaatactctgagggcgttttatataataaattcgtgaagaaatgtgtgctcttcagttctcaagttttattattatggtatttattaaagttctacaattgtaataacgtatccatatgacaagttttaaagtggtaattgaaataggttatcagatatagagttgttcacatcaagtagacttttaacagagtcagaatgaacctacccttaaaattttagagaaaaaaaatcgtcggttgcacagaatagctgctctagcttgcttaattatgccgggcatgttgtcactcctcttacttttgctgccttttcattactatttaatggaatgtccctgaacaataaggaagagcaaaacatagacattttgactacagtggatacttcctctaccccaaatgttatgttataaaagtactttttttgcccaggtactctattatatattttggttttctttgaattanacctcaatctccaggaagctctggagggaaaaaaaggaaccataaactaaagtaactggttttccaaataaatgtaaacttttttaaccttttattattatagaacatttcaaacatacataaaacatgaaaacagcctgcagccaaacttttctggaccttggcagctccagcaaatgagctggtcatcctaaccctggtttcctgagacaactacttttggggatgcttgcttgtatagggagatgatagatagatagatacatatcaaaaagaaacttgaaaaaggcttcgaacagaacttgccgatgttactcatccctcctcggtacagacattctgttagaacagatggttgtaatggggcagcatcactccctattcccattaaaaacatgaccattctgagatttcaggccccttcgaggaatttttctcaagaattccatacaaactgtcagaggaagaaatgtcgtcccaagactagtccctgtgtagtcttgatccctttacctgcttactgtaattttttttctctgactttccgccagtgtctaagggccatctgtacccctcccacccttccatgagccactgtataatccaaaaacacaccttccatttgctccctcacttgtctccttttacctcaacagtgttagtgtgtaaagaattgcctggggagggtagagggttttacaagtacagagtcccaagtcttttctcccctccccgttagtgggttggcatttattaataggcactgcaagattttgatgcaggtgtggggtagatatcactgtgaaaggctactaatgcatggtagtttcaccgaaagtacagtcttcaaggatccttataatctcctcattgccaaaatcagtaacatctataaccttgacaacaccctagcttgggctgttgcttctctggctacttgtttttccatcccagtttacccagattttagatggatactcctccaattctgcttaaagtccttacctgttcttgcccagttccctctagtcaacctcagtcactcccaaagattcttccccaatcccatatcttttgctcagacctctgtctctgggatttctttgttacctcatagtcagtagtcctaaaaacaaaattcttcatcttgcatctctatcgaccgaccattctttgtttctttttaagaaatgtaaccttcaccccaatcatcaaaatctctcattcctcaattgtcacaggttgtcacttctttccccctaaacctctcccatcattccttccttctttatactgcccttacaggtcctgatcctctgactcacccggacattcttagcagctgcctaatttcactccctgactctcatctccctcttccaatccttttcattgtgctagaacactatcttgctaattttaatatcctctgcattcagtgcctccacagattgccccctcactgacctttccaatttggccttgtgttacacactttcctcgctgcattcctacccagcatcttcacttgtcatatttctcaaatactcttcatgaccagatatttaaagtacctcatccatgaagacttcatcaacccccaaagtgcctccaatgcttccgtggtagcacagcataatggggtacatttcttagttgaacagtgaggagtcactgggattcttacagagtgtcttagggtctcctcttgatactctttccacatttcagttaaggaattttcttacatctttttttcttctaataacctttgcctggagtgtaagtaaattcatgatagagactgtcatttttaaaaaaaaaaaacaaaccattttgcctttcacatgttattacctccatctttctgttatcttgtcagtgttgccacctaaatgattgaaaatgaccgagcatgcagtagaatgtagtgaagtttcctatttcatccattttttgcataagtgcattggtatctgtatatccatctgcccaagcaccagttgttgaaaagactattatttccccatgaatggtcctggtacccttgtcaaagaacagttgaccataaatataagactttctggattctcagtcttactccattgccctatatgtctgtcgttataccagcaccgcactgtcttgattgctgtagcttggtagtaagtttagatttgggatgtgcaagtcctccattttttttttttttctccccaaaatcattttgtctgttttgggtcccttgcattgcatatgaatttttatatgatcattgtgtcaattcctgcaaaacagctgggatcttgatagggatttagttgaattggtagataaatttgagaaataactgctattttaatggtgttaggttttctgttccatgactgtgggatgtctttgcatttgcttaggtctttatttcagtgatgttttagagatttcagtgtgcaagtcttgacgtctttaatttttttctaagtattttactgatgccactttaattatatgattattttctaatttttatttttgtattcatcactggtgttagaaataaaattaatttttgtatattgattttgtatattgtagcttttctaaaattctttttttgtcacttagtattttttgcatatgagatcatgcatctgtgaacagaaatacttttacttcttcctttccagtctagattcctattatttcattttcttgccttagtgtgctggctagcacctccagtacaatattggatagaagtgacaagagcagacatctttttcttgttcctgattttaaggggaaagcattcagtctttcaccattgagtatgatgttagctagctgtgggtttgcttcaagttgaggaaattcttttattaaacctagtttactgagtgttttttaatcaaaaaaaaaaaaggaggggctgtgggttttgttaaatgcttcttctgtatcaagattttcatgttgttttgtcctttattaatatgttgtattaatggacttttgtatattgaattaactttgcattcctgggataatctcagttgtccatgctacataaaccttgttctatgctgctggatttggtttgctagtattttgtttagaatgtttgcatctatattcataaggaatattggtctgtagttttcatattatatatctgtccantttggggatgagagtcatactcctgacagaatgaattgggagctttccctgttcttaaacctactgaggtattttttaagtgaactacttggagaccttcacctgtgatcttcagatgctgggggacacagggatggtacctgactctgaaaaggctctcagggtaagacgtgtctgaactggcctgtggcagttaactaaagagtactcctaccaataatggagtcaagatgtatgtttcccataggccacgctggtcactgaaagagatgggctatgagccatcttgaaaactaccctgcacaaatggactgccggcctggagccaggcaccctgcagctgagtgccatataatgttgaagctgttgagggaggagaggttggaagctgccagcttagagaatctcagctgtggtttcccagcagggtgtattccccaggaaagaaagtcattcccccacccctggctcaaagtaataattaacagtgactgggtaaggcaggatctttttttcctaattccctcccctccagaaagggcagcaacagctcttgaatgggaaagaaggtggagggaggaaaagaaaaaccaattgccccaacactgctgtctttaagcttcccacccaaagacctcagtaagaggcagaattatgttttcaattaagagagagtttggcctcttggtgtttcaaaagtgtaggctttttaatacctagagaaactgatgatttgttgattaccaaaaagggaccagaaaagctacatagcctgagatttcatccccagaaaaacgaatccagagagcagacttgcaa

SEQ ID NO: 281376 - DNA, 7712 bp, Homo sapiens
  misc_feature (3713)..(3713): n is a, c, g, or t
  misc_feature (6893)..(6893): n is a, c, g, or t
tagaggatcctcaactacacagctatccaaaggtcctcgagtggaccccctggaaactgaacttggtgttaaaaccctggattgtcgaaaaccacttatcccttttgaagagtttattaatgaaccactgaatgaggttctagaaatggataaagattatacttttttcaaagtagaaacagagaacaaattctcttttatgacatgtccctttatattgaatgctgtcacaaagaatttgggattatattatgacaatagaattcgcatgtacagtgaacgaagaatcactgttctctacagcttagttcaaggacagcagttgaatccatatttgagactcaaagttagacgtgaccatatcatagatgatgcacttgtccggctagagatgatcgctatggaaaatcctgcagacttgaagaagcagttgtatgtggaatttgaaggagaacaaggagttgatgagggaggtgtttccaaagaattttttcagctggttgtggaggaaatcttcaatccagatattggtatgttcacatacgatgaatctacaaaattgttttggtttaatccatcttcttttgaaactgagggtcagtttactctgattggcatagtactgggtctggctatttacaataactgtatactggatgtacattttcccatggttgtctacaggaagctaatggggaaaaaaggaacttttcgtgacttgggagactctcacccagttctatatcagagtttaaaagatttattggagtatgaagggaatgtggaagatgacatgatgatcactttccagatatcacagacagatctttttggtaacccaatgatgtatgatctaaaggaaaatggtgataaaattccaattacaaatgaaaacaggaaggaatttgtcaatctttattctgactacattctcaataaatcagtagaaaaacagttcaaggcttttcggagaggttttcatatggtgaccaatgaatctcccttaaagtacttattcagaccagaagaaattgaattgcttatatgtggaagccggaatctagatttccaagcactagaagaaactacagaatatgacggtggctataccagggactctgttctgattagggagttctgggaaatcgttcattcatttacagatgaacagaaaagactcttcttgcagtttacaacgggcacagacagagcacctgtgggaggactaggaaaattaaagatgattatagccaaaaatggcccagacacagaaaggttacctacatctcatacttgctttaatgtgcttttacttccggaatactcaagcaaagaaaaacttaaagagagattgttgaaggccatcacgtatgccaaaggatttggcatgctgtaaaacaaaacaaaacaaaataaaacaaaaaaaaggaaggaaaaaaaaagaaaaaatttaaaaaattttaaaaatataacgagggataaatttttggtggtgatagtgtcccagtacaaaaaggctgtaagatagtcaaccacagtagtcacctatgtctgtgcctcccttctttattggggacatgtgggctggaacagcagatttcagctacatatatgaacaaatcctttattattattataattatttttttgcgtgaaagtgttacatattctttcacttgtatgtacagagaggtttttctgaatatttattttaagggttaaatcacttttgcttgtgtttattactgcttgaggttgagccttttgagtatttaaaaaatatataccaacagaactactctcccaaggaaaatattgccaccatttgtagaccacgtaaccttcaagtatgtgctacttttttgtccctgtatctaactcaaatcaggaactgtattttttttaatgatttgcttttgaaacttgaagtcttgaaaacagtgtgatgcaattactgctgttctagcccccaaagagttttctgtgcaaaatcttgagaatcaatcaataaagaaagatggaaggaagggagaaattggaatgttttaactgcagccctcagaactttagtaacagcacaacaaattaaaaacaaaaacaactcatgccacagtatgtcgtcttcatgtgtcttgcaatgaactgtttcagtagccaatcctctttcttagtatatgaaaggacagggattttgttcttgttgttctcgttgttgttttaagtttactggggaaagtgcatttggccaaatgaaatggtagtcaagcctattgcaacaaagttaggaagtttgttgtttgtttattataaacaaaaagcatgtgaaagtgcacttaagatagagtttttattaattacttacttattacctagattttaaatagacaatccaaagtctccccttcgtgttgccatcatcttgttgaatcagccattttatcgaggcacgtgatcagtgttgcaacataatgaaaaagatggctactgtgccttgtgttacttaatcatacagtaagctgacctggaaatgaatgaaactattactcctaagaattacattgtatagccccacagattaaatttaattaattaattcaaaacatgttaaacgttactttcatgtactatggaaaagtacaagtaggtttacattactgatttccagaagtaagtagtttcccctttcctagtcttctgtgtatgtgatgttgttaatttcttttattgcattataaaataaaaggattatgtatttttaactaaggtgagacattgatatatccttttgctacaagctatagctaatgtgctgagcttgtgccttggtgattgattgattgattgactgattgttttaactgattactgtagatcaacctgatgatttgtttgtttgaaattggcaggaaaaatgcagctttcaaatcattggggggagaaaaaggatgtctttcaggattattttaattaatttttttcataattgagacagaactgtttgttatgtaccataatgctaaataaaactgtggcacttttcaccataatttaatttagtggaaaaagaagacaatgctttccatattgtgataaggtaacatggggtttttctgggccagcctttagaacactgttagggtacatacgctaccttgatgaaagggaccttcgtgcaactgtagtcatcttaaaggcttctcatccactgtgcttcttaatgtgtaattaaagtgaggagaaattaaatactctgagggcgttttatataataaattcgtgaagaaatgtgtgctcttcagttctcaagttttattattatggtatttattaaagttctacaattgtaataacgtatccatatgacaagttttaaagtggtaattgaaataggttatcagatatagagttgttcacatcaagtagacttttaacagagtcagaatgaacctacccttaaaattttagagaaaaaaaatcgtcggttgcacagaatagctgctctagcttgcttaattatgccgggcatgttgtcactcctcttacttttgctgccttttcattactatttaatggaatgtccctgaacaataaggaagagcaaaacatagacattttgactacagtggatacttcctctaccccaaatgttatgttataaaagtactttttttgcccaggtactctattatatattttggttttctttgaattanacctcaatctccaggaagctctggagggaaaaaaaggaaccataaactaaagtaactggttttccaaataaatgtaaacttttttaaccttttattattatagaacatttcaaacatacataaaacatgaaaacagcctgcagccaaacttttctggaccttggcagctccagcaaatgagctggtcatcctaaccctggtttcctgagacaactacttttggggatgcttgcttgtatagggagatgatagatagatagatacatatcaaaaagaaacttgaaaaaggcttcgaacagaacttgccgatgttactcatccctcctcggtacagacattctgttagaacagatggttgtaatggggcagcatcactccctattcccattaaaaacatgaccattctgagatttcaggccccttcgaggaatttttctcaagaattccatacaaactgtcagaggaagaaatgtcgtcccaagactagtccctgtgtagtcttgatccctttacctgcttactgtaattttttttctctgactttccgccagtgtctaagggccatctgtacccctcccacccttccatgagccactgtataatccaaaaacacaccttccatttgctccctcacttgtctccttttacctcaacagtgttagtgtgtaaagaattgcctggggagggtagagggttttacaagtacagagtcccaagtcttttctcccctccccgttagtgggttggcatttattaataggcactgcaagattttgatgcaggtgtggggtagatatcactgtgaaaggctactaatgcatggtagtttcaccgaaagtacagtcttcaaggatccttataatctcctcattgccaaaatcagtaacatctataaccttgacaacaccctagcttgggctgttgcttctctggctacttgtttttccatcccagtttacccagattttagatggatactcctccaattctgcttaaagtccttacctgttcttgcccagttccctctagtcaacctcagtcactcccaaagattcttccccaatcccatatcttttgctcagacctctgtctctgggatttctttgttacctcatagtcagtagtcctaaaaacaaaattcttcatcttgcatctctatcgaccgaccattctttgtttctttttaagaaatgtaaccttcaccccaatcatcaaaatctctcattcctcaattgtcacaggttgtcacttctttccccctaaacctctcccatcattccttccttctttatactgcccttacaggtcctgatcctctgactcacccggacattcttagcagctgcctaatttcactccctgactctcatctccctcttccaatccttttcattgtgctagaacactatcttgctaattttaatatcctctgcattcagtgcctccacagattgccccctcactgacctttccaatttggccttgtgttacacactttcctcgctgcattcctacccagcatcttcacttgtcatatttctcaaatactcttcatgaccagatatttaaagtacctcatccatgaagacttcatcaacccccaaagtgcctccaatgcttccgtggtagcacagcataatggggtacatttcttagttgaacagtgaggagtcactgggattcttacagagtgtcttagggtctcctcttgatactctttccacatttcagttaaggaattttcttacatctttttttcttctaataacctttgcctggagtgtaagtaaattcatgatagagactgtcatttttaaaaaaaaaaaacaaaccattttgcctttcacatgttattacctccatctttctgttatcttgtcagtgttgccacctaaatgattgaaaatgaccgagcatgcagtagaatgtagtgaagtttcctatttcatccattttttgcataagtgcattggtatctgtatatccatctgcccaagcaccagttgttgaaaagactattatttccccatgaatggtcctggtacccttgtcaaagaacagttgaccataaatataagactttctggattctcagtcttactccattgccctatatgtctgtcgttataccagcaccgcactgtcttgattgctgtagcttggtagtaagtttagatttgggatgtgcaagtcctccattttttttttttttctccccaaaatcattttgtctgttttgggtcccttgcattgcatatgaatttttatatgatcattgtgtcaattcctgcaaaacagctgggatcttgatagggatttagttgaattggtagataaatttgagaaataactgctattttaatggtgttaggttttctgttccatgactgtgggatgtctttgcatttgcttaggtctttatttcagtgatgttttagagatttcagtgtgcaagtcttgacgtctttaatttttttctaagtattttactgatgccactttaattatatgattattttctaatttttatttttgtattcatcactggtgttagaaataaaattaatttttgtatattgattttgtatattgtagcttttctaaaattctttttttgtcacttagtattttttgcatatgagatcatgcatctgtgaacagaaatacttttacttcttcctttccagtctagattcctattatttcattttcttgccttagtgtgctggctagcacctccagtacaatattggatagaagtgacaagagcagacatctttttcttgttcctgattttaaggggaaagcattcagtctttcaccattgagtatgatgttagctagctgtgggtttgcttcaagttgaggaaattcttttattaaacctagtttactgagtgttttttaatcaaaaaaaaaaaaggaggggctgtgggttttgttaaatgcttcttctgtatcaagattttcatgttgttttgtcctttattaatatgttgtattaatggacttttgtatattgaattaactttgcattcctgggataatctcagttgtccatgctacataaaccttgttctatgctgctggatttggtttgctagtattttgtttagaatgtttgcatctatattcataaggaatattggtctgtagttttcatattatatatctgtccantttggggatgagagtcatactcctgacagaatgaattgggagctttccctgttcttaaacctactgaggtattttttaagtgaactacttggagaccttcacctgtgatcttcagatgctgggggacacagggatggtacctgactctgaaaaggctctcagggtaagacgtgtctgaactggcctgtggcagttaactaaagagtactcctaccaataatggagtcaagatgtatgtttcccataggccacgctggtcactgaaagagatgggctatgagccatcttgaaaactaccctgcacaaatggactgccggcctggagccaggcaccctgcagctgagtgccatataatgttgaagctgttgagggaggagaggttggaagctgccagcttagagaatctcagctgtggtttcccagcagggtgtattccccaggaaagaaagtcattcccccacccctggctcaaagtaataattaacagtgactgggtaaggcaggatctttttttcctaattccctcccctccagaaagggcagcaacagctcttgaatgggaaagaaggtggagggaggaaaagaaaaaccaattgccccaacactgctgtctttaagcttcccacccaaagacctcagtaagaggcagaattatgttttcaattaagagagagtttggcctcttggtgtttcaaaagtgtaggctttttaatacctagagaaactgatgatttgttgattaccaaaaagggaccagaaaagctacatagcctgagatttcatccccagaaaaacgaatccagagagcagacttgcaa

SEQ ID NO: 281377 - DNA, 9806 bp, Homo sapiens
  misc_feature (5807)..(5807): n is a, c, g, or t
  misc_feature (8987)..(8987): n is a, c, g, or t
aaccctcctgggggggggggtgcccagagggcttccggaagtcccaggtttattctttcgggtcacagacagcagaaactaaaaagagggattaccctttctgtccagtcgcaagatggcgaccgagcctggtgggactccgaggggccgcaggccacctcctcttcccaatggcccgtgcgccggcggcgacggcaagcgggagggaggcggggccggcgaaggaaggaggggcggagcgcggcgccctcccgcgcgtcttggccccgccccacgtccccgcgtcccggcctggagccctcgcccggccgggcggcgcgcgctgcctgccgggatactcggcccgcccagccagtcctcccgtcttgcgccgcggccgcgagatccgtgtgtctcccaagatggtggcgctgggctcggggtgactacaggagacgacggggccttttcccttcgccaggacccgacacaccaggcttcgctcgctcgcgcacccctccgccgcgtagccatccgccagcgcgggcgcccgccatccgccgcctacttacgcttcacctctgccgacccggcgcgctcggctgcgggcggcggcgcctccttcggctcctcctcggaatagctcgcggcctgtagcccctggcaggagggcccctcagccccccggtgtggacaggcagcggcggctggcgacgaacgccgggatttcggcggccccggcgctccctttcccggcctcgttttccggataaggaagcgcgggtcccgcatgagccccggcggtggcggcagcgaaagagaacgaggcggtggcgggcggaggcggcgggcgagggcgactacgaccagtgaggcggccgccgcagcccaggcgcgggggcgacgacaggttaaaaatctgtaagagcctgattttagaattcaccagctcctcagaagtttggcgaaatatgagttattaagcctacgctcagatcaaggtagcagctagactggtgtgacaacctgtttttaatcagtgactcaaagctgtgatcaccctgatgtcaccgaatggccacagcttgtaaaagatcaggagaacctcagtctgacgacattgaagctagccgaatgaagcgagcagctgcaaagcatctaatagaacgctactaccaccagttaactgagggctgtggaaatgaagcctgcacgaatgagttttgtgcttcctgtccaacttttcttcgtatggataataatgcagcagctattaaagccctcgagctttataagattaatgcaaaactctgtgatcctcatccctccaagaaaggagcaagctcagcttaccttgagaactcgaaaggtgcccccaacaactcctgctctgagataaaaatgaacaagaaaggcgctagaattgattttaaagatgtgacttacttaacagaagagaaggtatatgaaattcttgaattatgtagagaaagagaggattattcccctttaatccgtgttattggaagagttttttctagtgctgaggcattggtacagagcttccggaaagttaaacaacacaccaaggaagaactgaaatctcttcaagcaaaagatgaagacaaagatgaagatgaaaaggaaaaagctgcatgttctgctgctgctatggaagaagactcagaagcatcttcctcaaggataggtgatagctcacagggagacaacaatttgcaaaaattaggccctgatgatgtgtctgtggatattgatgccattagaagggtctacaccagattgctctctaatgaaaaaattgaaactgcctttctcaatgcacttgtatatttgtcacctaacgtggaatgtgacttgacgtatcacaatgtatactctcgagatcctaattatctgaatttgttcattatcgtaatggagaatagaaatctccacagtcctgaatatctggaaatggctttgccattattttgcaaagcgatgagcaagctaccccttgcagcccaaggaaaactgatcagactgtggtctaaatacaatgcagaccagattcggagaatgatggagacatttcagcaacttattacttataaagtcataagcaatgaatttaacagtcgaaatctagtgaatgatgatgatgccattgttgctgcttcgaagtgcttgaaaatggtttactatgcaaatgtagtgggaggggaagtggacacaaatcacaatgaagaagatgatgaagagcccatccctgagtccagcgagctgacacttcaggaacttttgggagaagaaagaagaaacaagaaaggtcctcgagtggaccccctggaaactgaacttggtgttaaaaccctggattgtcgaaaaccacttatcccttttgaagagtttattaatgaaccactgaatgaggttctagaaatggataaagattatacttttttcaaagtagaaacagagaacaaattctcttttatgacatgtccctttatattgaatgctgtcacaaagaatttgggattatattatgacaatagaattcgcatgtacagtgaacgaagaatcactgttctctacagcttagttcaaggacagcagttgaatccatatttgagactcaaagttagacgtgaccatatcatagatgatgcacttgtccggctagagatgatcgctatggaaaatcctgcagacttgaagaagcagttgtatgtggaatttgaaggagaacaaggagttgatgagggaggtgtttccaaagaattttttcagctggttgtggaggaaatcttcaatccagatattggtatgttcacatacgatgaatctacaaaattgttttggtttaatccatcttcttttgaaactgagggtcagtttactctgattggcatagtactgggtctggctatttacaataactgtatactggatgtacattttcccatggttgtctacaggaagctaatggggaaaaaaggaacttttcgtgacttgggagactctcacccagttctatatcagagtttaaaagatttattggagtatgaagggaatgtggaagatgacatgatgatcactttccagatatcacagacagatctttttggtaacccaatgatgtatgatctaaaggaaaatggtgataaaattccaattacaaatgaaaacaggaaggaatttgtcaatctttattctgactacattctcaataaatcagtagaaaaacagttcaaggcttttcggagaggttttcatatggtgaccaatgaatctcccttaaagtacttattcagaccagaagaaattgaattgcttatatgtggaagccggaatctagatttccaaaaatggcccagacacagaaaggttacctacatctcatacttgctttaatgtgcttttacttccggaatactcaagcaaagaaaaacttaaagagagattgttgaaggccatcacgtatgccaaaggatttggcatgctgtaaaacaaaacaaaacaaaataaaacaaaaaaaaggaaggaaaaaaaaagaaaaaatttaaaaaattttaaaaatataacgagggataaatttttggtggtgatagtgtcccagtacaaaaaggctgtaagatagtcaaccacagtagtcacctatgtctgtgcctcccttctttattggggacatgtgggctggaacagcagatttcagctacatatatgaacaaatcctttattattattataattatttttttgcgtgaaagtgttacatattctttcacttgtatgtacagagaggtttttctgaatatttattttaagggttaaatcacttttgcttgtgtttattactgcttgaggttgagccttttgagtatttaaaaaatatataccaacagaactactctcccaaggaaaatattgccaccatttgtagaccacgtaaccttcaagtatgtgctacttttttgtccctgtatctaactcaaatcaggaactgtattttttttaatgatttgcttttgaaacttgaagtcttgaaaacagtgtgatgcaattactgctgttctagcccccaaagagttttctgtgcaaaatcttgagaatcaatcaataaagaaagatggaaggaagggagaaattggaatgttttaactgcagccctcagaactttagtaacagcacaacaaattaaaaacaaaaacaactcatgccacagtatgtcgtcttcatgtgtcttgcaatgaactgtttcagtagccaatcctctttcttagtatatgaaaggacagggattttgttcttgttgttctcgttgttgttttaagtttactggggaaagtgcatttggccaaatgaaatggtagtcaagcctattgcaacaaagttaggaagtttgttgtttgtttattataaacaaaaagcatgtgaaagtgcacttaagatagagtttttattaattacttacttattacctagattttaaatagacaatccaaagtctccccttcgtgttgccatcatcttgttgaatcagccattttatcgaggcacgtgatcagtgttgcaacataatgaaaaagatggctactgtgccttgtgttacttaatcatacagtaagctgacctggaaatgaatgaaactattactcctaagaattacattgtatagccccacagattaaatttaattaattaattcaaaacatgttaaacgttactttcatgtactatggaaaagtacaagtaggtttacattactgatttccagaagtaagtagtttcccctttcctagtcttctgtgtatgtgatgttgttaatttcttttattgcattataaaataaaaggattatgtatttttaactaaggtgagacattgatatatccttttgctacaagctatagctaatgtgctgagcttgtgccttggtgattgattgattgattgactgattgttttaactgattactgtagatcaacctgatgatttgtttgtttgaaattggcaggaaaaatgcagctttcaaatcattggggggagaaaaaggatgtctttcaggattattttaattaatttttttcataattgagacagaactgtttgttatgtaccataatgctaaataaaactgtggcacttttcaccataatttaatttagtggaaaaagaagacaatgctttccatattgtgataaggtaacatggggtttttctgggccagcctttagaacactgttagggtacatacgctaccttgatgaaagggaccttcgtgcaactgtagtcatcttaaaggcttctcatccactgtgcttcttaatgtgtaattaaagtgaggagaaattaaatactctgagggcgttttatataataaattcgtgaagaaatgtgtgctcttcagttctcaagttttattattatggtatttattaaagttctacaattgtaataacgtatccatatgacaagttttaaagtggtaattgaaataggttatcagatatagagttgttcacatcaagtagacttttaacagagtcagaatgaacctacccttaaaattttagagaaaaaaaatcgtcggttgcacagaatagctgctctagcttgcttaattatgccgggcatgttgtcactcctcttacttttgctgccttttcattactatttaatggaatgtccctgaacaataaggaagagcaaaacatagacattttgactacagtggatacttcctctaccccaaatgttatgttataaaagtactttttttgcccaggtactctattatatattttggttttctttgaattanacctcaatctccaggaagctctggagggaaaaaaaggaaccataaactaaagtaactggttttccaaataaatgtaaacttttttaaccttttattattatagaacatttcaaacatacataaaacatgaaaacagcctgcagccaaacttttctggaccttggcagctccagcaaatgagctggtcatcctaaccctggtttcctgagacaactacttttggggatgcttgcttgtatagggagatgatagatagatagatacatatcaaaaagaaacttgaaaaaggcttcgaacagaacttgccgatgttactcatccctcctcggtacagacattctgttagaacagatggttgtaatggggcagcatcactccctattcccattaaaaacatgaccattctgagatttcaggccccttcgaggaatttttctcaagaattccatacaaactgtcagaggaagaaatgtcgtcccaagactagtccctgtgtagtcttgatccctttacctgcttactgtaattttttttctctgactttccgccagtgtctaagggccatctgtacccctcccacccttccatgagccactgtataatccaaaaacacaccttccatttgctccctcacttgtctccttttacctcaacagtgttagtgtgtaaagaattgcctggggagggtagagggttttacaagtacagagtcccaagtcttttctcccctccccgttagtgggttggcatttattaataggcactgcaagattttgatgcaggtgtggggtagatatcactgtgaaaggctactaatgcatggtagtttcaccgaaagtacagtcttcaaggatccttataatctcctcattgccaaaatcagtaacatctataaccttgacaacaccctagcttgggctgttgcttctctggctacttgtttttccatcccagtttacccagattttagatggatactcctccaattctgcttaaagtccttacctgttcttgcccagttccctctagtcaacctcagtcactcccaaagattcttccccaatcccatatcttttgctcagacctctgtctctgggatttctttgttacctcatagtcagtagtcctaaaaacaaaattcttcatcttgcatctctatcgaccgaccattctttgtttctttttaagaaatgtaaccttcaccccaatcatcaaaatctctcattcctcaattgtcacaggttgtcacttctttccccctaaacctctcccatcattccttccttctttatactgcccttacaggtcctgatcctctgactcacccggacattcttagcagctgcctaatttcactccctgactctcatctccctcttccaatccttttcattgtgctagaacactatcttgctaattttaatatcctctgcattcagtgcctccacagattgccccctcactgacctttccaatttggccttgtgttacacactttcctcgctgcattcctacccagcatcttcacttgtcatatttctcaaatactcttcatgaccagatatttaaagtacctcatccatgaagacttcatcaacccccaaagtgcctccaatgcttccgtggtagcacagcataatggggtacatttcttagttgaacagtgaggagtcactgggattcttacagagtgtcttagggtctcctcttgatactctttccacatttcagttaaggaattttcttacatctttttttcttctaataacctttgcctggagtgtaagtaaattcatgatagagactgtcatttttaaaaaaaaaaaacaaaccattttgcctttcacatgttattacctccatctttctgttatcttgtcagtgttgccacctaaatgattgaaaatgaccgagcatgcagtagaatgtagtgaagtttcctatttcatccattttttgcataagtgcattggtatctgtatatccatctgcccaagcaccagttgttgaaaagactattatttccccatgaatggtcctggtacccttgtcaaagaacagttgaccataaatataagactttctggattctcagtcttactccattgccctatatgtctgtcgttataccagcaccgcactgtcttgattgctgtagcttggtagtaagtttagatttgggatgtgcaagtcctccattttttttttttttctccccaaaatcattttgtctgttttgggtcccttgcattgcatatgaatttttatatgatcattgtgtcaattcctgcaaaacagctgggatcttgatagggatttagttgaattggtagataaatttgagaaataactgctattttaatggtgttaggttttctgttccatgactgtgggatgtctttgcatttgcttaggtctttatttcagtgatgttttagagatttcagtgtgcaagtcttgacgtctttaatttttttctaagtattttactgatgccactttaattatatgattattttctaatttttatttttgtattcatcactggtgttagaaataaaattaatttttgtatattgattttgtatattgtagcttttctaaaattctttttttgtcacttagtattttttgcatatgagatcatgcatctgtgaacagaaatacttttacttcttcctttccagtctagattcctattatttcattttcttgccttagtgtgctggctagcacctccagtacaatattggatagaagtgacaagagcagacatctttttcttgttcctgattttaaggggaaagcattcagtctttcaccattgagtatgatgttagctagctgtgggtttgcttcaagttgaggaaattcttttattaaacctagtttactgagtgttttttaatcaaaaaaaaaaaaggaggggctgtgggttttgttaaatgcttcttctgtatcaagattttcatgttgttttgtcctttattaatatgttgtattaatggacttttgtatattgaattaactttgcattcctgggataatctcagttgtccatgctacataaaccttgttctatgctgctggatttggtttgctagtattttgtttagaatgtttgcatctatattcataaggaatattggtctgtagttttcatattatatatctgtccantttggggatgagagtcatactcctgacagaatgaattgggagctttccctgttcttaaacctactgaggtattttttaagtgaactacttggagaccttcacctgtgatcttcagatgctgggggacacagggatggtacctgactctgaaaaggctctcagggtaagacgtgtctgaactggcctgtggcagttaactaaagagtactcctaccaataatggagtcaagatgtatgtttcccataggccacgctggtcactgaaagagatgggctatgagccatcttgaaaactaccctgcacaaatggactgccggcctggagccaggcaccctgcagctgagtgccatataatgttgaagctgttgagggaggagaggttggaagctgccagcttagagaatctcagctgtggtttcccagcagggtgtattccccaggaaagaaagtcattcccccacccctggctcaaagtaataattaacagtgactgggtaaggcaggatctttttttcctaattccctcccctccagaaagggcagcaacagctcttgaatgggaaagaaggtggagggaggaaaagaaaaaccaattgccccaacactgctgtctttaagcttcccacccaaagacctcagtaagaggcagaattatgttttcaattaagagagagtttggcctcttggtgtttcaaaagtgtaggctttttaatacctagagaaactgatgatttgttgattaccaaaaagggaccagaaaagctacatagcctgagatttcatccccagaaaaacgaatccagagagcagacttgcaa

SEQ ID NO: 281378 - DNA, 7434 bp, Homo sapiens
  misc_feature (3435)..(3435): n is a, c, g, or t
  misc_feature (6615)..(6615): n is a, c, g, or t
gccaccaaattacttactactttattcctttggcttcataaaattacatatcaccattcaccccaatttatagcagatatatgtggacattgttttctcaagtgctaatataatagaaatcaatgttgcatgcctaattacatatattttaaatgttttatatgcataattattttaagtttatatttgtattattcatcagtccttaataaaatacaaaagtaatgtatttttaaaaatcatttcttataggtatgttcacatacgatgaatctacaaaattgttttggtttaatccatcttcttttgaaactgagggtcagtttactctgattggcatagtactgggtctggctatttacaataactgtatactggatgtacattttcccatggttgtctacaggaagctaatggggaaaaaaggaacttttcgtgacttgggagactctcacccagttctatatcagagtttaaaagatttattggagtatgaagggaatgtggaagatgacatgatgatcactttccagatatcacagacagatctttttggtaacccaatgatgtatgatctaaaggaaaatggtgataaaattccaattacaaatgaaaacaggaaggaatttgtcaatctttattctgactacattctcaataaatcagtagaaaaacagttcaaggcttttcggagaggttttcatatggtgaccaatgaatctcccttaaagtacttattcagaccagaagaaattgaattgcttatatgtggaagccggaatctagatttccaagcactagaagaaactacagaatatgacggtggctataccagggactctgttctgattagggagttctgggaaatcgttcattcatttacagatgaacagaaaagactcttcttgcagtttacaacgggcacagacagagcacctgtgggaggactaggaaaattaaagatgattatagccaaaaatggcccagacacagaaaggttacctacatctcatacttgctttaatgtgcttttacttccggaatactcaagcaaagaaaaacttaaagagagattgttgaaggccatcacgtatgccaaaggatttggcatgctgtaaaacaaaacaaaacaaaataaaacaaaaaaaaggaaggaaaaaaaaagaaaaaatttaaaaaattttaaaaatataacgagggataaatttttggtggtgatagtgtcccagtacaaaaaggctgtaagatagtcaaccacagtagtcacctatgtctgtgcctcccttctttattggggacatgtgggctggaacagcagatttcagctacatatatgaacaaatcctttattattattataattatttttttgcgtgaaagtgttacatattctttcacttgtatgtacagagaggtttttctgaatatttattttaagggttaaatcacttttgcttgtgtttattactgcttgaggttgagccttttgagtatttaaaaaatatataccaacagaactactctcccaaggaaaatattgccaccatttgtagaccacgtaaccttcaagtatgtgctacttttttgtccctgtatctaactcaaatcaggaactgtattttttttaatgatttgcttttgaaacttgaagtcttgaaaacagtgtgatgcaattactgctgttctagcccccaaagagttttctgtgcaaaatcttgagaatcaatcaataaagaaagatggaaggaagggagaaattggaatgttttaactgcagccctcagaactttagtaacagcacaacaaattaaaaacaaaaacaactcatgccacagtatgtcgtcttcatgtgtcttgcaatgaactgtttcagtagccaatcctctttcttagtatatgaaaggacagggattttgttcttgttgttctcgttgttgttttaagtttactggggaaagtgcatttggccaaatgaaatggtagtcaagcctattgcaacaaagttaggaagtttgttgtttgtttattataaacaaaaagcatgtgaaagtgcacttaagatagagtttttattaattacttacttattacctagattttaaatagacaatccaaagtctccccttcgtgttgccatcatcttgttgaatcagccattttatcgaggcacgtgatcagtgttgcaacataatgaaaaagatggctactgtgccttgtgttacttaatcatacagtaagctgacctggaaatgaatgaaactattactcctaagaattacattgtatagccccacagattaaatttaattaattaattcaaaacatgttaaacgttactttcatgtactatggaaaagtacaagtaggtttacattactgatttccagaagtaagtagtttcccctttcctagtcttctgtgtatgtgatgttgttaatttcttttattgcattataaaataaaaggattatgtatttttaactaaggtgagacattgatatatccttttgctacaagctatagctaatgtgctgagcttgtgccttggtgattgattgattgattgactgattgttttaactgattactgtagatcaacctgatgatttgtttgtttgaaattggcaggaaaaatgcagctttcaaatcattggggggagaaaaaggatgtctttcaggattattttaattaatttttttcataattgagacagaactgtttgttatgtaccataatgctaaataaaactgtggcacttttcaccataatttaatttagtggaaaaagaagacaatgctttccatattgtgataaggtaacatggggtttttctgggccagcctttagaacactgttagggtacatacgctaccttgatgaaagggaccttcgtgcaactgtagtcatcttaaaggcttctcatccactgtgcttcttaatgtgtaattaaagtgaggagaaattaaatactctgagggcgttttatataataaattcgtgaagaaatgtgtgctcttcagttctcaagttttattattatggtatttattaaagttctacaattgtaataacgtatccatatgacaagttttaaagtggtaattgaaataggttatcagatatagagttgttcacatcaagtagacttttaacagagtcagaatgaacctacccttaaaattttagagaaaaaaaatcgtcggttgcacagaatagctgctctagcttgcttaattatgccgggcatgttgtcactcctcttacttttgctgccttttcattactatttaatggaatgtccctgaacaataaggaagagcaaaacatagacattttgactacagtggatacttcctctaccccaaatgttatgttataaaagtactttttttgcccaggtactctattatatattttggttttctttgaattanacctcaatctccaggaagctctggagggaaaaaaaggaaccataaactaaagtaactggttttccaaataaatgtaaacttttttaaccttttattattatagaacatttcaaacatacataaaacatgaaaacagcctgcagccaaacttttctggaccttggcagctccagcaaatgagctggtcatcctaaccctggtttcctgagacaactacttttggggatgcttgcttgtatagggagatgatagatagatagatacatatcaaaaagaaacttgaaaaaggcttcgaacagaacttgccgatgttactcatccctcctcggtacagacattctgttagaacagatggttgtaatggggcagcatcactccctattcccattaaaaacatgaccattctgagatttcaggccccttcgaggaatttttctcaagaattccatacaaactgtcagaggaagaaatgtcgtcccaagactagtccctgtgtagtcttgatccctttacctgcttactgtaattttttttctctgactttccgccagtgtctaagggccatctgtacccctcccacccttccatgagccactgtataatccaaaaacacaccttccatttgctccctcacttgtctccttttacctcaacagtgttagtgtgtaaagaattgcctggggagggtagagggttttacaagtacagagtcccaagtcttttctcccctccccgttagtgggttggcatttattaataggcactgcaagattttgatgcaggtgtggggtagatatcactgtgaaaggctactaatgcatggtagtttcaccgaaagtacagtcttcaaggatccttataatctcctcattgccaaaatcagtaacatctataaccttgacaacaccctagcttgggctgttgcttctctggctacttgtttttccatcccagtttacccagattttagatggatactcctccaattctgcttaaagtccttacctgttcttgcccagttccctctagtcaacctcagtcactcccaaagattcttccccaatcccatatcttttgctcagacctctgtctctgggatttctttgttacctcatagtcagtagtcctaaaaacaaaattcttcatcttgcatctctatcgaccgaccattctttgtttctttttaagaaatgtaaccttcaccccaatcatcaaaatctctcattcctcaattgtcacaggttgtcacttctttccccctaaacctctcccatcattccttccttctttatactgcccttacaggtcctgatcctctgactcacccggacattcttagcagctgcctaatttcactccctgactctcatctccctcttccaatccttttcattgtgctagaacactatcttgctaattttaatatcctctgcattcagtgcctccacagattgccccctcactgacctttccaatttggccttgtgttacacactttcctcgctgcattcctacccagcatcttcacttgtcatatttctcaaatactcttcatgaccagatatttaaagtacctcatccatgaagacttcatcaacccccaaagtgcctccaatgcttccgtggtagcacagcataatggggtacatttcttagttgaacagtgaggagtcactgggattcttacagagtgtcttagggtctcctcttgatactctttccacatttcagttaaggaattttcttacatctttttttcttctaataacctttgcctggagtgtaagtaaattcatgatagagactgtcatttttaaaaaaaaaaaacaaaccattttgcctttcacatgttattacctccatctttctgttatcttgtcagtgttgccacctaaatgattgaaaatgaccgagcatgcagtagaatgtagtgaagtttcctatttcatccattttttgcataagtgcattggtatctgtatatccatctgcccaagcaccagttgttgaaaagactattatttccccatgaatggtcctggtacccttgtcaaagaacagttgaccataaatataagactttctggattctcagtcttactccattgccctatatgtctgtcgttataccagcaccgcactgtcttgattgctgtagcttggtagtaagtttagatttgggatgtgcaagtcctccattttttttttttttctccccaaaatcattttgtctgttttgggtcccttgcattgcatatgaatttttatatgatcattgtgtcaattcctgcaaaacagctgggatcttgatagggatttagttgaattggtagataaatttgagaaataactgctattttaatggtgttaggttttctgttccatgactgtgggatgtctttgcatttgcttaggtctttatttcagtgatgttttagagatttcagtgtgcaagtcttgacgtctttaatttttttctaagtattttactgatgccactttaattatatgattattttctaatttttatttttgtattcatcactggtgttagaaataaaattaatttttgtatattgattttgtatattgtagcttttctaaaattctttttttgtcacttagtattttttgcatatgagatcatgcatctgtgaacagaaatacttttacttcttcctttccagtctagattcctattatttcattttcttgccttagtgtgctggctagcacctccagtacaatattggatagaagtgacaagagcagacatctttttcttgttcctgattttaaggggaaagcattcagtctttcaccattgagtatgatgttagctagctgtgggtttgcttcaagttgaggaaattcttttattaaacctagtttactgagtgttttttaatcaaaaaaaaaaaaggaggggctgtgggttttgttaaatgcttcttctgtatcaagattttcatgttgttttgtcctttattaatatgttgtattaatggacttttgtatattgaattaactttgcattcctgggataatctcagttgtccatgctacataaaccttgttctatgctgctggatttggtttgctagtattttgtttagaatgtttgcatctatattcataaggaatattggtctgtagttttcatattatatatctgtccantttggggatgagagtcatactcctgacagaatgaattgggagctttccctgttcttaaacctactgaggtattttttaagtgaactacttggagaccttcacctgtgatcttcagatgctgggggacacagggatggtacctgactctgaaaaggctctcagggtaagacgtgtctgaactggcctgtggcagttaactaaagagtactcctaccaataatggagtcaagatgtatgtttcccataggccacgctggtcactgaaagagatgggctatgagccatcttgaaaactaccctgcacaaatggactgccggcctggagccaggcaccctgcagctgagtgccatataatgttgaagctgttgagggaggagaggttggaagctgccagcttagagaatctcagctgtggtttcccagcagggtgtattccccaggaaagaaagtcattcccccacccctggctcaaagtaataattaacagtgactgggtaaggcaggatctttttttcctaattccctcccctccagaaagggcagcaacagctcttgaatgggaaagaaggtggagggaggaaaagaaaaaccaattgccccaacactgctgtctttaagcttcccacccaaagacctcagtaagaggcagaattatgttttcaattaagagagagtttggcctcttggtgtttcaaaagtgtaggctttttaatacctagagaaactgatgatttgttgattaccaaaaagggaccagaaaagctacatagcctgagatttcatccccagaaaaacgaatccagagagcagacttgcaa

SEQ ID NO: 281379 - DNA, 7555 bp, Homo sapiens
  misc_feature (3556)..(3556): n is a, c, g, or t
  misc_feature (6736)..(6736): n is a, c, g, or t
aaccctcctgggggggggggtgcccagagggcttccggaagtcccaggtttattctttcgggtcacagacagcagaaactaaaaagagggattaccctttctgtccagtcgcaagatggcgaccgagcctggtgggactccgaggggccgcaggccacctcctcttcccaatggcccgtgcgccggcggcgacggcaagcgggagggaggcggggccggcgaaggaaggaggggcggagcgcggcgccctcccgcgcgtcttggccccgccccacgtccccgcgtcccggcctggagccctcgcccggccgggcggcgcgcgctgcctgccgggatactcggcccgcccagccagtcctcccgtcttgcgccgcggccgcgagatccgtgtgtctcccaagatggtggcgctgggctcggggtgactacaggagacgacggggccttttcccttcgccaggacccgacacaccaggcttcgctcgctcgcgcacccctccgccgcgtagccatccgccagcgcgggcgcccgccatccgccgcctacttacgcttcacctctgccgacccggcgcgctcggctgcgggcggcggcgcctccttcggctcctcctcggaatagctcgcggcctgtagcccctggcaggagggcccctcagccccccggtgtggacaggcagcggcggctggcgacgaacgccgggatttcggcggccccggcgctccctttcccggcctcgttttccggataaggaagcgcgggtcccgcatgagccccggcggtggcggcagcgaaagagaacgaggcggtggcgggcggaggcggcgggcgagggcgactacgaccagtgaggcggccgccgcagcccaggcgcgggggcgacgacaggttaaaaatctgtaagagcctgattttagaattcaccagctcctcagaagtttggcgaaatatgagttattaagcctacgctcagatcaaggtagcagctagactggtgtgacaacctgtttttaatcagtgactcaaagctgtgatcaccctgatgtcaccgaatggccacagcttgtaaaagatcaggagaacctcagtctgacgacattgaagctagccgaatgaagcgagcagctgcaaagcatctaatagaacgctactaccaccagttaactgagggctgtggaaatgaagcctgcacgaatgagttttgtgcttcctgtccaacttttcttcgtatggataataatgcagcagctattaaagccctcgagctttataagattaatgcaaaactctgtgatcctcatccctccaagaaaggagcaagctcagcttaccttgagaactcgaaaggtgcccccaacaactcctgctctgagataaaaatgaacaagaaaggcgctagaattgattttaaaggtaagatgttttattttcaaagcagatttcagctacatatatgaacaaatcctttattattattataattatttttttgcgtgaaagtgttacatattctttcacttgtatgtacagagaggtttttctgaatatttattttaagggttaaatcacttttgcttgtgtttattactgcttgaggttgagccttttgagtatttaaaaaatatataccaacagaactactctcccaaggaaaatattgccaccatttgtagaccacgtaaccttcaagtatgtgctacttttttgtccctgtatctaactcaaatcaggaactgtattttttttaatgatttgcttttgaaacttgaagtcttgaaaacagtgtgatgcaattactgctgttctagcccccaaagagttttctgtgcaaaatcttgagaatcaatcaataaagaaagatggaaggaagggagaaattggaatgttttaactgcagccctcagaactttagtaacagcacaacaaattaaaaacaaaaacaactcatgccacagtatgtcgtcttcatgtgtcttgcaatgaactgtttcagtagccaatcctctttcttagtatatgaaaggacagggattttgttcttgttgttctcgttgttgttttaagtttactggggaaagtgcatttggccaaatgaaatggtagtcaagcctattgcaacaaagttaggaagtttgttgtttgtttattataaacaaaaagcatgtgaaagtgcacttaagatagagtttttattaattacttacttattacctagattttaaatagacaatccaaagtctccccttcgtgttgccatcatcttgttgaatcagccattttatcgaggcacgtgatcagtgttgcaacataatgaaaaagatggctactgtgccttgtgttacttaatcatacagtaagctgacctggaaatgaatgaaactattactcctaagaattacattgtatagccccacagattaaatttaattaattaattcaaaacatgttaaacgttactttcatgtactatggaaaagtacaagtaggtttacattactgatttccagaagtaagtagtttcccctttcctagtcttctgtgtatgtgatgttgttaatttcttttattgcattataaaataaaaggattatgtatttttaactaaggtgagacattgatatatccttttgctacaagctatagctaatgtgctgagcttgtgccttggtgattgattgattgattgactgattgttttaactgattactgtagatcaacctgatgatttgtttgtttgaaattggcaggaaaaatgcagctttcaaatcattggggggagaaaaaggatgtctttcaggattattttaattaatttttttcataattgagacagaactgtttgttatgtaccataatgctaaataaaactgtggcacttttcaccataatttaatttagtggaaaaagaagacaatgctttccatattgtgataaggtaacatggggtttttctgggccagcctttagaacactgttagggtacatacgctaccttgatgaaagggaccttcgtgcaactgtagtcatcttaaaggcttctcatccactgtgcttcttaatgtgtaattaaagtgaggagaaattaaatactctgagggcgttttatataataaattcgtgaagaaatgtgtgctcttcagttctcaagttttattattatggtatttattaaagttctacaattgtaataacgtatccatatgacaagttttaaagtggtaattgaaataggttatcagatatagagttgttcacatcaagtagacttttaacagagtcagaatgaacctacccttaaaattttagagaaaaaaaatcgtcggttgcacagaatagctgctctagcttgcttaattatgccgggcatgttgtcactcctcttacttttgctgccttttcattactatttaatggaatgtccctgaacaataaggaagagcaaaacatagacattttgactacagtggatacttcctctaccccaaatgttatgttataaaagtactttttttgcccaggtactctattatatattttggttttctttgaattanacctcaatctccaggaagctctggagggaaaaaaaggaaccataaactaaagtaactggttttccaaataaatgtaaacttttttaaccttttattattatagaacatttcaaacatacataaaacatgaaaacagcctgcagccaaacttttctggaccttggcagctccagcaaatgagctggtcatcctaaccctggtttcctgagacaactacttttggggatgcttgcttgtatagggagatgatagatagatagatacatatcaaaaagaaacttgaaaaaggcttcgaacagaacttgccgatgttactcatccctcctcggtacagacattctgttagaacagatggttgtaatggggcagcatcactccctattcccattaaaaacatgaccattctgagatttcaggccccttcgaggaatttttctcaagaattccatacaaactgtcagaggaagaaatgtcgtcccaagactagtccctgtgtagtcttgatccctttacctgcttactgtaattttttttctctgactttccgccagtgtctaagggccatctgtacccctcccacccttccatgagccactgtataatccaaaaacacaccttccatttgctccctcacttgtctccttttacctcaacagtgttagtgtgtaaagaattgcctggggagggtagagggttttacaagtacagagtcccaagtcttttctcccctccccgttagtgggttggcatttattaataggcactgcaagattttgatgcaggtgtggggtagatatcactgtgaaaggctactaatgcatggtagtttcaccgaaagtacagtcttcaaggatccttataatctcctcattgccaaaatcagtaacatctataaccttgacaacaccctagcttgggctgttgcttctctggctacttgtttttccatcccagtttacccagattttagatggatactcctccaattctgcttaaagtccttacctgttcttgcccagttccctctagtcaacctcagtcactcccaaagattcttccccaatcccatatcttttgctcagacctctgtctctgggatttctttgttacctcatagtcagtagtcctaaaaacaaaattcttcatcttgcatctctatcgaccgaccattctttgtttctttttaagaaatgtaaccttcaccccaatcatcaaaatctctcattcctcaattgtcacaggttgtcacttctttccccctaaacctctcccatcattccttccttctttatactgcccttacaggtcctgatcctctgactcacccggacattcttagcagctgcctaatttcactccctgactctcatctccctcttccaatccttttcattgtgctagaacactatcttgctaattttaatatcctctgcattcagtgcctccacagattgccccctcactgacctttccaatttggccttgtgttacacactttcctcgctgcattcctacccagcatcttcacttgtcatatttctcaaatactcttcatgaccagatatttaaagtacctcatccatgaagacttcatcaacccccaaagtgcctccaatgcttccgtggtagcacagcataatggggtacatttcttagttgaacagtgaggagtcactgggattcttacagagtgtcttagggtctcctcttgatactctttccacatttcagttaaggaattttcttacatctttttttcttctaataacctttgcctggagtgtaagtaaattcatgatagagactgtcatttttaaaaaaaaaaaacaaaccattttgcctttcacatgttattacctccatctttctgttatcttgtcagtgttgccacctaaatgattgaaaatgaccgagcatgcagtagaatgtagtgaagtttcctatttcatccattttttgcataagtgcattggtatctgtatatccatctgcccaagcaccagttgttgaaaagactattatttccccatgaatggtcctggtacccttgtcaaagaacagttgaccataaatataagactttctggattctcagtcttactccattgccctatatgtctgtcgttataccagcaccgcactgtcttgattgctgtagcttggtagtaagtttagatttgggatgtgcaagtcctccattttttttttttttctccccaaaatcattttgtctgttttgggtcccttgcattgcatatgaatttttatatgatcattgtgtcaattcctgcaaaacagctgggatcttgatagggatttagttgaattggtagataaatttgagaaataactgctattttaatggtgttaggttttctgttccatgactgtgggatgtctttgcatttgcttaggtctttatttcagtgatgttttagagatttcagtgtgcaagtcttgacgtctttaatttttttctaagtattttactgatgccactttaattatatgattattttctaatttttatttttgtattcatcactggtgttagaaataaaattaatttttgtatattgattttgtatattgtagcttttctaaaattctttttttgtcacttagtattttttgcatatgagatcatgcatctgtgaacagaaatacttttacttcttcctttccagtctagattcctattatttcattttcttgccttagtgtgctggctagcacctccagtacaatattggatagaagtgacaagagcagacatctttttcttgttcctgattttaaggggaaagcattcagtctttcaccattgagtatgatgttagctagctgtgggtttgcttcaagttgaggaaattcttttattaaacctagtttactgagtgttttttaatcaaaaaaaaaaaaggaggggctgtgggttttgttaaatgcttcttctgtatcaagattttcatgttgttttgtcctttattaatatgttgtattaatggacttttgtatattgaattaactttgcattcctgggataatctcagttgtccatgctacataaaccttgttctatgctgctggatttggtttgctagtattttgtttagaatgtttgcatctatattcataaggaatattggtctgtagttttcatattatatatctgtccantttggggatgagagtcatactcctgacagaatgaattgggagctttccctgttcttaaacctactgaggtattttttaagtgaactacttggagaccttcacctgtgatcttcagatgctgggggacacagggatggtacctgactctgaaaaggctctcagggtaagacgtgtctgaactggcctgtggcagttaactaaagagtactcctaccaataatggagtcaagatgtatgtttcccataggccacgctggtcactgaaagagatgggctatgagccatcttgaaaactaccctgcacaaatggactgccggcctggagccaggcaccctgcagctgagtgccatataatgttgaagctgttgagggaggagaggttggaagctgccagcttagagaatctcagctgtggtttcccagcagggtgtattccccaggaaagaaagtcattcccccacccctggctcaaagtaataattaacagtgactgggtaaggcaggatctttttttcctaattccctcccctccagaaagggcagcaacagctcttgaatgggaaagaaggtggagggaggaaaagaaaaaccaattgccccaacactgctgtctttaagcttcccacccaaagacctcagtaagaggcagaattatgttttcaattaagagagagtttggcctcttggtgtttcaaaagtgtaggctttttaatacctagagaaactgatgatttgttgattaccaaaaagggaccagaaaagctacatagcctgagatttcatccccagaaaaacgaatccagagagcagacttgcaa

SEQ ID NO: 281380 - DNA, 6648 bp, Homo sapiens
  misc_feature (2649)..(2649): n is a, c, g, or t
  misc_feature (5829)..(5829): n is a, c, g, or t
catatagagagattcgtcctccgctacatcaaaatgagctgcgtgacctcttattaaaaccgctcagggagttctgggaaatcgttcattcatttacagatgaacagaaaagactcttcttgcagtttacaacgggcacagacagagcacctgtgggaggactaggaaaattaaagatgattatagccaaaaatggcccagacacagaaaggttacctacatctcatacttgctttaatgtgcttttacttccggaatactcaagcaaagaaaaacttaaagagagattgttgaaggccatcacgtatgccaaaggatttggcatgctgtaaaacaaaacaaaacaaaataaaacaaaaaaaaggaaggaaaaaaaaagaaaaaatttaaaaaattttaaaaatataacgagggataaatttttggtggtgatagtgtcccagtacaaaaaggctgtaagatagtcaaccacagtagtcacctatgtctgtgcctcccttctttattggggacatgtgggctggaacagcagatttcagctacatatatgaacaaatcctttattattattataattatttttttgcgtgaaagtgttacatattctttcacttgtatgtacagagaggtttttctgaatatttattttaagggttaaatcacttttgcttgtgtttattactgcttgaggttgagccttttgagtatttaaaaaatatataccaacagaactactctcccaaggaaaatattgccaccatttgtagaccacgtaaccttcaagtatgtgctacttttttgtccctgtatctaactcaaatcaggaactgtattttttttaatgatttgcttttgaaacttgaagtcttgaaaacagtgtgatgcaattactgctgttctagcccccaaagagttttctgtgcaaaatcttgagaatcaatcaataaagaaagatggaaggaagggagaaattggaatgttttaactgcagccctcagaactttagtaacagcacaacaaattaaaaacaaaaacaactcatgccacagtatgtcgtcttcatgtgtcttgcaatgaactgtttcagtagccaatcctctttcttagtatatgaaaggacagggattttgttcttgttgttctcgttgttgttttaagtttactggggaaagtgcatttggccaaatgaaatggtagtcaagcctattgcaacaaagttaggaagtttgttgtttgtttattataaacaaaaagcatgtgaaagtgcacttaagatagagtttttattaattacttacttattacctagattttaaatagacaatccaaagtctccccttcgtgttgccatcatcttgttgaatcagccattttatcgaggcacgtgatcagtgttgcaacataatgaaaaagatggctactgtgccttgtgttacttaatcatacagtaagctgacctggaaatgaatgaaactattactcctaagaattacattgtatagccccacagattaaatttaattaattaattcaaaacatgttaaacgttactttcatgtactatggaaaagtacaagtaggtttacattactgatttccagaagtaagtagtttcccctttcctagtcttctgtgtatgtgatgttgttaatttcttttattgcattataaaataaaaggattatgtatttttaactaaggtgagacattgatatatccttttgctacaagctatagctaatgtgctgagcttgtgccttggtgattgattgattgattgactgattgttttaactgattactgtagatcaacctgatgatttgtttgtttgaaattggcaggaaaaatgcagctttcaaatcattggggggagaaaaaggatgtctttcaggattattttaattaatttttttcataattgagacagaactgtttgttatgtaccataatgctaaataaaactgtggcacttttcaccataatttaatttagtggaaaaagaagacaatgctttccatattgtgataaggtaacatggggtttttctgggccagcctttagaacactgttagggtacatacgctaccttgatgaaagggaccttcgtgcaactgtagtcatcttaaaggcttctcatccactgtgcttcttaatgtgtaattaaagtgaggagaaattaaatactctgagggcgttttatataataaattcgtgaagaaatgtgtgctcttcagttctcaagttttattattatggtatttattaaagttctacaattgtaataacgtatccatatgacaagttttaaagtggtaattgaaataggttatcagatatagagttgttcacatcaagtagacttttaacagagtcagaatgaacctacccttaaaattttagagaaaaaaaatcgtcggttgcacagaatagctgctctagcttgcttaattatgccgggcatgttgtcactcctcttacttttgctgccttttcattactatttaatggaatgtccctgaacaataaggaagagcaaaacatagacattttgactacagtggatacttcctctaccccaaatgttatgttataaaagtactttttttgcccaggtactctattatatattttggttttctttgaattanacctcaatctccaggaagctctggagggaaaaaaaggaaccataaactaaagtaactggttttccaaataaatgtaaacttttttaaccttttattattatagaacatttcaaacatacataaaacatgaaaacagcctgcagccaaacttttctggaccttggcagctccagcaaatgagctggtcatcctaaccctggtttcctgagacaactacttttggggatgcttgcttgtatagggagatgatagatagatagatacatatcaaaaagaaacttgaaaaaggcttcgaacagaacttgccgatgttactcatccctcctcggtacagacattctgttagaacagatggttgtaatggggcagcatcactccctattcccattaaaaacatgaccattctgagatttcaggccccttcgaggaatttttctcaagaattccatacaaactgtcagaggaagaaatgtcgtcccaagactagtccctgtgtagtcttgatccctttacctgcttactgtaattttttttctctgactttccgccagtgtctaagggccatctgtacccctcccacccttccatgagccactgtataatccaaaaacacaccttccatttgctccctcacttgtctccttttacctcaacagtgttagtgtgtaaagaattgcctggggagggtagagggttttacaagtacagagtcccaagtcttttctcccctccccgttagtgggttggcatttattaataggcactgcaagattttgatgcaggtgtggggtagatatcactgtgaaaggctactaatgcatggtagtttcaccgaaagtacagtcttcaaggatccttataatctcctcattgccaaaatcagtaacatctataaccttgacaacaccctagcttgggctgttgcttctctggctacttgtttttccatcccagtttacccagattttagatggatactcctccaattctgcttaaagtccttacctgttcttgcccagttccctctagtcaacctcagtcactcccaaagattcttccccaatcccatatcttttgctcagacctctgtctctgggatttctttgttacctcatagtcagtagtcctaaaaacaaaattcttcatcttgcatctctatcgaccgaccattctttgtttctttttaagaaatgtaaccttcaccccaatcatcaaaatctctcattcctcaattgtcacaggttgtcacttctttccccctaaacctctcccatcattccttccttctttatactgcccttacaggtcctgatcctctgactcacccggacattcttagcagctgcctaatttcactccctgactctcatctccctcttccaatccttttcattgtgctagaacactatcttgctaattttaatatcctctgcattcagtgcctccacagattgccccctcactgacctttccaatttggccttgtgttacacactttcctcgctgcattcctacccagcatcttcacttgtcatatttctcaaatactcttcatgaccagatatttaaagtacctcatccatgaagacttcatcaacccccaaagtgcctccaatgcttccgtggtagcacagcataatggggtacatttcttagttgaacagtgaggagtcactgggattcttacagagtgtcttagggtctcctcttgatactctttccacatttcagttaaggaattttcttacatctttttttcttctaataacctttgcctggagtgtaagtaaattcatgatagagactgtcatttttaaaaaaaaaaaacaaaccattttgcctttcacatgttattacctccatctttctgttatcttgtcagtgttgccacctaaatgattgaaaatgaccgagcatgcagtagaatgtagtgaagtttcctatttcatccattttttgcataagtgcattggtatctgtatatccatctgcccaagcaccagttgttgaaaagactattatttccccatgaatggtcctggtacccttgtcaaagaacagttgaccataaatataagactttctggattctcagtcttactccattgccctatatgtctgtcgttataccagcaccgcactgtcttgattgctgtagcttggtagtaagtttagatttgggatgtgcaagtcctccattttttttttttttctccccaaaatcattttgtctgttttgggtcccttgcattgcatatgaatttttatatgatcattgtgtcaattcctgcaaaacagctgggatcttgatagggatttagttgaattggtagataaatttgagaaataactgctattttaatggtgttaggttttctgttccatgactgtgggatgtctttgcatttgcttaggtctttatttcagtgatgttttagagatttcagtgtgcaagtcttgacgtctttaatttttttctaagtattttactgatgccactttaattatatgattattttctaatttttatttttgtattcatcactggtgttagaaataaaattaatttttgtatattgattttgtatattgtagcttttctaaaattctttttttgtcacttagtattttttgcatatgagatcatgcatctgtgaacagaaatacttttacttcttcctttccagtctagattcctattatttcattttcttgccttagtgtgctggctagcacctccagtacaatattggatagaagtgacaagagcagacatctttttcttgttcctgattttaaggggaaagcattcagtctttcaccattgagtatgatgttagctagctgtgggtttgcttcaagttgaggaaattcttttattaaacctagtttactgagtgttttttaatcaaaaaaaaaaaaggaggggctgtgggttttgttaaatgcttcttctgtatcaagattttcatgttgttttgtcctttattaatatgttgtattaatggacttttgtatattgaattaactttgcattcctgggataatctcagttgtccatgctacataaaccttgttctatgctgctggatttggtttgctagtattttgtttagaatgtttgcatctatattcataaggaatattggtctgtagttttcatattatatatctgtccantttggggatgagagtcatactcctgacagaatgaattgggagctttccctgttcttaaacctactgaggtattttttaagtgaactacttggagaccttcacctgtgatcttcagatgctgggggacacagggatggtacctgactctgaaaaggctctcagggtaagacgtgtctgaactggcctgtggcagttaactaaagagtactcctaccaataatggagtcaagatgtatgtttcccataggccacgctggtcactgaaagagatgggctatgagccatcttgaaaactaccctgcacaaatggactgccggcctggagccaggcaccctgcagctgagtgccatataatgttgaagctgttgagggaggagaggttggaagctgccagcttagagaatctcagctgtggtttcccagcagggtgtattccccaggaaagaaagtcattcccccacccctggctcaaagtaataattaacagtgactgggtaaggcaggatctttttttcctaattccctcccctccagaaagggcagcaacagctcttgaatgggaaagaaggtggagggaggaaaagaaaaaccaattgccccaacactgctgtctttaagcttcccacccaaagacctcagtaagaggcagaattatgttttcaattaagagagagtttggcctcttggtgtttcaaaagtgtaggctttttaatacctagagaaactgatgatttgttgattaccaaaaagggaccagaaaagctacatagcctgagatttcatccccagaaaaacgaatccagagagcagacttgcaa

SEQ ID NO: 281381 - DNA, 2865 bp, Homo sapiens
aaccctcctgggggggggggtgcccagagggcttccggaagtcccaggtttattctttcgggtcacagacagcagaaactaaaaagagggattaccctttctgtccagtcgcaagatggcgaccgagcctggtgggactccgaggggccgcaggccacctcctcttcccaatggcccgtgcgccggcggcgacggcaagcgggagggaggcggggccggcgaaggaaggaggggcggagcgcggcgccctcccgcgcgtcttggccccgccccacgtccccgcgtcccggcctggagccctcgcccggccgggcggcgcgcgctgcctgccgggatactcggcccgcccagccagtcctcccgtcttgcgccgcggccgcgagatccgtgtgtctcccaagatggtggcgctgggctcggggtgactacaggagacgacggggccttttcccttcgccaggacccgacacaccaggcttcgctcgctcgcgcacccctccgccgcgtagccatccgccagcgcgggcgcccgccatccgccgcctacttacgcttcacctctgccgacccggcgcgctcggctgcgggcggcggcgcctccttcggctcctcctcggaatagctcgcggcctgtagcccctggcaggagggcccctcagccccccggtgtggacaggcagcggcggctggcgacgaacgccgggatttcggcggccccggcgctccctttcccggcctcgttttccggataaggaagcgcgggtcccgcatgagccccggcggtggcggcagcgaaagagaacgaggcggtggcgggcggaggcggcgggcgagggcgactacgaccagtgaggcggccgccgcagcccaggcgcgggggcgacgacaggttaaaaatctgtaagagcctgattttagaattcaccagctcctcagaagtttggcgaaatatgagttattaagcctacgctcagatcaaggtagcagctagactggtgtgacaacctgtttttaatcagtgactcaaagctgtgatcaccctgatgtcaccgaatggccacagcttgtaaaagatcaggagaacctcagtctgacgacattgaagctagccgaatgaagcgagcagctgcaaagcatctaatagaacgctactaccaccagttaactgagggctgtggaaatgaagcctgcacgaatgagttttgtgcttcctgtccaacttttcttcgtatggataataatgcagcagctattaaagccctcgagctttataagattaatgcaaaactctgtgatcctcatccctccaagaaaggagcaagctcagcttaccttgagaactcgaaaggtgcccccaacaactcctgctctgagataaaaatgaacaagaaaggcgctagaattgattttaaagatgtgacttacttaacagaagagaaggtatatgaaattcttgaattatgtagagaaagagaggattattcccctttaatccgtgttattggaagagttttttctagtgctgaggcattggtacagagcttccggaaagttaaacaacacaccaaggaagaactgaaatctcttcaagcaaaagatgaagacaaagatgaagatgaaaaggaaaaagctgcatgttctgctgctgctatggaagaagactcagaagcatcttcctcaaggataggtgatagctcacagggagacaacaatttgcaaaaattaggccctgatgatgtgtctgtggatattgatgccattagaagggtctacaccagattgctctctaatgaaaaaattgaaactgcctttctcaatgcacttgtatatttgtcacctaacgtggaatgtgacttgacgtatcacaatgtatactctcgagatcctaattatctgaatttgttcattatcgtaatggagaatagaaatctccacagtcctgaatatctggaaatggctttgccattattttgcaaagcgatgagcaagctaccccttgcagcccaaggaaaactgatcagactgtggtctaaatacaatgcagaccagattcggagaatgatggagacatttcagcaacttattacttataaagtcataagcaatgaatttaacagtcgaaatctagtgaatgatgatgatgccattgttgctgcttcgaagtgcttgaaaatggtttactatgcaaatgtagtgggaggggaagtggacacaaatcacaatgaagaagatgatgaagagcccatccctgagtccagcgagctgacacttcaggaacttttgggagaagaaagaagaaacaagaaaggtcctcgagtggaccccctggaaactgaacttggtgttaaaaccctggattgtcgaaaaccacttatcccttttgaagagtttattaatgaaccactgaatgaggttctagaaatggataaagattatacttttttcaaagtagaaacagagaacaaattctcttttatgacatgtccctttatattgaatgctgtcacaaagaatttgggattatattatgacaatagaattcgcatgtacagtgaacgaagaatcactgttctctacagcttagttcaaggacagcagttgaatccatatttgagactcaaagttagacgtgaccatatcatagatgatgcacttgtccgggtaagttgggctgctagattaaaacctaataatggggatatcatgatacagttcagtgaattcattttaaaagtgactgaaaaaaatgataccatatagcataggaacacatggacatttctgatcttatataagtattatacttttgttgttcctgtgcaagtttatagatgtgttctacaaagtatcggttgtattatataa

SEQ ID NO: 281382 - DNA, 2175 bp, Homo sapiens
aaccctcctgggggggggggtgcccagagggcttccggaagtcccaggtttattctttcgggtcacagacagcagaaactaaaaagagggattaccctttctgtccagtcgcaagatggcgaccgagcctggtgggactccgaggggccgcaggccacctcctcttcccaatggcccgtgcgccggcggcgacggcaagcgggagggaggcggggccggcgaaggaaggaggggcggagcgcggcgccctcccgcgcgtcttggccccgccccacgtccccgcgtcccggcctggagccctcgcccggccgggcggcgcgcgctgcctgccgggatactcggcccgcccagccagtcctcccgtcttgcgccgcggccgcgagatccgtgtgtctcccaagatggtggcgctgggctcggggtgactacaggagacgacggggccttttcccttcgccaggacccgacacaccaggcttcgctcgctcgcgcacccctccgccgcgtagccatccgccagcgcgggcgcccgccatccgccgcctacttacgcttcacctctgccgacccggcgcgctcggctgcgggcggcggcgcctccttcggctcctcctcggaatagctcgcggcctgtagcccctggcaggagggcccctcagccccccggtgtggacaggcagcggcggctggcgacgaacgccgggatttcggcggccccggcgctccctttcccggcctcgttttccggataaggaagcgcgggtcccgcatgagccccggcggtggcggcagcgaaagagaacgaggcggtggcgggcggaggcggcgggcgagggcgactacgaccagtgaggcggccgccgcagcccaggcgcgggggcgacgacaggttaaaaatctgtaagagcctgattttagaattcaccagctcctcagaagtttggcgaaatatgagttattaagcctacgctcagatcaaggtagcagctagactggtgtgacaacctgtttttaatcagtgactcaaagctgtgatcaccctgatgtcaccgaatggccacagcttgtaaaagatcaggagaacctcagtctgacgacattgaagctagccgaatgaagcgagcagctgcaaagcatctaatagaacgctactaccaccagttaactgagggctgtggaaatgaagcctgcacgaatgagttttgtgcttcctgtccaacttttcttcgtatggataataatgcagcagctattaaagccctcgagctttataagattaatgcaaaactctgtgatcctcatccctccaagaaaggagcaagctcagcttaccttgagaactcgaaaggtgcccccaacaactcctgctctgagataaaaatgaacaagaaaggcgctagaattgattttaaagatgtgacttacttaacagaagagaaggtatatgaaattcttgaattatgtagagaaagagaggattattcccctttaatccgtgttattggaagagttttttctagtgctgaggcattggtacagagcttccggaaagttaaacaacacaccaaggaagaactgaaatctcttcaagcaaaagatgaagacaaagatgaagatgaaaaggaaaaagctgcatgttctgctgctgctatggaagaagactcagaagcatcttcctcaaggataggtgatagctcacagggagacaacaatttgcaaaaattaggccctgatgatgtgtctgtggatattgatgccattagaagggtctacaccagattgctctctaatgaaaaaattgaaactgcctttctcaatgcacttgtatatttgtcacctaacgtggaatgtgacttgacgtatcacaatgtatactctcgagatcctaattatctgaatttgttcattatcgtaatggagaatagaaatctccacagtcctgaatatctggaaatggctttgccattattttgcaaagcgatgagcaagctacctgggttaggtctacctggccaggtagacctaacagcagcaacaaacagcagcaacagcagcacagtaaaggcaatacaatttcctgctttcaccaattaaccactgaattgctatttttttccttttggccagatagctaggtttctggttcccccacagtaggtctagttagtctacctg

SEQ ID NO: 281383 - DNA, 1564 bp, Homo sapiens
  misc_feature (1538)..(1538): n is a, c, g, or t
  misc_feature (1559)..(1559): n is a, c, g, or t
aaccctcctgggggggggggtgcccagagggcttccggaagtcccaggtttattctttcgggtcacagacagcagaaactaaaaagagggattaccctttctgtccagtcgcaagatggcgaccgagcctggtgggactccgaggggccgcaggccacctcctcttcccaatggcccgtgcgccggcggcgacggcaagcgggagggaggcggggccggcgaaggaaggaggggcggagcgcggcgccctcccgcgcgtcttggccccgccccacgtccccgcgtcccggcctggagccctcgcccggccgggcggcgcgcgctgcctgccgggatactcggcccgcccagccagtcctcccgtcttgcgccgcggccgcgagatccgtgtgtctcccaagatggtggcgctgggctcggggtgactacaggagacgacggggccttttcccttcgccaggacccgacacaccaggcttcgctcgctcgcgcacccctccgccgcgtagccatccgccagcgcgggcgcccgccatccgccgcctacttacgcttcacctctgccgacccggcgcgctcggctgcgggcggcggcgcctccttcggctcctcctcggaatagctcgcggcctgtagcccctggcaggagggcccctcagccccccggtgtggacaggcagcggcggctggcgacgaacgccgggatttcggcggccccggcgctccctttcccggcctcgttttccggataaggaagcgcgggtcccgcatgagccccggcggtggcggcagcgaaagagaacgaggcggtggcgggcggaggcggcgggcgagggcgactacgaccagtgaggcggccgccgcagcccaggcgcgggggcgacgacaggttaaaaatctgtaagagcctgattttagaattcaccagctcctcagaagtttggcgaaatatgagttattaagcctacgctcagatcaaggtagcagctagactggtgtgacaacctgtttttaatcagtgactcaaagctgtgatcaccctgatgtcaccgaatggccacagcttgtaaaagatcaggagaacctcagtctgacgacattgaagctagccgaatgaagcgagcagctgcaaagcatctaatagaacgctactaccaccagttaactgagggctgtggaaatgaagcctgcacgaatgagttttgtgcttcctgtccaacttttcttcgtatggataataatgcagcagctattaaagccctcgagctttataagattaatgcaaaactctgtgatcctcatccctccaagaaaggagcaagctcagcttaccttgagaactcgaaaggtgcccccaacaactcctgctctgtcgtcgccgccgcagcccaggcgcgggggcgacgacagatcaggagaacctcagtctgacgacattgaagctagccgaatgaagcgagcagctgcaaagcatctaatagaacgctactaccaccagttaactgagggctgtggaaatgaagcctgcacgaatgagntttgtgcttcctgtccaactnttctt

SEQ ID NO: 281384 - DNA, 460 bp, Homo sapiens
ctcccctccgtcactcggccggccttcggggcccgctgtggcgaggtcgacaccccccttccccgccccccgccgccgaggcgagtgtttgggggcgcgtggtccgaaggggctggtgcgcagaagtaggcccctggtggccgcggctgctgcagccgtaactgtcagtcctggctgagcgacggcgggagggttttgtcgcccgaggggacgcgagcgggcccggggcggggcgggacgtgcgaggcgtcgagatttgggcctcctaggagccaggctcttcgagccagccggggccccagacagggaagggcaggccctttccttcaaaggggagccctttctcggcgttttcaaggtttttggctctcttggggaagacatatttagccgtgtgcttggtgggttggggttttgggggtggattgatgggaagggagggcggatgaagtggtatgtc

SEQ ID NO: 281385 - DNA, 435 bp, Homo sapiens
tcctctctgtggttttgttgtggaaagatttagttaaatgaactgtaagaattcagtacctaaaatggtatctgttatgtagtaaaaactcaatggatacagtatcttatcatcgtcactagctttgagtaatttataggataaaggcaacttggtagttacacaacaaaaagtttatgatttgcattaatgtatagtttgcattgcagaccgtctcaactatatacaatctaaaaataggagcatttaattctaagtgtatttcccatgacttacagttttcctgtttttttccccttttctctatttaggttacctacatctcatacttgctttaatgtgcttttacttccggaatactcaagcaaagaaaaacttaaagagagattgttgaaggccatcacgtatgccaaaggatttggcatgctgtaaaac

SEQ ID NO: 281386 - DNA, 756 bp, Homo sapiens
ggaaatgtagccattttttgtttttttatgtttatttttcagctatgggtggataaagcatgaatataacttttcttatgtgttagtagaaaattagaaagcttgaatttaattaacgtatttttctacccgatgccaccaaattacttactactttattcctttggcttcataaaattacatatcaccattcaccccaatttatagcagatatatgtggacattgttttctcaagtgctaatataatagaaatcaatgttgcatgcctaattacatatattttaaatgttttatatgcataattattttaagtttatatttgtattattcatcagtccttaataaaatacaaaagtaatgtatttttaaaaatcatttcttataggtatgttcacatacgatgaatctacaaaattgttttggtttaatccatcttcttttgaaactgagggtcagtttactctgattggcatagtactgggtctggctatttacaataactgtatactggatgtacattttcccatggttgtctacaggaagctaatggggaaaaaaggaacttttcgtgacttgggagactctcacccagtaagttctttgtcatttttttaattcagtctcttagattttatttaaatgcaaaaatttaatttatgtcaaaattttaaagtttttgtttagaatctttgttgatactcttatcaataagataaaaatgttttaatctgaccgaagtaccagaaacacttaaa

SEQ ID NO: 281387 - DNA, 5246 bp, Homo sapiens
aaccctcctgggggggggggtgcccagagggcttccggaagtcccaggtttattctttcgggtcacagacagcagaaactaaaaagagggattaccctttctgtccagtcgcaagatggcgaccgagcctggtgggactccgaggggccgcaggccacctcctcttcccaatggcccgtgcgccggcggcgacggcaagcgggagggaggcggggccggcgaaggaaggaggggcggagcgcggcgccctcccgcgcgtcttggccccgccccacgtccccgcgtcccggcctggagccctcgcccggccgggcggcgcgcgctgcctgccgggatactcggcccgcccagccagtcctcccgtcttgcgccgcggccgcgagatccgtgtgtctcccaagatggtggcgctgggctcggggtgactacaggagacgacggggccttttcccttcgccaggacccgacacaccaggcttcgctcgctcgcgcacccctccgccgcgtagccatccgccagcgcgggcgcccgccatccgccgcctacttacgcttcacctctgccgacccggcgcgctcggctgcgggcggcggcgcctccttcggctcctcctcggaatagctcgcggcctgtagcccctggcaggagggcccctcagccccccggtgtggacaggcagcggcggctggcgacgaacgccgggatttcggcggccccggcgctccctttcccggcctcgttttccggataaggaagcgcgggtcccgcatgagccccggcggtggcggcagcgaaagagaacgaggcggtggcgggcggaggcggcgggcgagggcgactacgaccagtgaggcggccgccgcagcccaggcgcgggggcgacgacaggttaaaaatctgtaagagcctgattttagaattcaccagctcctcagaagtttggcgaaatatgagttattaagcctacgctcagatcaaggtagcagctagactggtgtgacaacctgtttttaatcagtgactcaaagctgtgatcaccctgatgtcaccgaatggccacagcttgtaaaagagagttacagtggaggtaaaaggagtggcttgcaggatggagaagctgcaccagtgttattggaagtgagccaccatttgaatttgctagctcatgctgcagtattcagattatgccagcaggtttattttttgttttgcaagccagctctgcctccttacagtatgacatctgatgctggagggtcgcactttcaaaaatgagtcagctggtacatggggttatcatcaatttttagctcttctgtctgggagatacaagtttggaagcaatcttggggtacttacccacaaggctggtggagaccagatcaggagaacctcagtctgacgacattgaagctagccgaatgaagcgagcagctgcaaagcatctaatagaacgctactaccaccagttaactgagggctgtggaaatgaagcctgcacgaatgagttttgtgcttcctgtccaacttttcttcgtatggataataatgcagcagctattaaagccctcgagctttataagattaatgcaaaactctgtgatcctcatccctccaagaaaggagcaagctcagcttaccttgagaactcgaaaggtgcccccaacaactcctgctctgagataaaaatgaacaagaaaggcgctagaattgattttaaagatgtgacttacttaacagaagagaaggtatatgaaattcttgaattatgtagagaaagagaggattattcccctttaatccgtgttattggaagagttttttctagtgctgaggcattggtacagagcttccggaaagttaaacaacacaccaaggaagaactgaaatctcttcaagcaaaagatgaagacaaagatgaagatgaaaaggaaaaagctgcatgttctgctgctgctatggaagaagactcagaagcatcttcctcaaggataggtgatagctcacagggagacaacaatttgcaaaaattaggccctgatgatgtgtctgtggatattgatgccattagaagggtctacaccagattgctctctaatgaaaaaattgaaactgcctttctcaatgcacttgtatatttgtcacctaacgtggaatgtgacttgacgtatcacaatgtatactctcgagatcctaattatctgaatttgttcattatcgtaatggagaatagaaatctccacagtcctgaatatctggaaatggctttgccattattttgcaaagcgatgagcaagctaccccttgcagcccaaggaaaactgatcagactgtggtctaaatacaatgcagaccagattcggagaatgatggagacatttcagcaacttattacttataaagtcataagcaatgaatttaacagtcgaaatctagtgaatgatgatgatgccattgttgctgcttcgaagtgcttgaaaatggtttactatgcaaatgtagtgggaggggaagtggacacaaatcacaatgaagaagatgatgaagagcccatccctgagtccagcgagctgacacttcaggaacttttgggagaagaaagaagaaacaagaaaggtcctcgagtggaccccctggaaactgaacttggtgttaaaaccctggattgtcgaaaaccacttatcccttttgaagagtttattaatgaaccactgaatgaggttctagaaatggataaagattatacttttttcaaagtagaaacagagaacaaattctcttttatgacatgtccctttatattgaatgctgtcacaaagaatttgggattatattatgacaatagaattcgcatgtacagtgaacgaagaatcactgttctctacagcttagttcaaggacagcagttgaatccatatttgagactcaaagttagacgtgaccatatcatagatgatgcacttgtccggctagagatgatcgctatggaaaatcctgcagacttgaagaagcagttgtatgtggaatttgaaggagaacaaggagttgatgagggaggtgtttccaaagaattttttcagctggttgtggaggaaatcttcaatccagatattggtatgttcacatacgatgaatctacaaaattgttttggtttaatccatcttcttttgaaactgagggtcagtttactctgattggcatagtactgggtctggctatttacaataactgtatactggatgtacattttcccatggttgtctacaggaagctaatggggaaaaaaggaacttttcgtgacttgggagactctcacccagttctatatcagagtttaaaagatttattggagtatgaagggaatgtggaagatgacatgatgatcactttccagatatcacagacagatctttttggtaacccaatgatgtatgatctaaaggaaaatggtgataaaattccaattacaaatgaaaacaggaaggaatttgtcaatctttattctgactacattctcaataaatcagtagaaaaacagttcaaggcttttcggagaggttttcatatggtgaccaatgaatctcccttaaagtacttattcagaccagaagaaattgaattgcttatatgtggaagccggaatctagatttccaagcactagaagaaactacagaatatgacggtggctataccagggactctgttctgattagggagttctgggaaatcgttcattcatttacagatgaacagaaaagactcttcttgcagtttacaacgggcacagacagagcacctgtgggaggactaggaaaattaaagatgattatagccaaaaatggcccagacacagaaaggttacctacatctcatacttgctttaatgtgcttttacttccggaatactcaagcaaagaaaaacttaaagagagattgttgaaggccatcacgtatgccaaaggatttggcatgctgtaaaacaaaacaaaacaaaataaaacaaaaaaaaggaaggaaaaaaaaagaaaaaatttaaaaaattttaaaaatataacgagggataaatttttggtggtgatagtgtcccagtacaaaaaggctgtaagatagtcaaccacagtagtcacctatgtctgtgcctcccttctttattggggacatgtgggctggaacagcagatttcagctacatatatgaacaaatcctttattattattataattatttttttgcgtgaaagtgttacatattctttcacttgtatgtacagagaggtttttctgaatatttattttaagggttaaatcacttttgcttgtgtttattactgcttgaggttgagccttttgagtatttaaaaaatatataccaacagaactactctcccaaggaaaatattgccaccatttgtagaccacgtaaccttcaagtatgtgctacttttttgtccctgtatctaactcaaatcaggaactgtattttttttaatgatttgcttttgaaacttgaagtcttgaaaacagtgtgatgcaattactgctgttctagcccccaaagagttttctgtgcaaaatcttgagaatcaatcaataaagaaagatggaaggaagggagaaattggaatgttttaactgcagccctcagaactttagtaacagcacaacaaattaaaaacaaaaacaactcatgccacagtatgtcgtcttcatgtgtcttgcaatgaactgtttcagtagccaatcctctttcttagtatatgaaaggacagggattttgttcttgttgttctcgttgttgttttaagtttactggggaaagtgcatttggccaaatgaaatggtagtcaagcctattgcaacaaagttaggaagtttgttgtttgtttattataaacaaaaagcatgtgaaagtgcacttaagatagagtttttattaattacttacttattacctagattttaaatagacaatccaaagtctccccttcgtgttgccatcatcttgttgaatcagccattttatcgaggcacgtgatcagtgttgcaacataatgaaaaagatggctactgtgccttgtgttacttaatcatacagtaagctgacctggaaatgaatgaaactattactcctaagaattacattgtatagccccaacgagccacaacaaagcgccccgcaatgggccacccaatgagccccctaagcgccacgcgaacgagccccacaaagagccaccatgagct

SEQ ID NO: 281388 - DNA, 7076 bp, Homo sapiens
  misc_feature (3077)..(3077): n is a, c, g, or t
  misc_feature (6257)..(6257): n is a, c, g, or t
attgataagatttttgttgtcttctaagaagagtgatataaattatttgttgtattttgtagttctatggtggcctcaatttaccatttctggttgctaggttctatatcagagtttaaaagatttattggagtatgaagggaatgtggaagatgacatgatgatcactttccagatatcacagacagatctttttggtaacccaatgatgtatgatctaaaggaaaatggtgataaaattccaattacaaatgaaaacaggaaggaatttgtcaatctttattctgactacattctcaataaatcagtagaaaaacagttcaaggcttttcggagaggttttcatatggtgaccaatgaatctcccttaaagtacttattcagaccagaagaaattgaattgcttatatgtggaagccggaatctagatttccaagcactagaagaaactacagaatatgacggtggctataccagggactctgttctgattagggagttctgggaaatcgttcattcatttacagatgaacagaaaagactcttcttgcagtttacaacgggcacagacagagcacctgtgggaggactaggaaaattaaagatgattatagccaaaaatggcccagacacagaaaggttacctacatctcatacttgctttaatgtgcttttacttccggaatactcaagcaaagaaaaacttaaagagagattgttgaaggccatcacgtatgccaaaggatttggcatgctgtaaaacaaaacaaaacaaaataaaacaaaaaaaaggaaggaaaaaaaaagaaaaaatttaaaaaattttaaaaatataacgagggataaatttttggtggtgatagtgtcccagtacaaaaaggctgtaagatagtcaaccacagtagtcacctatgtctgtgcctcccttctttattggggacatgtgggctggaacagcagatttcagctacatatatgaacaaatcctttattattattataattatttttttgcgtgaaagtgttacatattctttcacttgtatgtacagagaggtttttctgaatatttattttaagggttaaatcacttttgcttgtgtttattactgcttgaggttgagccttttgagtatttaaaaaatatataccaacagaactactctcccaaggaaaatattgccaccatttgtagaccacgtaaccttcaagtatgtgctacttttttgtccctgtatctaactcaaatcaggaactgtattttttttaatgatttgcttttgaaacttgaagtcttgaaaacagtgtgatgcaattactgctgttctagcccccaaagagttttctgtgcaaaatcttgagaatcaatcaataaagaaagatggaaggaagggagaaattggaatgttttaactgcagccctcagaactttagtaacagcacaacaaattaaaaacaaaaacaactcatgccacagtatgtcgtcttcatgtgtcttgcaatgaactgtttcagtagccaatcctctttcttagtatatgaaaggacagggattttgttcttgttgttctcgttgttgttttaagtttactggggaaagtgcatttggccaaatgaaatggtagtcaagcctattgcaacaaagttaggaagtttgttgtttgtttattataaacaaaaagcatgtgaaagtgcacttaagatagagtttttattaattacttacttattacctagattttaaatagacaatccaaagtctccccttcgtgttgccatcatcttgttgaatcagccattttatcgaggcacgtgatcagtgttgcaacataatgaaaaagatggctactgtgccttgtgttacttaatcatacagtaagctgacctggaaatgaatgaaactattactcctaagaattacattgtatagccccacagattaaatttaattaattaattcaaaacatgttaaacgttactttcatgtactatggaaaagtacaagtaggtttacattactgatttccagaagtaagtagtttcccctttcctagtcttctgtgtatgtgatgttgttaatttcttttattgcattataaaataaaaggattatgtatttttaactaaggtgagacattgatatatccttttgctacaagctatagctaatgtgctgagcttgtgccttggtgattgattgattgattgactgattgttttaactgattactgtagatcaacctgatgatttgtttgtttgaaattggcaggaaaaatgcagctttcaaatcattggggggagaaaaaggatgtctttcaggattattttaattaatttttttcataattgagacagaactgtttgttatgtaccataatgctaaataaaactgtggcacttttcaccataatttaatttagtggaaaaagaagacaatgctttccatattgtgataaggtaacatggggtttttctgggccagcctttagaacactgttagggtacatacgctaccttgatgaaagggaccttcgtgcaactgtagtcatcttaaaggcttctcatccactgtgcttcttaatgtgtaattaaagtgaggagaaattaaatactctgagggcgttttatataataaattcgtgaagaaatgtgtgctcttcagttctcaagttttattattatggtatttattaaagttctacaattgtaataacgtatccatatgacaagttttaaagtggtaattgaaataggttatcagatatagagttgttcacatcaagtagacttttaacagagtcagaatgaacctacccttaaaattttagagaaaaaaaatcgtcggttgcacagaatagctgctctagcttgcttaattatgccgggcatgttgtcactcctcttacttttgctgccttttcattactatttaatggaatgtccctgaacaataaggaagagcaaaacatagacattttgactacagtggatacttcctctaccccaaatgttatgttataaaagtactttttttgcccaggtactctattatatattttggttttctttgaattanacctcaatctccaggaagctctggagggaaaaaaaggaaccataaactaaagtaactggttttccaaataaatgtaaacttttttaaccttttattattatagaacatttcaaacatacataaaacatgaaaacagcctgcagccaaacttttctggaccttggcagctccagcaaatgagctggtcatcctaaccctggtttcctgagacaactacttttggggatgcttgcttgtatagggagatgatagatagatagatacatatcaaaaagaaacttgaaaaaggcttcgaacagaacttgccgatgttactcatccctcctcggtacagacattctgttagaacagatggttgtaatggggcagcatcactccctattcccattaaaaacatgaccattctgagatttcaggccccttcgaggaatttttctcaagaattccatacaaactgtcagaggaagaaatgtcgtcccaagactagtccctgtgtagtcttgatccctttacctgcttactgtaattttttttctctgactttccgccagtgtctaagggccatctgtacccctcccacccttccatgagccactgtataatccaaaaacacaccttccatttgctccctcacttgtctccttttacctcaacagtgttagtgtgtaaagaattgcctggggagggtagagggttttacaagtacagagtcccaagtcttttctcccctccccgttagtgggttggcatttattaataggcactgcaagattttgatgcaggtgtggggtagatatcactgtgaaaggctactaatgcatggtagtttcaccgaaagtacagtcttcaaggatccttataatctcctcattgccaaaatcagtaacatctataaccttgacaacaccctagcttgggctgttgcttctctggctacttgtttttccatcccagtttacccagattttagatggatactcctccaattctgcttaaagtccttacctgttcttgcccagttccctctagtcaacctcagtcactcccaaagattcttccccaatcccatatcttttgctcagacctctgtctctgggatttctttgttacctcatagtcagtagtcctaaaaacaaaattcttcatcttgcatctctatcgaccgaccattctttgtttctttttaagaaatgtaaccttcaccccaatcatcaaaatctctcattcctcaattgtcacaggttgtcacttctttccccctaaacctctcccatcattccttccttctttatactgcccttacaggtcctgatcctctgactcacccggacattcttagcagctgcctaatttcactccctgactctcatctccctcttccaatccttttcattgtgctagaacactatcttgctaattttaatatcctctgcattcagtgcctccacagattgccccctcactgacctttccaatttggccttgtgttacacactttcctcgctgcattcctacccagcatcttcacttgtcatatttctcaaatactcttcatgaccagatatttaaagtacctcatccatgaagacttcatcaacccccaaagtgcctccaatgcttccgtggtagcacagcataatggggtacatttcttagttgaacagtgaggagtcactgggattcttacagagtgtcttagggtctcctcttgatactctttccacatttcagttaaggaattttcttacatctttttttcttctaataacctttgcctggagtgtaagtaaattcatgatagagactgtcatttttaaaaaaaaaaaacaaaccattttgcctttcacatgttattacctccatctttctgttatcttgtcagtgttgccacctaaatgattgaaaatgaccgagcatgcagtagaatgtagtgaagtttcctatttcatccattttttgcataagtgcattggtatctgtatatccatctgcccaagcaccagttgttgaaaagactattatttccccatgaatggtcctggtacccttgtcaaagaacagttgaccataaatataagactttctggattctcagtcttactccattgccctatatgtctgtcgttataccagcaccgcactgtcttgattgctgtagcttggtagtaagtttagatttgggatgtgcaagtcctccattttttttttttttctccccaaaatcattttgtctgttttgggtcccttgcattgcatatgaatttttatatgatcattgtgtcaattcctgcaaaacagctgggatcttgatagggatttagttgaattggtagataaatttgagaaataactgctattttaatggtgttaggttttctgttccatgactgtgggatgtctttgcatttgcttaggtctttatttcagtgatgttttagagatttcagtgtgcaagtcttgacgtctttaatttttttctaagtattttactgatgccactttaattatatgattattttctaatttttatttttgtattcatcactggtgttagaaataaaattaatttttgtatattgattttgtatattgtagcttttctaaaattctttttttgtcacttagtattttttgcatatgagatcatgcatctgtgaacagaaatacttttacttcttcctttccagtctagattcctattatttcattttcttgccttagtgtgctggctagcacctccagtacaatattggatagaagtgacaagagcagacatctttttcttgttcctgattttaaggggaaagcattcagtctttcaccattgagtatgatgttagctagctgtgggtttgcttcaagttgaggaaattcttttattaaacctagtttactgagtgttttttaatcaaaaaaaaaaaaggaggggctgtgggttttgttaaatgcttcttctgtatcaagattttcatgttgttttgtcctttattaatatgttgtattaatggacttttgtatattgaattaactttgcattcctgggataatctcagttgtccatgctacataaaccttgttctatgctgctggatttggtttgctagtattttgtttagaatgtttgcatctatattcataaggaatattggtctgtagttttcatattatatatctgtccantttggggatgagagtcatactcctgacagaatgaattgggagctttccctgttcttaaacctactgaggtattttttaagtgaactacttggagaccttcacctgtgatcttcagatgctgggggacacagggatggtacctgactctgaaaaggctctcagggtaagacgtgtctgaactggcctgtggcagttaactaaagagtactcctaccaataatggagtcaagatgtatgtttcccataggccacgctggtcactgaaagagatgggctatgagccatcttgaaaactaccctgcacaaatggactgccggcctggagccaggcaccctgcagctgagtgccatataatgttgaagctgttgagggaggagaggttggaagctgccagcttagagaatctcagctgtggtttcccagcagggtgtattccccaggaaagaaagtcattcccccacccctggctcaaagtaataattaacagtgactgggtaaggcaggatctttttttcctaattccctcccctccagaaagggcagcaacagctcttgaatgggaaagaaggtggagggaggaaaagaaaaaccaattgccccaacactgctgtctttaagcttcccacccaaagacctcagtaagaggcagaattatgttttcaattaagagagagtttggcctcttggtgtttcaaaagtgtaggctttttaatacctagagaaactgatgatttgttgattaccaaaaagggaccagaaaagctacatagcctgagatttcatccccagaaaaacgaatccagagagcagacttgcaa

SEQ ID NO: 281389 - DNA, 3476 bp, Homo sapiens
aaccctcctgggggggggggtgcccagagggcttccggaagtcccaggtttattctttcgggtcacagacagcagaaactaaaaagagggattaccctttctgtccagtcgcaagatggcgaccgagcctggtgggactccgaggggccgcaggccacctcctcttcccaatggcccgtgcgccggcggcgacggcaagcgggagggaggcggggccggcgaaggaaggaggggcggagcgcggcgccctcccgcgcgtcttggccccgccccacgtccccgcgtcccggcctggagccctcgcccggccgggcggcgcgcgctgcctgccgggatactcggcccgcccagccagtcctcccgtcttgcgccgcggccgcgagatccgtgtgtctcccaagatggtggcgctgggctcggggtgactacaggagacgacggggccttttcccttcgccaggacccgacacaccaggcttcgctcgctcgcgcacccctccgccgcgtagccatccgccagcgcgggcgcccgccatccgccgcctacttacgcttcacctctgccgacccggcgcgctcggctgcgggcggcggcgcctccttcggctcctcctcggaatagctcgcggcctgtagcccctggcaggagggcccctcagccccccggtgtggacaggcagcggcggctggcgacgaacgccgggatttcggcggccccggcgctccctttcccggcctcgttttccggataaggaagcgcgggtcccgcatgagccccggcggtggcggcagcgaaagagaacgaggcggtggcgggcggaggcggcgggcgagggcgactacgaccagtgaggcggccgccgcagcccaggcgcgggggcgacgacaggttaaaaatctgtaagagcctgattttagaattcaccagctcctcagaagtttggcgaaatatgagttattaagcctacgctcagatcaaggtagcagctagactggtgtgacaacctgtttttaatcagtgactcaaagctgtgatcaccctgatgtcaccgaatggccacagcttgtaaaagatcaggagaacctcagtctgacgacattgaagctagccgaatgaagcgagcagctgcaaagcatctaatagaacgctactaccaccagttaactgagggctgtggaaatgaagcctgcacgaatgagttttgtgcttcctgtccaacttttcttcgtatggataataatgcagcagctattaaagccctcgagctttataagattaatgcaaaactctgtgatcctcatccctccaagaaaggagcaagctcagcttaccttgagaactcgaaaggtgcccccaacaactcctgctctgagataaaaatgaacaagaaaggcgctagaattgattttaaagatgtgacttacttaacagaagagaaggtatatgaaattcttgaattatgtagagaaagagaggattattcccctttaatccgtgttattggaagagttttttctagtgctgaggcattggtacagagcttccggaaagttaaacaacacaccaaggaagaactgaaatctcttcaagcaaaagatgaagacaaagatgaagatgaaaaggaaaaagctgcatgttctgctgctgctatggaagaagactcagaagcatcttcctcaaggataggtgatagctcacagggagacaacaatttgcaaaaattaggccctgatgatgtgtctgtggatattgatgccattagaagggtctacaccagattgctctctaatgaaaaaattgaaactgcctttctcaatgcacttgtatatttgtcacctaacgtggaatgtgacttgacgtatcacaatgtatactctcgagatcctaattatctgaatttgttcattatcgtaatggagaatagaaatctccacagtcctgaatatctggaaatggctttgccattattttgcaaagcgatgagcaagctaccccttgcagcccaaggaaaactgatcagactgtggtctaaatacaatgcagaccagattcggagaatgatggagacatttcagcaacttattacttataaagtcataagcaatgaatttaacagtcgaaatctagtgaatgatgatgatgccattgttgctgcttcgaagtgcttgaaaatggtttactatgcaaatgtagtgggaggggaagtggacacaaatcacaatgaagaagatgatgaagagcccatccctgagtccagcgagctgacacttcaggaacttttgggagaagaaagaagaaacaagaaaggtcctcgagtggaccccctggaaactgaacttggtgttaaaaccctggattgtcgaaaaccacttatcccttttgaagagtttattaatgaaccactgaatgaggttctagaaatggataaagattatacttttttcaaagtagaaacagagaacaaattctcttttatgacatgtccctttatattgaatgctgtcacaaagaatttgggattatattatgacaatagaattcgcatgtacagtgaacgaagaatcactgttctctacagcttagttcaaggacagcagttgaatccatatttgagactcaaagttagacgtgaccatatcatagatgatgcacttgtccggctagagatgatcgctatggaaaatcctgcagacttgaagaagcagttgtatgtggaatttgaaggagaacaaggagttgatgagggaggtgtttccaaagaattttttcagctggttgtggaggaaatcttcaatccagatattggtatgttcacatacgatgaatctacaaaattgttttggtttaatccatcttcttttgaaactgagggtcagtttactctgattggcatagtactgggtctggctatttacaataactgtatactggatgtacattttcccatggttgtctacaggaagctaatggggaaaaaaggaacttttcgtgacttgggagactctcacccagttctatatcagagtttaaaagatttattggagtatgaagggaatgtggaagatgacatgatgatcactttccagatatcacagacagatctttttggtaacccaatgatgtatgatctaaaggaaaatggtgataaaattccaattacaaatgaaaacaggaaggaatttgtcaatctttattctgactacattctcaataaatcagtagaaaaacagttcaaggcttttcggagaggttttcatatggtgaccaatgaatctcccttaaagtacttattcagaccagaagaaattgaattgcttatatgtggaagccggaatctagatttccaagcactagaagaaactacagaatatgacggtggctataccagggactctgttctgattagggagctctgggaagtcgttcagtcaatagcagttgaccagtgtagactcacggccagggaatccgctag

SEQ ID NO: 281390 - DNA, 1793 bp, Homo sapiens
aaccctcctgggggggggggtgcccagagggcttccggaagtcccaggtttattctttcgggtcacagacagcagaaactaaaaagagggattaccctttctgtccagtcgcaagatggcgaccgagcctggtgggactccgaggggccgcaggccacctcctcttcccaatggcccgtgcgccggcggcgacggcaagcgggagggaggcggggccggcgaaggaaggaggggcggagcgcggcgccctcccgcgcgtcttggccccgccccacgtccccgcgtcccggcctggagccctcgcccggccgggcggcgcgcgctgcctgccgggatactcggcccgcccagccagtcctcccgtcttgcgccgcggccgcgagatccgtgtgtctcccaagatggtggcgctgggctcggggtgactacaggagacgacggggccttttcccttcgccaggacccgacacaccaggcttcgctcgctcgcgcacccctccgccgcgtagccatccgccagcgcgggcgcccgccatccgccgcctacttacgcttcacctctgccgacccggcgcgctcggctgcgggcggcggcgcctccttcggctcctcctcggaatagctcgcggcctgtagcccctggcaggagggcccctcagccccccggtgtggacaggcagcggcggctggcgacgaacgccgggatttcggcggccccggcgctccctttcccggcctcgttttccggataaggaagcgcgggtcccgcatgagccccggcggtggcggcagcgaaagagaacgaggcggtggcgggcggaggcggcgggcgagggcgactacgaccagtgaggcggccgccgcagcccaggcgcgggggcgacgacaggttaaaaatctgtaagagcctgattttagaattcaccagctcctcagaagtttggcgaaatatgagttattaagcctacgctcagatcaaggtagcagctagactggtgtgacaacctgtttttaatcagtgactcaaagctgtgatcaccctgatgtcaccgaatggccacagcttgtaaaagatcaggagaacctcagtctgacgacattgaagctagccgaatgaagcgagcagctgcaaagcatctaatagaacgctactaccaccagttaactgagggctgtggaaatgaagcctgcacgaatgagttttgtgcttcctgtccaacttttcttcgtatggataataatgcagcagctattaaagccctcgagctttataagattaatgcaaaactctgtgatcctcatccctccaagaaaggagcaagctcagcttaccttgagaactcgaaaggtgcccccaacaactcctgctctgagataaaaatgaacaagaaaggcgctagaattgattttaaaggtaagatgttttattttcaattgagaattgttgcctgaaaaccatgtgggagatttaaatgtattagtttttatttgttttttcttctgtgacataaagacattttgatatcgtagaaccaattttttattgtggtaacggacaggaataataactacattttacaggtctaatcattgctaattagaagcagatcatatgccaaaagttcatttgttaatagattgatttgaactttttaaaattcttaggaaaaatgtattaagtggtagtgaatctccaaaactaggccacaacatctatttaagttataggaataactgggactaagtatctgggcctgagttctggaacctcaggatgatgtgatgaaagaagc

SEQ ID NO: 281391 - DNA, 1255 bp, Homo sapiens
aaccctcctgggggggggggtgcccagagggcttccggaagtcccaggtttattctttcgggtcacagacagcagaaactaaaaagagggattaccctttctgtccagtcgcaagatggcgaccgagcctggtgggactccgaggggccgcaggccacctcctcttcccaatggcccgtgcgccggcggcgacggcaagcgggagggaggcggggccggcgaaggaaggaggggcggagcgcggcgccctcccgcgcgtcttggccccgccccacgtccccgcgtcccggcctggagccctcgcccggccgggcggcgcgcgctgcctgccgggatactcggcccgcccagccagtcctcccgtcttgcgccgcggccgcgagatccgtgtgtctcccaagatggtggcgctgggctcggggtgactacaggagacgacggggccttttcccttcgccaggacccgacacaccaggcttcgctcgctcgcgcacccctccgccgcgtagccatccgccagcgcgggcgcccgccatccgccgcctacttacgcttcacctctgccgacccggcgcgctcggctgcgggcggcggcgcctccttcggctcctcctcggaatagctcgcggcctgtagcccctggcaggagggcccctcagccccccggtgtggacaggcagcggcggctggcgacgaacgccgggatttcggcggccccggcgctccctttcccggcctcgttttccggataaggaagcgcgggtcccgcatgagccccggcggtggcggcagcgaaagagaacgaggcggtggcgggcggaggcggcgggcgagggcgactacgaccagtgaggcggccgccgcagcccaggcgcgggggcgacgacaggttaaaaatctgtaagagcctgattttagaattcaccagctcctcagaagtttggcgaaatatggtatgtttttgttttattttttggaattcgtattgcatgtgtatcttaatgtcataataatgacagatgtgttcagcaaatttgggcccctgccatttttaaagcattgtgtcaggtgctcactaactacacttccaagactgtatgagggacccaggtagggtgctgaaaaaatttacaagagattagtgtgctatgagaggtaaaataatatgcataaaaagattgagagggcaggtttggattttgggctatgagtattaataatagctttcatttgttgttgttgttgctgctgctgc

SEQ ID NO: 281392 - DNA, 8635 bp, Homo sapiens
  misc_feature (4636)..(4636): n is a, c, g, or t
  misc_feature (7816)..(7816): n is a, c, g, or t
gtacgggatatcgtcgaccggcgctcgatgaacaagaaaggcgctagaattgattttaaagatgtgacttacttaacagaagagaaggtatatgaaattcttgaattatgtagagaaagagaggattattcccctttaatccgtgttattggaagagttttttctagtgctgaggcattggtacagagcttccggaaagttaaacaacacaccaaggaagaactgaaatctcttcaagcaaaagatgaagacaaagatgaagatgaaaaggaaaaagctgcatgttctgctgctgctatggaagaagactcagaagcatcttcctcaaggataggtgatagctcacagggagacaacaatttgcaaaaattaggccctgatgatgtgtctgtggatattgatgccattagaagggtctacaccagattgctctctaatgaaaaaattgaaactgcctttctcaatgcacttgtatatttgtcacctaacgtggaatgtgacttgacgtatcacaatgtatactctcgagatcctaattatctgaatttgttcattatcgtaatggagaatagaaatctccacagtcctgaatatctggaaatggctttgccattattttgcaaagcgatgagcaagctaccccttgcagcccaaggaaaactgatcagactgtggtctaaatacaatgcagaccagattcggagaatgatggagacatttcagcaacttattacttataaagtcataagcaatgaatttaacagtcgaaatctagtgaatgatgatgatgccattgttgctgcttcgaagtgcttgaaaatggtttactatgcaaatgtagtgggaggggaagtggacacaaatcacaatgaagaagatgatgaagagcccatccctgagtccagcgagctgacacttcaggaacttttgggagaagaaagaagaaacaagaaaggtcctcgagtggaccccctggaaactgaacttggtgttaaaaccctggattgtcgaaaaccacttatcccttttgaagagtttattaatgaaccactgaatgaggttctagaaatggataaagattatacttttttcaaagtagaaacagagaacaaattctcttttatgacatgtccctttatattgaatgctgtcacaaagaatttgggattatattatgacaatagaattcgcatgtacagtgaacgaagaatcactgttctctacagcttagttcaaggacagcagttgaatccatatttgagactcaaagttagacgtgaccatatcatagatgatgcacttgtccggctagagatgatcgctatggaaaatcctgcagacttgaagaagcagttgtatgtggaatttgaaggagaacaaggagttgatgagggaggtgtttccaaagaattttttcagctggttgtggaggaaatcttcaatccagatattggtatgttcacatacgatgaatctacaaaattgttttggtttaatccatcttcttttgaaactgagggtcagtttactctgattggcatagtactgggtctggctatttacaataactgtatactggatgtacattttcccatggttgtctacaggaagctaatggggaaaaaaggaacttttcgtgacttgggagactctcacccagttctatatcagagtttaaaagatttattggagtatgaagggaatgtggaagatgacatgatgatcactttccagatatcacagacagatctttttggtaacccaatgatgtatgatctaaaggaaaatggtgataaaattccaattacaaatgaaaacaggaaggaatttgtcaatctttattctgactacattctcaataaatcagtagaaaaacagttcaaggcttttcggagaggttttcatatggtgaccaatgaatctcccttaaagtacttattcagaccagaagaaattgaattgcttatatgtggaagccggaatctagatttccaagcactagaagaaactacagaatatgacggtggctataccagggactctgttctgattagggagttctgggaaatcgttcattcatttacagatgaacagaaaagactcttcttgcagtttacaacgggcacagacagagcacctgtgggaggactaggaaaattaaagatgattatagccaaaaatggcccagacacagaaaggttacctacatctcatacttgctttaatgtgcttttacttccggaatactcaagcaaagaaaaacttaaagagagattgttgaaggccatcacgtatgccaaaggatttggcatgctgtaaaacaaaacaaaacaaaataaaacaaaaaaaaggaaggaaaaaaaaagaaaaaatttaaaaaattttaaaaatataacgagggataaatttttggtggtgatagtgtcccagtacaaaaaggctgtaagatagtcaaccacagtagtcacctatgtctgtgcctcccttctttattggggacatgtgggctggaacagcagatttcagctacatatatgaacaaatcctttattattattataattatttttttgcgtgaaagtgttacatattctttcacttgtatgtacagagaggtttttctgaatatttattttaagggttaaatcacttttgcttgtgtttattactgcttgaggttgagccttttgagtatttaaaaaatatataccaacagaactactctcccaaggaaaatattgccaccatttgtagaccacgtaaccttcaagtatgtgctacttttttgtccctgtatctaactcaaatcaggaactgtattttttttaatgatttgcttttgaaacttgaagtcttgaaaacagtgtgatgcaattactgctgttctagcccccaaagagttttctgtgcaaaatcttgagaatcaatcaataaagaaagatggaaggaagggagaaattggaatgttttaactgcagccctcagaactttagtaacagcacaacaaattaaaaacaaaaacaactcatgccacagtatgtcgtcttcatgtgtcttgcaatgaactgtttcagtagccaatcctctttcttagtatatgaaaggacagggattttgttcttgttgttctcgttgttgttttaagtttactggggaaagtgcatttggccaaatgaaatggtagtcaagcctattgcaacaaagttaggaagtttgttgtttgtttattataaacaaaaagcatgtgaaagtgcacttaagatagagtttttattaattacttacttattacctagattttaaatagacaatccaaagtctccccttcgtgttgccatcatcttgttgaatcagccattttatcgaggcacgtgatcagtgttgcaacataatgaaaaagatggctactgtgccttgtgttacttaatcatacagtaagctgacctggaaatgaatgaaactattactcctaagaattacattgtatagccccacagattaaatttaattaattaattcaaaacatgttaaacgttactttcatgtactatggaaaagtacaagtaggtttacattactgatttccagaagtaagtagtttcccctttcctagtcttctgtgtatgtgatgttgttaatttcttttattgcattataaaataaaaggattatgtatttttaactaaggtgagacattgatatatccttttgctacaagctatagctaatgtgctgagcttgtgccttggtgattgattgattgattgactgattgttttaactgattactgtagatcaacctgatgatttgtttgtttgaaattggcaggaaaaatgcagctttcaaatcattggggggagaaaaaggatgtctttcaggattattttaattaatttttttcataattgagacagaactgtttgttatgtaccataatgctaaataaaactgtggcacttttcaccataatttaatttagtggaaaaagaagacaatgctttccatattgtgataaggtaacatggggtttttctgggccagcctttagaacactgttagggtacatacgctaccttgatgaaagggaccttcgtgcaactgtagtcatcttaaaggcttctcatccactgtgcttcttaatgtgtaattaaagtgaggagaaattaaatactctgagggcgttttatataataaattcgtgaagaaatgtgtgctcttcagttctcaagttttattattatggtatttattaaagttctacaattgtaataacgtatccatatgacaagttttaaagtggtaattgaaataggttatcagatatagagttgttcacatcaagtagacttttaacagagtcagaatgaacctacccttaaaattttagagaaaaaaaatcgtcggttgcacagaatagctgctctagcttgcttaattatgccgggcatgttgtcactcctcttacttttgctgccttttcattactatttaatggaatgtccctgaacaataaggaagagcaaaacatagacattttgactacagtggatacttcctctaccccaaatgttatgttataaaagtactttttttgcccaggtactctattatatattttggttttctttgaattanacctcaatctccaggaagctctggagggaaaaaaaggaaccataaactaaagtaactggttttccaaataaatgtaaacttttttaaccttttattattatagaacatttcaaacatacataaaacatgaaaacagcctgcagccaaacttttctggaccttggcagctccagcaaatgagctggtcatcctaaccctggtttcctgagacaactacttttggggatgcttgcttgtatagggagatgatagatagatagatacatatcaaaaagaaacttgaaaaaggcttcgaacagaacttgccgatgttactcatccctcctcggtacagacattctgttagaacagatggttgtaatggggcagcatcactccctattcccattaaaaacatgaccattctgagatttcaggccccttcgaggaatttttctcaagaattccatacaaactgtcagaggaagaaatgtcgtcccaagactagtccctgtgtagtcttgatccctttacctgcttactgtaattttttttctctgactttccgccagtgtctaagggccatctgtacccctcccacccttccatgagccactgtataatccaaaaacacaccttccatttgctccctcacttgtctccttttacctcaacagtgttagtgtgtaaagaattgcctggggagggtagagggttttacaagtacagagtcccaagtcttttctcccctccccgttagtgggttggcatttattaataggcactgcaagattttgatgcaggtgtggggtagatatcactgtgaaaggctactaatgcatggtagtttcaccgaaagtacagtcttcaaggatccttataatctcctcattgccaaaatcagtaacatctataaccttgacaacaccctagcttgggctgttgcttctctggctacttgtttttccatcccagtttacccagattttagatggatactcctccaattctgcttaaagtccttacctgttcttgcccagttccctctagtcaacctcagtcactcccaaagattcttccccaatcccatatcttttgctcagacctctgtctctgggatttctttgttacctcatagtcagtagtcctaaaaacaaaattcttcatcttgcatctctatcgaccgaccattctttgtttctttttaagaaatgtaaccttcaccccaatcatcaaaatctctcattcctcaattgtcacaggttgtcacttctttccccctaaacctctcccatcattccttccttctttatactgcccttacaggtcctgatcctctgactcacccggacattcttagcagctgcctaatttcactccctgactctcatctccctcttccaatccttttcattgtgctagaacactatcttgctaattttaatatcctctgcattcagtgcctccacagattgccccctcactgacctttccaatttggccttgtgttacacactttcctcgctgcattcctacccagcatcttcacttgtcatatttctcaaatactcttcatgaccagatatttaaagtacctcatccatgaagacttcatcaacccccaaagtgcctccaatgcttccgtggtagcacagcataatggggtacatttcttagttgaacagtgaggagtcactgggattcttacagagtgtcttagggtctcctcttgatactctttccacatttcagttaaggaattttcttacatctttttttcttctaataacctttgcctggagtgtaagtaaattcatgatagagactgtcatttttaaaaaaaaaaaacaaaccattttgcctttcacatgttattacctccatctttctgttatcttgtcagtgttgccacctaaatgattgaaaatgaccgagcatgcagtagaatgtagtgaagtttcctatttcatccattttttgcataagtgcattggtatctgtatatccatctgcccaagcaccagttgttgaaaagactattatttccccatgaatggtcctggtacccttgtcaaagaacagttgaccataaatataagactttctggattctcagtcttactccattgccctatatgtctgtcgttataccagcaccgcactgtcttgattgctgtagcttggtagtaagtttagatttgggatgtgcaagtcctccattttttttttttttctccccaaaatcattttgtctgttttgggtcccttgcattgcatatgaatttttatatgatcattgtgtcaattcctgcaaaacagctgggatcttgatagggatttagttgaattggtagataaatttgagaaataactgctattttaatggtgttaggttttctgttccatgactgtgggatgtctttgcatttgcttaggtctttatttcagtgatgttttagagatttcagtgtgcaagtcttgacgtctttaatttttttctaagtattttactgatgccactttaattatatgattattttctaatttttatttttgtattcatcactggtgttagaaataaaattaatttttgtatattgattttgtatattgtagcttttctaaaattctttttttgtcacttagtattttttgcatatgagatcatgcatctgtgaacagaaatacttttacttcttcctttccagtctagattcctattatttcattttcttgccttagtgtgctggctagcacctccagtacaatattggatagaagtgacaagagcagacatctttttcttgttcctgattttaaggggaaagcattcagtctttcaccattgagtatgatgttagctagctgtgggtttgcttcaagttgaggaaattcttttattaaacctagtttactgagtgttttttaatcaaaaaaaaaaaaggaggggctgtgggttttgttaaatgcttcttctgtatcaagattttcatgttgttttgtcctttattaatatgttgtattaatggacttttgtatattgaattaactttgcattcctgggataatctcagttgtccatgctacataaaccttgttctatgctgctggatttggtttgctagtattttgtttagaatgtttgcatctatattcataaggaatattggtctgtagttttcatattatatatctgtccantttggggatgagagtcatactcctgacagaatgaattgggagctttccctgttcttaaacctactgaggtattttttaagtgaactacttggagaccttcacctgtgatcttcagatgctgggggacacagggatggtacctgactctgaaaaggctctcagggtaagacgtgtctgaactggcctgtggcagttaactaaagagtactcctaccaataatggagtcaagatgtatgtttcccataggccacgctggtcactgaaagagatgggctatgagccatcttgaaaactaccctgcacaaatggactgccggcctggagccaggcaccctgcagctgagtgccatataatgttgaagctgttgagggaggagaggttggaagctgccagcttagagaatctcagctgtggtttcccagcagggtgtattccccaggaaagaaagtcattcccccacccctggctcaaagtaataattaacagtgactgggtaaggcaggatctttttttcctaattccctcccctccagaaagggcagcaacagctcttgaatgggaaagaaggtggagggaggaaaagaaaaaccaattgccccaacactgctgtctttaagcttcccacccaaagacctcagtaagaggcagaattatgttttcaattaagagagagtttggcctcttggtgtttcaaaagtgtaggctttttaatacctagagaaactgatgatttgttgattaccaaaaagggaccagaaaagctacatagcctgagatttcatccccagaaaaacgaatccagagagcagacttgcaa

SEQ ID NO: 281393 - DNA, 9613 bp, Homo sapiens
  misc_feature (5614)..(5614): n is a, c, g, or t
  misc_feature (8794)..(8794): n is a, c, g, or t
aaccctcctgggggggggggtgcccagagggcttccggaagtcccaggtttattctttcgggtcacagacagcagaaactaaaaagagggattaccctttctgtccagtcgcaagatggcgaccgagcctggtgggactccgaggggccgcaggccacctcctcttcccaatggcccgtgcgccggcggcgacggcaagcgggagggaggcggggccggcgaaggaaggaggggcggagcgcggcgccctcccgcgcgtcttggccccgccccacgtccccgcgtcccggcctggagccctcgcccggccgggcggcgcgcgctgcctgccgggatactcggcccgcccagccagtcctcccgtcttgcgccgcggccgcgagatccgtgtgtctcccaagatggtggcgctgggctcggggtgactacaggagacgacggggccttttcccttcgccaggacccgacacaccaggcttcgctcgctcgcgcacccctccgccgcgtagccatccgccagcgcgggcgcccgccatccgccgcctacttacgcttcacctctgccgacccggcgcgctcggctgcgggcggcggcgcctccttcggctcctcctcggaatagctcgcggcctgtagcccctggcaggagggcccctcagccccccggtgtggacaggcagcggcggctggcgacgaacgccgggatttcggcggccccggcgctccctttcccggcctcgttttccggataaggaagcgcgggtcccgcatgagccccggcggtggcggcagcgaaagagaacgaggcggtggcgggcggaggcggcgggcgagggcgactacgaccagtgaggcggccgccgcagcccaggcgcgggggcgacgacaggttaaaaatctgtaagagcctgattttagaattcaccagctcctcagaagtttggcgaaatatgagttattaagcctacgctcagatcaaggtagcagctagactggtgtgacaacctgtttttaatcagtgactcaaagctgtgatcaccctgatgtcaccgaatggccacagcttgtaaaagagagttacagtggaggtaaaaggagtggcttgcaggatggagaagctgcaccagtgttattggaagtgagccaccatttgaatttgctagctcatgctgcagtattcagattatgccagcaggtttattttttgttttgcaagccagctctgcctccttacagtatgacatctgatgctggagggtcgcactttcaaaaatgagtcagctggtacatggggttatcatcaatttttagctcttctgtctgggagatacaagtttggaagcaatcttggggtacttacccacaaggctggtggagaccagatcaggagaacctcagtctgacgacattgaagctagccgaatgaagcgagcagctgcaaagcatctaatagaacgctactaccaccagttaactgagggctgtggaaatgaagcctgcacgaatgagttttgtgcttcctgtccaacttttcttcgtatggataataatgcagcagctattaaagccctcgagctttataagattaatgcaaaactctgtgatcctcatccctccaagaaaggagcaagctcagcttaccttgagaactcgaaaggtgcccccaacaactcctgctctgagataaaaatgaacaagaaaggcgctagaattgattttaaagatgtgacttacttaacagaagagaaggtatatgaaattcttgaattatgtagagaaagagaggattattcccctttaatccgtgttattggaagagttttttctagtgctgaggcattggtacagagcttccggaaagttaaacaacacaccaaggaagaactgaaatctcttcaagcaaaagatgaagacaaagatgaagatgaaaaggaaaaagctgcatgttctgctgctgctatggaagaagactcagaagcatcttcctcaaggataggtgatagctcacagggagacaacaatttgcaaaaattaggccctgatgatgtgtctgtggatattgatgccattagaagggtctacaccagattgctctctaatgaaaaaattgaaactgcctttctcaatgcacttgtatatttgtcacctaacgtggaatgtgacttgacgtatcacaatgtatactctcgagatcctaattatctgaatttgttcattatcgtaatggagaatagaaatctccacagtcctgaatatctggaaatggctttgccattattttgcaaagcgatgagcaagctaccccttgcagcccaaggaaaactgatcagactgtggtctaaatacaatgcagaccagattcggagaatgatggagacatttcagcaacttattacttataaagtcataagcaatgaatttaacagtcgaaatctagtgaatgatgatgatgccattgttgctgcttcgaagtgcttgaaaatggtttactatgcaaatgtagtgggaggggaagtggacacaaatcacaatgaagaagatgatgaagagcccatccctgagtccagcgagctgacacttcaggaacttttgggagaagaaagaagaaacaagaaaggtcctcgagtggaccccctggaaactgaacttggtgttaaaaccctggattgtcgaaaaccacttatcccttttgaagagtttattaatgaaccactgaatgaggttctagaaatggataaagattatacttttttcaaagtagaaacagagaacaaattctcttttatgacatgtccctttatattgaatgctgtcacaaagaatttgggattatattatgacaatagaattcgcatgtacagtgaacgaagaatcactgttctctacagcttagttcaaggacagcagttgaatccatatttgagactcaaagttagacgtgaccatatcatagatgatgcacttgtccggctagagatgatcgctatggaaaatcctgcagacttgaagaagcagttgtatgtggaatttgaaggagaacaaggagttgatgagggaggtgtttccaaagaattttttcagctggttgtggaggaaatcttcaatccagatattggtatgttcacatacgatgaatctacaaaattgttttggtttaatccatcttcttttgaaactgagggtcagtttactctgattggcatagtactgggtctggctatttacaataactgtatactggatgtacattttcccatggttgtctacaggaagctaatggggaaaaaaggaacttttcgtgacttgggagactctcacccagttctatatcagagtttaaaagatttattggagtatgaagggaatgtggaagatgacatgatgatcactttccagatatcacagacagatctttttggtaacccaatgatgtatgatctaaaggaaaatggtgataaaattccaattacaaatgaaaacaggaaggaatttgtcaatctttattctgactacattctcaataaatcagtagaaaaacagttcaaggcttttcggagaggttttcatatggtgaccaatgaatctcccttaaagtacttattcagaccagaagaaattgaattgcttatatgtggaagccggaatctagatttccaagcactagaagaaactacagaatatgacggtggctataccagggactctgttctgattagggagttctgggaaatcgttcattcatttacagatgaacagaaaagactcttcttgcagtttacaacgggcacagacagagcacctgtgggaggactaggaaaattaaagatgattatagccaaaaatggcccagacacagaaaggttacctacatctcatacttgctttaatgtgcttttacttccggaatactcaagcaaagaaaaacttaaagagagattgttgaaggccatcacgtatgccaaaggatttggcatgctgtaaaacaaaacaaaacaaaaacaactcatgccacagtatgtcgtcttcatgtgtcttgcaatgaactgtttcagtagccaatcctctttcttagtatatgaaaggacagggattttgttcttgttgttctcgttgttgttttaagtttactggggaaagtgcatttggccaaatgaaatggtagtcaagcctattgcaacaaagttaggaagtttgttgtttgtttattataaacaaaaagcatgtgaaagtgcacttaagatagagtttttattaattacttacttattacctagattttaaatagacaatccaaagtctccccttcgtgttgccatcatcttgttgaatcagccattttatcgaggcacgtgatcagtgttgcaacataatgaaaaagatggctactgtgccttgtgttacttaatcatacagtaagctgacctggaaatgaatgaaactattactcctaagaattacattgtatagccccacagattaaatttaattaattaattcaaaacatgttaaacgttactttcatgtactatggaaaagtacaagtaggtttacattactgatttccagaagtaagtagtttcccctttcctagtcttctgtgtatgtgatgttgttaatttcttttattgcattataaaataaaaggattatgtatttttaactaaggtgagacattgatatatccttttgctacaagctatagctaatgtgctgagcttgtgccttggtgattgattgattgattgactgattgttttaactgattactgtagatcaacctgatgatttgtttgtttgaaattggcaggaaaaatgcagctttcaaatcattggggggagaaaaaggatgtctttcaggattattttaattaatttttttcataattgagacagaactgtttgttatgtaccataatgctaaataaaactgtggcacttttcaccataatttaatttagtggaaaaagaagacaatgctttccatattgtgataaggtaacatggggtttttctgggccagcctttagaacactgttagggtacatacgctaccttgatgaaagggaccttcgtgcaactgtagtcatcttaaaggcttctcatccactgtgcttcttaatgtgtaattaaagtgaggagaaattaaatactctgagggcgttttatataataaattcgtgaagaaatgtgtgctcttcagttctcaagttttattattatggtatttattaaagttctacaattgtaataacgtatccatatgacaagttttaaagtggtaattgaaataggttatcagatatagagttgttcacatcaagtagacttttaacagagtcagaatgaacctacccttaaaattttagagaaaaaaaatcgtcggttgcacagaatagctgctctagcttgcttaattatgccgggcatgttgtcactcctcttacttttgctgccttttcattactatttaatggaatgtccctgaacaataaggaagagcaaaacatagacattttgactacagtggatacttcctctaccccaaatgttatgttataaaagtactttttttgcccaggtactctattatatattttggttttctttgaattanacctcaatctccaggaagctctggagggaaaaaaaggaaccataaactaaagtaactggttttccaaataaatgtaaacttttttaaccttttattattatagaacatttcaaacatacataaaacatgaaaacagcctgcagccaaacttttctggaccttggcagctccagcaaatgagctggtcatcctaaccctggtttcctgagacaactacttttggggatgcttgcttgtatagggagatgatagatagatagatacatatcaaaaagaaacttgaaaaaggcttcgaacagaacttgccgatgttactcatccctcctcggtacagacattctgttagaacagatggttgtaatggggcagcatcactccctattcccattaaaaacatgaccattctgagatttcaggccccttcgaggaatttttctcaagaattccatacaaactgtcagaggaagaaatgtcgtcccaagactagtccctgtgtagtcttgatccctttacctgcttactgtaattttttttctctgactttccgccagtgtctaagggccatctgtacccctcccacccttccatgagccactgtataatccaaaaacacaccttccatttgctccctcacttgtctccttttacctcaacagtgttagtgtgtaaagaattgcctggggagggtagagggttttacaagtacagagtcccaagtcttttctcccctccccgttagtgggttggcatttattaataggcactgcaagattttgatgcaggtgtggggtagatatcactgtgaaaggctactaatgcatggtagtttcaccgaaagtacagtcttcaaggatccttataatctcctcattgccaaaatcagtaacatctataaccttgacaacaccctagcttgggctgttgcttctctggctacttgtttttccatcccagtttacccagattttagatggatactcctccaattctgcttaaagtccttacctgttcttgcccagttccctctagtcaacctcagtcactcccaaagattcttccccaatcccatatcttttgctcagacctctgtctctgggatttctttgttacctcatagtcagtagtcctaaaaacaaaattcttcatcttgcatctctatcgaccgaccattctttgtttctttttaagaaatgtaaccttcaccccaatcatcaaaatctctcattcctcaattgtcacaggttgtcacttctttccccctaaacctctcccatcattccttccttctttatactgcccttacaggtcctgatcctctgactcacccggacattcttagcagctgcctaatttcactccctgactctcatctccctcttccaatccttttcattgtgctagaacactatcttgctaattttaatatcctctgcattcagtgcctccacagattgccccctcactgacctttccaatttggccttgtgttacacactttcctcgctgcattcctacccagcatcttcacttgtcatatttctcaaatactcttcatgaccagatatttaaagtacctcatccatgaagacttcatcaacccccaaagtgcctccaatgcttccgtggtagcacagcataatggggtacatttcttagttgaacagtgaggagtcactgggattcttacagagtgtcttagggtctcctcttgatactctttccacatttcagttaaggaattttcttacatctttttttcttctaataacctttgcctggagtgtaagtaaattcatgatagagactgtcatttttaaaaaaaaaaaacaaaccattttgcctttcacatgttattacctccatctttctgttatcttgtcagtgttgccacctaaatgattgaaaatgaccgagcatgcagtagaatgtagtgaagtttcctatttcatccattttttgcataagtgcattggtatctgtatatccatctgcccaagcaccagttgttgaaaagactattatttccccatgaatggtcctggtacccttgtcaaagaacagttgaccataaatataagactttctggattctcagtcttactccattgccctatatgtctgtcgttataccagcaccgcactgtcttgattgctgtagcttggtagtaagtttagatttgggatgtgcaagtcctccattttttttttttttctccccaaaatcattttgtctgttttgggtcccttgcattgcatatgaatttttatatgatcattgtgtcaattcctgcaaaacagctgggatcttgatagggatttagttgaattggtagataaatttgagaaataactgctattttaatggtgttaggttttctgttccatgactgtgggatgtctttgcatttgcttaggtctttatttcagtgatgttttagagatttcagtgtgcaagtcttgacgtctttaatttttttctaagtattttactgatgccactttaattatatgattattttctaatttttatttttgtattcatcactggtgttagaaataaaattaatttttgtatattgattttgtatattgtagcttttctaaaattctttttttgtcacttagtattttttgcatatgagatcatgcatctgtgaacagaaatacttttacttcttcctttccagtctagattcctattatttcattttcttgccttagtgtgctggctagcacctccagtacaatattggatagaagtgacaagagcagacatctttttcttgttcctgattttaaggggaaagcattcagtctttcaccattgagtatgatgttagctagctgtgggtttgcttcaagttgaggaaattcttttattaaacctagtttactgagtgttttttaatcaaaaaaaaaaaaggaggggctgtgggttttgttaaatgcttcttctgtatcaagattttcatgttgttttgtcctttattaatatgttgtattaatggacttttgtatattgaattaactttgcattcctgggataatctcagttgtccatgctacataaaccttgttctatgctgctggatttggtttgctagtattttgtttagaatgtttgcatctatattcataaggaatattggtctgtagttttcatattatatatctgtccantttggggatgagagtcatactcctgacagaatgaattgggagctttccctgttcttaaacctactgaggtattttttaagtgaactacttggagaccttcacctgtgatcttcagatgctgggggacacagggatggtacctgactctgaaaaggctctcagggtaagacgtgtctgaactggcctgtggcagttaactaaagagtactcctaccaataatggagtcaagatgtatgtttcccataggccacgctggtcactgaaagagatgggctatgagccatcttgaaaactaccctgcacaaatggactgccggcctggagccaggcaccctgcagctgagtgccatataatgttgaagctgttgagggaggagaggttggaagctgccagcttagagaatctcagctgtggtttcccagcagggtgtattccccaggaaagaaagtcattcccccacccctggctcaaagtaataattaacagtgactgggtaaggcaggatctttttttcctaattccctcccctccagaaagggcagcaacagctcttgaatgggaaagaaggtggagggaggaaaagaaaaaccaattgccccaacactgctgtctttaagcttcccacccaaagacctcagtaagaggcagaattatgttttcaattaagagagagtttggcctcttggtgtttcaaaagtgtaggctttttaatacctagagaaactgatgatttgttgattaccaaaaagggaccagaaaagctacatagcctgagatttcatccccagaaaaacgaatccagagagcagacttgcaa

SEQ ID NO: 281394 - DNA, 9833 bp, Homo sapiens
  misc_feature (5834)..(5834): n is a, c, g, or t
  misc_feature (9014)..(9014): n is a, c, g, or t
aaccctcctgggggggggggtgcccagagggcttccggaagtcccaggtttattctttcgggtcacagacagcagaaactaaaaagagggattaccctttctgtccagtcgcaagatggcgaccgagcctggtgggactccgaggggccgcaggccacctcctcttcccaatggcccgtgcgccggcggcgacggcaagcgggagggaggcggggccggcgaaggaaggaggggcggagcgcggcgccctcccgcgcgtcttggccccgccccacgtccccgcgtcccggcctggagccctcgcccggccgggcggcgcgcgctgcctgccgggatactcggcccgcccagccagtcctcccgtcttgcgccgcggccgcgagatccgtgtgtctcccaagatggtggcgctgggctcggggtgactacaggagacgacggggccttttcccttcgccaggacccgacacaccaggcttcgctcgctcgcgcacccctccgccgcgtagccatccgccagcgcgggcgcccgccatccgttaaaaatctgtaagagcctgattttagaattcaccagctcctcagaagtttggcgaaatatgagttattaagcctacgctcagatcaaggtagcagctagactggtgtgacaacctgtttttaatcagtgactcaaagctgtgatcaccctgatgtcaccgaatggccacagcttgtaaaagtgccagcaggtttattttttgttttgcaagccagctctgcctccttacagtatgacatctgatgctggagggtcgcactttcaaaaatgagtcagctggtacatggggttatcatcaatttttagctcttctgtctgggagatacaagtttggaagcaatcttggggtacttacccacaaggctggtggagaccagatcaggagaacctcagtctgacgacattgaagctagccgaatgaagcgagcagctgcaaagcatctaatagaacgctactaccaccagttaactgagggctgtggaaatgaagcctgcacgaatgagttttgtgcttcctgtccaacttttcttcgtatggataataatgcagcagctattaaagccctcgagctttataagattaatgcaaaactctgtgatcctcatccctccaagaaaggagcaagctcagcttaccttgagaactcgaaaggtgcccccaacaactcctgctctgagataaaaatgaacaagaaaggcgctagaattgattttaaagatgtgacttacttaacagaagagaaggtatatgaaattcttgaattatgtagagaaagagaggattattcccctttaatccgtgttattggaagagttttttctagtgctgaggcattggtacagagcttccggaaagttaaacaacacaccaaggaagaactgaaatctcttcaagcaaaagatgaagacaaagatgaagatgaaaaggaaaaagctgcatgttctgctgctgctatggaagaagactcagaagcatcttcctcaaggataggtgatagctcacagggagacaacaatttgcaaaaattaggccctgatgatgtgtctgtggatattgatgccattagaagggtctacaccagattgctctctaatgaaaaaattgaaactgcctttctcaatgcacttgtatatttgtcacctaacgtggaatgtgacttgacgtatcacaatgtatactctcgagatcctaattatctgaatttgttcattatcgtaatggagaatagaaatctccacagtcctgaatatctggaaatggctttgccattattttgcaaagcgatgagcaagctaccccttgcagcccaaggaaaactgatcagactgtggtctaaatacaatgcagaccagattcggagaatgatggagacatttcagcaacttattacttataaagtcataagcaatgaatttaacagtcgaaatctagtgaatgatgatgatgccattgttgctgcttcgaagtgcttgaaaatggtttactatgcaaatgtagtgggaggggaagtggacacaaatcacaatgaagaagatgatgaagagcccatccctgagtccagcgagctgacacttcaggaacttttgggagaagaaagaagaaacaagaaaggtcctcgagtggaccccctggaaactgaacttggtgttaaaaccctggattgtcgaaaaccacttatcccttttgaagagtttattaatgaaccactgaatgaggttctagaaatggataaagattatacttttttcaaagtagaaacagagaacaaattctcttttatgacatgtccctttatattgaatgctgtcacaaagaatttgggattatattatgacaatagaattcgcatgtacagtgaacgaagaatcactgttctctacagcttagttcaaggacagcagttgaatccatatttgagactcaaagttagacgtgaccatatcatagatgatgcacttgtccggctagagatgatcgctatggaaaatcctgcagacttgaagaagcagttgtatgtggaatttgaaggagaacaaggagttgatgagggaggtgtttccaaagaattttttcagctggttgtggaggaaatcttcaatccagatattggtatgttcacatacgatgaatctacaaaattgttttggtttaatccatcttcttttgaaactgagggtcagtttactctgattggcatagtactgggtctggctatttacaataactgtatactggatgtacattttcccatggttgtctacaggaagctaatggggaaaaaaggaacttttcgtgacttgggagactctcacccagttctatatcagagtttaaaagatttattggagtatgaagggaatgtggaagatgacatgatgatcactttccagatatcacagacagatctttttggtaacccaatgatgtatgatctaaaggaaaatggtgataaaattccaattacaaatgaaaacaggaaggaatttgtcaatctttattctgactacattctcaataaatcagtagaaaaacagttcaaggcttttcggagaggttttcatatggtgaccaatgaatctcccttaaagtacttattcagaccagaagaaattgaattgcttatatgtggaagccggaatctagatttccaagcactagaagaaactacagaatatgacggtggctataccagggactctgttctgattagggagttctgggaaatcgttcattcatttacagatgaacagaaaagactcttcttgcagtttacaacgggcacagacagagcacctgtgggaggactaggaaaattaaagatgattatagccaaaaatggcccagacacagaaaggttacctacatctcatacttgctttaatgtgcttttacttccggaatactcaagcaaagaaaaacttaaagagagattgttgaaggccatcacgtatgccaaaggatttggcatgctgtaaaacaaaacaaaacaaaataaaacaaaaaaaaggaaggaaaaaaaaagaaaaaatttaaaaaattttaaaaatataacgagggataaatttttggtggtgatagtgtcccagtacaaaaaggctgtaagatagtcaaccacagtagtcacctatgtctgtgcctcccttctttattggggacatgtgggctggaacagcagatttcagctacatatatgaacaaatcctttattattattataattatttttttgcgtgaaagtgttacatattctttcacttgtatgtacagagaggtttttctgaatatttattttaagggttaaatcacttttgcttgtgtttattactgcttgaggttgagccttttgagtatttaaaaaatatataccaacagaactactctcccaaggaaaatattgccaccatttgtagaccacgtaaccttcaagtatgtgctacttttttgtccctgtatctaactcaaatcaggaactgtattttttttaatgatttgcttttgaaacttgaagtcttgaaaacagtgtgatgcaattactgctgttctagcccccaaagagttttctgtgcaaaatcttgagaatcaatcaataaagaaagatggaaggaagggagaaattggaatgttttaactgcagccctcagaactttagtaacagcacaacaaattaaaaacaaaaacaactcatgccacagtatgtcgtcttcatgtgtcttgcaatgaactgtttcagtagccaatcctctttcttagtatatgaaaggacagggattttgttcttgttgttctcgttgttgttttaagtttactggggaaagtgcatttggccaaatgaaatggtagtcaagcctattgcaacaaagttaggaagtttgttgtttgtttattataaacaaaaagcatgtgaaagtgcacttaagatagagtttttattaattacttacttattacctagattttaaatagacaatccaaagtctccccttcgtgttgccatcatcttgttgaatcagccattttatcgaggcacgtgatcagtgttgcaacataatgaaaaagatggctactgtgccttgtgttacttaatcatacagtaagctgacctggaaatgaatgaaactattactcctaagaattacattgtatagccccacagattaaatttaattaattaattcaaaacatgttaaacgttactttcatgtactatggaaaagtacaagtaggtttacattactgatttccagaagtaagtagtttcccctttcctagtcttctgtgtatgtgatgttgttaatttcttttattgcattataaaataaaaggattatgtatttttaactaaggtgagacattgatatatccttttgctacaagctatagctaatgtgctgagcttgtgccttggtgattgattgattgattgactgattgttttaactgattactgtagatcaacctgatgatttgtttgtttgaaattggcaggaaaaatgcagctttcaaatcattggggggagaaaaaggatgtctttcaggattattttaattaatttttttcataattgagacagaactgtttgttatgtaccataatgctaaataaaactgtggcacttttcaccataatttaatttagtggaaaaagaagacaatgctttccatattgtgataaggtaacatggggtttttctgggccagcctttagaacactgttagggtacatacgctaccttgatgaaagggaccttcgtgcaactgtagtcatcttaaaggcttctcatccactgtgcttcttaatgtgtaattaaagtgaggagaaattaaatactctgagggcgttttatataataaattcgtgaagaaatgtgtgctcttcagttctcaagttttattattatggtatttattaaagttctacaattgtaataacgtatccatatgacaagttttaaagtggtaattgaaataggttatcagatatagagttgttcacatcaagtagacttttaacagagtcagaatgaacctacccttaaaattttagagaaaaaaaatcgtcggttgcacagaatagctgctctagcttgcttaattatgccgggcatgttgtcactcctcttacttttgctgccttttcattactatttaatggaatgtccctgaacaataaggaagagcaaaacatagacattttgactacagtggatacttcctctaccccaaatgttatgttataaaagtactttttttgcccaggtactctattatatattttggttttctttgaattanacctcaatctccaggaagctctggagggaaaaaaaggaaccataaactaaagtaactggttttccaaataaatgtaaacttttttaaccttttattattatagaacatttcaaacatacataaaacatgaaaacagcctgcagccaaacttttctggaccttggcagctccagcaaatgagctggtcatcctaaccctggtttcctgagacaactacttttggggatgcttgcttgtatagggagatgatagatagatagatacatatcaaaaagaaacttgaaaaaggcttcgaacagaacttgccgatgttactcatccctcctcggtacagacattctgttagaacagatggttgtaatggggcagcatcactccctattcccattaaaaacatgaccattctgagatttcaggccccttcgaggaatttttctcaagaattccatacaaactgtcagaggaagaaatgtcgtcccaagactagtccctgtgtagtcttgatccctttacctgcttactgtaattttttttctctgactttccgccagtgtctaagggccatctgtacccctcccacccttccatgagccactgtataatccaaaaacacaccttccatttgctccctcacttgtctccttttacctcaacagtgttagtgtgtaaagaattgcctggggagggtagagggttttacaagtacagagtcccaagtcttttctcccctccccgttagtgggttggcatttattaataggcactgcaagattttgatgcaggtgtggggtagatatcactgtgaaaggctactaatgcatggtagtttcaccgaaagtacagtcttcaaggatccttataatctcctcattgccaaaatcagtaacatctataaccttgacaacaccctagcttgggctgttgcttctctggctacttgtttttccatcccagtttacccagattttagatggatactcctccaattctgcttaaagtccttacctgttcttgcccagttccctctagtcaacctcagtcactcccaaagattcttccccaatcccatatcttttgctcagacctctgtctctgggatttctttgttacctcatagtcagtagtcctaaaaacaaaattcttcatcttgcatctctatcgaccgaccattctttgtttctttttaagaaatgtaaccttcaccccaatcatcaaaatctctcattcctcaattgtcacaggttgtcacttctttccccctaaacctctcccatcattccttccttctttatactgcccttacaggtcctgatcctctgactcacccggacattcttagcagctgcctaatttcactccctgactctcatctccctcttccaatccttttcattgtgctagaacactatcttgctaattttaatatcctctgcattcagtgcctccacagattgccccctcactgacctttccaatttggccttgtgttacacactttcctcgctgcattcctacccagcatcttcacttgtcatatttctcaaatactcttcatgaccagatatttaaagtacctcatccatgaagacttcatcaacccccaaagtgcctccaatgcttccgtggtagcacagcataatggggtacatttcttagttgaacagtgaggagtcactgggattcttacagagtgtcttagggtctcctcttgatactctttccacatttcagttaaggaattttcttacatctttttttcttctaataacctttgcctggagtgtaagtaaattcatgatagagactgtcatttttaaaaaaaaaaaacaaaccattttgcctttcacatgttattacctccatctttctgttatcttgtcagtgttgccacctaaatgattgaaaatgaccgagcatgcagtagaatgtagtgaagtttcctatttcatccattttttgcataagtgcattggtatctgtatatccatctgcccaagcaccagttgttgaaaagactattatttccccatgaatggtcctggtacccttgtcaaagaacagttgaccataaatataagactttctggattctcagtcttactccattgccctatatgtctgtcgttataccagcaccgcactgtcttgattgctgtagcttggtagtaagtttagatttgggatgtgcaagtcctccattttttttttttttctccccaaaatcattttgtctgttttgggtcccttgcattgcatatgaatttttatatgatcattgtgtcaattcctgcaaaacagctgggatcttgatagggatttagttgaattggtagataaatttgagaaataactgctattttaatggtgttaggttttctgttccatgactgtgggatgtctttgcatttgcttaggtctttatttcagtgatgttttagagatttcagtgtgcaagtcttgacgtctttaatttttttctaagtattttactgatgccactttaattatatgattattttctaatttttatttttgtattcatcactggtgttagaaataaaattaatttttgtatattgattttgtatattgtagcttttctaaaattctttttttgtcacttagtattttttgcatatgagatcatgcatctgtgaacagaaatacttttacttcttcctttccagtctagattcctattatttcattttcttgccttagtgtgctggctagcacctccagtacaatattggatagaagtgacaagagcagacatctttttcttgttcctgattttaaggggaaagcattcagtctttcaccattgagtatgatgttagctagctgtgggtttgcttcaagttgaggaaattcttttattaaacctagtttactgagtgttttttaatcaaaaaaaaaaaaggaggggctgtgggttttgttaaatgcttcttctgtatcaagattttcatgttgttttgtcctttattaatatgttgtattaatggacttttgtatattgaattaactttgcattcctgggataatctcagttgtccatgctacataaaccttgttctatgctgctggatttggtttgctagtattttgtttagaatgtttgcatctatattcataaggaatattggtctgtagttttcatattatatatctgtccantttggggatgagagtcatactcctgacagaatgaattgggagctttccctgttcttaaacctactgaggtattttttaagtgaactacttggagaccttcacctgtgatcttcagatgctgggggacacagggatggtacctgactctgaaaaggctctcagggtaagacgtgtctgaactggcctgtggcagttaactaaagagtactcctaccaataatggagtcaagatgtatgtttcccataggccacgctggtcactgaaagagatgggctatgagccatcttgaaaactaccctgcacaaatggactgccggcctggagccaggcaccctgcagctgagtgccatataatgttgaagctgttgagggaggagaggttggaagctgccagcttagagaatctcagctgtggtttcccagcagggtgtattccccaggaaagaaagtcattcccccacccctggctcaaagtaataattaacagtgactgggtaaggcaggatctttttttcctaattccctcccctccagaaagggcagcaacagctcttgaatgggaaagaaggtggagggaggaaaagaaaaaccaattgccccaacactgctgtctttaagcttcccacccaaagacctcagtaagaggcagaattatgttttcaattaagagagagtttggcctcttggtgtttcaaaagtgtaggctttttaatacctagagaaactgatgatttgttgattaccaaaaagggaccagaaaagctacatagcctgagatttcatccccagaaaaacgaatccagagagcagacttgcaa

SEQ ID NO: 281395 - DNA, 10258 bp, Homo sapiens
  misc_feature (6259)..(6259): n is a, c, g, or t
  misc_feature (9439)..(9439): n is a, c, g, or t
aaccctcctgggggggggggtgcccagagggcttccggaagtcccaggtttattctttcgggtcacagacagcagaaactaaaaagagggattaccctttctgtccagtcgcaagatggcgaccgagcctggtgggactccgaggggccgcaggccacctcctcttcccaatggcccgtgcgccggcggcgacggcaagcgggagggaggcggggccggcgaaggaaggaggggcggagcgcggcgccctcccgcgcgtcttggccccgccccacgtccccgcgtcccggcctggagccctcgcccggccgggcggcgcgcgctgcctgccgggatactcggcccgcccagccagtcctcccgtcttgcgccgcggccgcgagatccgtgtgtctcccaagatggtggcgctgggctcggggtgactacaggagacgacggggccttttcccttcgccaggacccgacacaccaggcttcgctcgctcgcgcacccctcgccgcctacttacgcttcacctctgccgacccggcgcgctcggctgcgggcggcggcgcctccttcggctcctcctcggaatagctcgcggcctgtagcccctggcaggagggcccctcagccccccggtgtggacaggcagcggcggctggcgacgaacgccgggatttcggcggccccggcgctccctttcccggcctcgttttccggataaggaagcgcgggtcccgcatgagccccggcggtggcggcagcgaaagagaacgaggcggtggcgggcggaggcggcgggcgagggcgactacgaccagtgaggcggccgccgcagcccaggcgcgggggcgacgacaggttaaaaatctgtaagagcctgattttagaattcaccagctcctcagaagtttggcgaaatatgagttattaagcctacgctcagatcaaggtagcagctagactggtgtgacaacctgtttttaatcagtgactcaaagctgtgatcaccctgatgtcaccgaatggccacagcttgtaaaagagagttacagtggaggtaaaaggagtggcttgcaggatggagaagctgcaccagtgttattggaagtgagccaccatttgaatttgctagctcatgctgcagtattcagattatgccagcaggtttattttttgttttgcaagccagctctgcctccttacagtatgacatctgatgctggagggtcgcactttcaaaaatgagtcagctggtacatggggttatcatcaatttttagctcttctgtctgggagatacaagtttggaagcaatcttggggtacttacccacaaggctggtggagaccagatcaggagaacctcagtctgacgacattgaagctagccgaatgaagcgagcagctgcaaagcatctaatagaacgctactaccaccagttaactgagggctgtggaaatgaagcctgcacgaatgagttttgtgcttcctgtccaacttttcttcgtatggataataatgcagcagctattaaagccctcgagctttataagattaatgcaaaactctgtgatcctcatccctccaagaaaggagcaagctcagcttaccttgagaactcgaaaggtgcccccaacaactcctgctctgagataaaaatgaacaagaaaggcgctagaattgattttaaagatgtgacttacttaacagaagagaaggtatatgaaattcttgaattatgtagagaaagagaggattattcccctttaatccgtgttattggaagagttttttctagtgctgaggcattggtacagagcttccggaaagttaaacaacacaccaaggaagaactgaaatctcttcaagcaaaagatgaagacaaagatgaagatgaaaaggaaaaagctgcatgttctgctgctgctatggaagaagactcagaagcatcttcctcaaggataggtgatagctcacagggagacaacaatttgcaaaaattaggccctgatgatgtgtctgtggatattgatgccattagaagggtctacaccagattgctctctaatgaaaaaattgaaactgcctttctcaatgcacttgtatatttgtcacctaacgtggaatgtgacttgacgtatcacaatgtatactctcgagatcctaattatctgaatttgttcattatcgtaatggagaatagaaatctccacagtcctgaatatctggaaatggctttgccattattttgcaaagcgatgagcaagctaccccttgcagcccaaggaaaactgatcagactgtggtctaaatacaatgcagaccagattcggagaatgatggagacatttcagcaacttattacttataaagtcataagcaatgaatttaacagtcgaaatctagtgaatgatgatgatgccattgttgctgcttcgaagtgcttgaaaatggtttactatgcaaatgtagtgggaggggaagtggacacaaatcacaatgaagaagatgatgaagagcccatccctgagtccagcgagctgacacttcaggaacttttgggagaagaaagaagaaacaagaaaggtcctcgagtggaccccctggaaactgaacttggtgttaaaaccctggattgtcgaaaaccacttatcccttttgaagagtttattaatgaaccactgaatgaggttctagaaatggataaagattatacttttttcaaagtagaaacagagaacaaattctcttttatgacatgtccctttatattgaatgctgtcacaaagaatttgggattatattatgacaatagaattcgcatgtacagtgaacgaagaatcactgttctctacagcttagttcaaggacagcagttgaatccatatttgagactcaaagttagacgtgaccatatcatagatgatgcacttgtccggctagagatgatcgctatggaaaatcctgcagacttgaagaagcagttgtatgtggaatttgaaggagaacaaggagttgatgagggaggtgtttccaaagaattttttcagctggttgtggaggaaatcttcaatccagatattggtatgttcacatacgatgaatctacaaaattgttttggtttaatccatcttcttttgaaactgagggtcagtttactctgattggcatagtactgggtctggctatttacaataactgtatactggatgtacattttcccatggttgtctacaggaagctaatggggaaaaaaggaacttttcgtgacttgggagactctcacccagttctatatcagagtttaaaagatttattggagtatgaagggaatgtggaagatgacatgatgatcactttccagatatcacagacagatctttttggtaacccaatgatgtatgatctaaaggaaaatggtgataaaattccaattacaaatgaaaacaggaaggaatttgtcaatctttattctgactacattctcaataaatcagtagaaaaacagttcaaggcttttcggagaggttttcatatggtgaccaatgaatctcccttaaagtacttattcagaccagaagaaattgaattgcttatatgtggaagccggaatctagatttccaagcactagaagaaactacagaatatgacggtggctataccagggactctgttctgattagggagttctgggaaatcgttcattcatttacagatgaacagaaaagactcttcttgcagtttacaacgggcacagacagagcacctgtgggaggactaggaaaattaaagatgattatagccaaaaatggcccagacacagaaaggttacctacatctcatacttgctttaatgtgcttttacttccggaatactcaagcaaagaaaaacttaaagagagattgttgaaggccatcacgtatgccaaaggatttggcatgctgtaaaacaaaacaaaacaaaataaaacaaaaaaaaggaaggaaaaaaaaagaaaaaatttaaaaaattttaaaaatataacgagggataaatttttggtggtgatagtgtcccagtacaaaaaggctgtaagatagtcaaccacagtagtcacctatgtctgtgcctcccttctttattggggacatgtgggctggaacagcagatttcagctacatatatgaacaaatcctttattattattataattatttttttgcgtgaaagtgttacatattctttcacttgtatgtacagagaggtttttctgaatatttattttaagggttaaatcacttttgcttgtgtttattactgcttgaggttgagccttttgagtatttaaaaaatatataccaacagaactactctcccaaggaaaatattgccaccatttgtagaccacgtaaccttcaagtatgtgctacttttttgtccctgtatctaactcaaatcaggaactgtattttttttaatgatttgcttttgaaacttgaagtcttgaaaacagtgtgatgcaattactgctgttctagcccccaaagagttttctgtgcaaaatcttgagaatcaatcaataaagaaagatggaaggaagggagaaattggaatgttttaactgcagccctcagaactttagtaacagcacaacaaattaaaaacaaaaacaactcatgccacagtatgtcgtcttcatgtgtcttgcaatgaactgtttcagtagccaatcctctttcttagtatatgaaaggacagggattttgttcttgttgttctcgttgttgttttaagtttactggggaaagtgcatttggccaaatgaaatggtagtcaagcctattgcaacaaagttaggaagtttgttgtttgtttattataaacaaaaagcatgtgaaagtgcacttaagatagagtttttattaattacttacttattacctagattttaaatagacaatccaaagtctccccttcgtgttgccatcatcttgttgaatcagccattttatcgaggcacgtgatcagtgttgcaacataatgaaaaagatggctactgtgccttgtgttacttaatcatacagtaagctgacctggaaatgaatgaaactattactcctaagaattacattgtatagccccacagattaaatttaattaattaattcaaaacatgttaaacgttactttcatgtactatggaaaagtacaagtaggtttacattactgatttccagaagtaagtagtttcccctttcctagtcttctgtgtatgtgatgttgttaatttcttttattgcattataaaataaaaggattatgtatttttaactaaggtgagacattgatatatccttttgctacaagctatagctaatgtgctgagcttgtgccttggtgattgattgattgattgactgattgttttaactgattactgtagatcaacctgatgatttgtttgtttgaaattggcaggaaaaatgcagctttcaaatcattggggggagaaaaaggatgtctttcaggattattttaattaatttttttcataattgagacagaactgtttgttatgtaccataatgctaaataaaactgtggcacttttcaccataatttaatttagtggaaaaagaagacaatgctttccatattgtgataaggtaacatggggtttttctgggccagcctttagaacactgttagggtacatacgctaccttgatgaaagggaccttcgtgcaactgtagtcatcttaaaggcttctcatccactgtgcttcttaatgtgtaattaaagtgaggagaaattaaatactctgagggcgttttatataataaattcgtgaagaaatgtgtgctcttcagttctcaagttttattattatggtatttattaaagttctacaattgtaataacgtatccatatgacaagttttaaagtggtaattgaaataggttatcagatatagagttgttcacatcaagtagacttttaacagagtcagaatgaacctacccttaaaattttagagaaaaaaaatcgtcggttgcacagaatagctgctctagcttgcttaattatgccgggcatgttgtcactcctcttacttttgctgccttttcattactatttaatggaatgtccctgaacaataaggaagagcaaaacatagacattttgactacagtggatacttcctctaccccaaatgttatgttataaaagtactttttttgcccaggtactctattatatattttggttttctttgaattanacctcaatctccaggaagctctggagggaaaaaaaggaaccataaactaaagtaactggttttccaaataaatgtaaacttttttaaccttttattattatagaacatttcaaacatacataaaacatgaaaacagcctgcagccaaacttttctggaccttggcagctccagcaaatgagctggtcatcctaaccctggtttcctgagacaactacttttggggatgcttgcttgtatagggagatgatagatagatagatacatatcaaaaagaaacttgaaaaaggcttcgaacagaacttgccgatgttactcatccctcctcggtacagacattctgttagaacagatggttgtaatggggcagcatcactccctattcccattaaaaacatgaccattctgagatttcaggccccttcgaggaatttttctcaagaattccatacaaactgtcagaggaagaaatgtcgtcccaagactagtccctgtgtagtcttgatccctttacctgcttactgtaattttttttctctgactttccgccagtgtctaagggccatctgtacccctcccacccttccatgagccactgtataatccaaaaacacaccttccatttgctccctcacttgtctccttttacctcaacagtgttagtgtgtaaagaattgcctggggagggtagagggttttacaagtacagagtcccaagtcttttctcccctccccgttagtgggttggcatttattaataggcactgcaagattttgatgcaggtgtggggtagatatcactgtgaaaggctactaatgcatggtagtttcaccgaaagtacagtcttcaaggatccttataatctcctcattgccaaaatcagtaacatctataaccttgacaacaccctagcttgggctgttgcttctctggctacttgtttttccatcccagtttacccagattttagatggatactcctccaattctgcttaaagtccttacctgttcttgcccagttccctctagtcaacctcagtcactcccaaagattcttccccaatcccatatcttttgctcagacctctgtctctgggatttctttgttacctcatagtcagtagtcctaaaaacaaaattcttcatcttgcatctctatcgaccgaccattctttgtttctttttaagaaatgtaaccttcaccccaatcatcaaaatctctcattcctcaattgtcacaggttgtcacttctttccccctaaacctctcccatcattccttccttctttatactgcccttacaggtcctgatcctctgactcacccggacattcttagcagctgcctaatttcactccctgactctcatctccctcttccaatccttttcattgtgctagaacactatcttgctaattttaatatcctctgcattcagtgcctccacagattgccccctcactgacctttccaatttggccttgtgttacacactttcctcgctgcattcctacccagcatcttcacttgtcatatttctcaaatactcttcatgaccagatatttaaagtacctcatccatgaagacttcatcaacccccaaagtgcctccaatgcttccgtggtagcacagcataatggggtacatttcttagttgaacagtgaggagtcactgggattcttacagagtgtcttagggtctcctcttgatactctttccacatttcagttaaggaattttcttacatctttttttcttctaataacctttgcctggagtgtaagtaaattcatgatagagactgtcatttttaaaaaaaaaaaacaaaccattttgcctttcacatgttattacctccatctttctgttatcttgtcagtgttgccacctaaatgattgaaaatgaccgagcatgcagtagaatgtagtgaagtttcctatttcatccattttttgcataagtgcattggtatctgtatatccatctgcccaagcaccagttgttgaaaagactattatttccccatgaatggtcctggtacccttgtcaaagaacagttgaccataaatataagactttctggattctcagtcttactccattgccctatatgtctgtcgttataccagcaccgcactgtcttgattgctgtagcttggtagtaagtttagatttgggatgtgcaagtcctccattttttttttttttctccccaaaatcattttgtctgttttgggtcccttgcattgcatatgaatttttatatgatcattgtgtcaattcctgcaaaacagctgggatcttgatagggatttagttgaattggtagataaatttgagaaataactgctattttaatggtgttaggttttctgttccatgactgtgggatgtctttgcatttgcttaggtctttatttcagtgatgttttagagatttcagtgtgcaagtcttgacgtctttaatttttttctaagtattttactgatgccactttaattatatgattattttctaatttttatttttgtattcatcactggtgttagaaataaaattaatttttgtatattgattttgtatattgtagcttttctaaaattctttttttgtcacttagtattttttgcatatgagatcatgcatctgtgaacagaaatacttttacttcttcctttccagtctagattcctattatttcattttcttgccttagtgtgctggctagcacctccagtacaatattggatagaagtgacaagagcagacatctttttcttgttcctgattttaaggggaaagcattcagtctttcaccattgagtatgatgttagctagctgtgggtttgcttcaagttgaggaaattcttttattaaacctagtttactgagtgttttttaatcaaaaaaaaaaaaggaggggctgtgggttttgttaaatgcttcttctgtatcaagattttcatgttgttttgtcctttattaatatgttgtattaatggacttttgtatattgaattaactttgcattcctgggataatctcagttgtccatgctacataaaccttgttctatgctgctggatttggtttgctagtattttgtttagaatgtttgcatctatattcataaggaatattggtctgtagttttcatattatatatctgtccantttggggatgagagtcatactcctgacagaatgaattgggagctttccctgttcttaaacctactgaggtattttttaagtgaactacttggagaccttcacctgtgatcttcagatgctgggggacacagggatggtacctgactctgaaaaggctctcagggtaagacgtgtctgaactggcctgtggcagttaactaaagagtactcctaccaataatggagtcaagatgtatgtttcccataggccacgctggtcactgaaagagatgggctatgagccatcttgaaaactaccctgcacaaatggactgccggcctggagccaggcaccctgcagctgagtgccatataatgttgaagctgttgagggaggagaggttggaagctgccagcttagagaatctcagctgtggtttcccagcagggtgtattccccaggaaagaaagtcattcccccacccctggctcaaagtaataattaacagtgactgggtaaggcaggatctttttttcctaattccctcccctccagaaagggcagcaacagctcttgaatgggaaagaaggtggagggaggaaaagaaaaaccaattgccccaacactgctgtctttaagcttcccacccaaagacctcagtaagaggcagaattatgttttcaattaagagagagtttggcctcttggtgtttcaaaagtgtaggctttttaatacctagagaaactgatgatttgttgattaccaaaaagggaccagaaaagctacatagcctgagatttcatccccagaaaaacgaatccagagagcagacttgcaa

SEQ ID NO: 281396 - DNA, 10053 bp, Homo sapiens
  misc_feature (6054)..(6054): n is a, c, g, or t
  misc_feature (9234)..(9234): n is a, c, g, or t
aaccctcctgggggggggggtgcccagagggcttccggaagtcccaggtttattctttcgggtcacagacagcagaaactaaaaagagggattaccctttctgtccagtcgcaagatggcgaccgagcctggtgggactccgaggggccgcaggccacctcctcttcccaatggcccgtgcgccggcggcgacggcaagcgggagggaggcggggccggcgaaggaaggaggggcggagcgcggcgccctcccgcgcgtcttggccccgccccacgtccccgcgtcccggcctggagccctcgcccggccgggcggcgcgcgctgcctgccgggatactcggcccgcccagccagtcctcccgtcttgcgccgcggccgcgagatccgtgtgtctcccaagatggtggcgctgggctcggggtgactacaggagacgacggggccttttcccttcgccaggacccgacacaccaggcttcgctcgctcgcgcacccctccgccgcgtagccatccgccagcgcgggcgcccgccatccgccgcctacttacgcttcacctctgccgacccggcgcgctcggctgcgggcggcggcgcctccttcggctcctcctcggaatagctcgcggcctgtagcccctggcaggagggcccctcagccccccggtgtggacaggcagcggcggctggcgacgaacgccgggatttcggcggccccggcgctccctttcccggcctcgttttccggataaggaagcgcgggtcccgcatgagccccggcggtggcggcagcgaaagagaacgaggcggtggcgggcggaggcggcgggcgagggcgactacgaccagtgaggcggccgccgcagcccaggcgcgggggcgacgacaggttaaaaatctgtaagagcctgattttagaattcaccagctcctcagaagtttggcgaaatatgagttattaagcctacgctcagatcaaggtagcagctagactggtgtgacaacctgtttttaatcagtgactcaaagctgtgatcaccctgatgtcaccgaatggccacagcttgtaaaagagagttacagtggaggtaaaaggagtggcttgcaggatggagaagctgcaccagtgttattggaaatcaggagaacctcagtctgacgacattgaagctagccgaatgaagcgagcagctgcaaagcatctaatagaacgctactaccaccagttaactgagggctgtggaaatgaagcctgcacgaatgagttttgtgcttcctgtccaacttttcttcgtatggataataatgcagcagctattaaagccctcgagctttataagattaatgcaaaactctgtgatcctcatccctccaagaaaggagcaagctcagcttaccttgagaactcgaaaggtgcccccaacaactcctgctctgagataaaaatgaacaagaaaggcgctagaattgattttaaagatgtgacttacttaacagaagagaaggtatatgaaattcttgaattatgtagagaaagagaggattattcccctttaatccgtgttattggaagagttttttctagtgctgaggcattggtacagagcttccggaaagttaaacaacacaccaaggaagaactgaaatctcttcaagcaaaagatgaagacaaagatgaagatgaaaaggaaaaagctgcatgttctgctgctgctatggaagaagactcagaagcatcttcctcaaggataggtgatagctcacagggagacaacaatttgcaaaaattaggccctgatgatgtgtctgtggatattgatgccattagaagggtctacaccagattgctctctaatgaaaaaattgaaactgcctttctcaatgcacttgtatatttgtcacctaacgtggaatgtgacttgacgtatcacaatgtatactctcgagatcctaattatctgaatttgttcattatcgtaatggagaatagaaatctccacagtcctgaatatctggaaatggctttgccattattttgcaaagcgatgagcaagctaccccttgcagcccaaggaaaactgatcagactgtggtctaaatacaatgcagaccagattcggagaatgatggagacatttcagcaacttattacttataaagtcataagcaatgaatttaacagtcgaaatctagtgaatgatgatgatgccattgttgctgcttcgaagtgcttgaaaatggtttactatgcaaatgtagtgggaggggaagtggacacaaatcacaatgaagaagatgatgaagagcccatccctgagtccagcgagctgacacttcaggaacttttgggagaagaaagaagaaacaagaaaggtcctcgagtggaccccctggaaactgaacttggtgttaaaaccctggattgtcgaaaaccacttatcccttttgaagagtttattaatgaaccactgaatgaggttctagaaatggataaagattatacttttttcaaagtagaaacagagaacaaattctcttttatgacatgtccctttatattgaatgctgtcacaaagaatttgggattatattatgacaatagaattcgcatgtacagtgaacgaagaatcactgttctctacagcttagttcaaggacagcagttgaatccatatttgagactcaaagttagacgtgaccatatcatagatgatgcacttgtccggctagagatgatcgctatggaaaatcctgcagacttgaagaagcagttgtatgtggaatttgaaggagaacaaggagttgatgagggaggtgtttccaaagaattttttcagctggttgtggaggaaatcttcaatccagatattggtatgttcacatacgatgaatctacaaaattgttttggtttaatccatcttcttttgaaactgagggtcagtttactctgattggcatagtactgggtctggctatttacaataactgtatactggatgtacattttcccatggttgtctacaggaagctaatggggaaaaaaggaacttttcgtgacttgggagactctcacccagttctatatcagagtttaaaagatttattggagtatgaagggaatgtggaagatgacatgatgatcactttccagatatcacagacagatctttttggtaacccaatgatgtatgatctaaaggaaaatggtgataaaattccaattacaaatgaaaacaggaaggaatttgtcaatctttattctgactacattctcaataaatcagtagaaaaacagttcaaggcttttcggagaggttttcatatggtgaccaatgaatctcccttaaagtacttattcagaccagaagaaattgaattgcttatatgtggaagccggaatctagatttccaagcactagaagaaactacagaatatgacggtggctataccagggactctgttctgattagggagttctgggaaatcgttcattcatttacagatgaacagaaaagactcttcttgcagtttacaacgggcacagacagagcacctgtgggaggactaggaaaattaaagatgattatagccaaaaatggcccagacacagaaaggttacctacatctcatacttgctttaatgtgcttttacttccggaatactcaagcaaagaaaaacttaaagagagattgttgaaggccatcacgtatgccaaaggatttggcatgctgtaaaacaaaacaaaacaaaataaaacaaaaaaaaggaaggaaaaaaaaagaaaaaatttaaaaaattttaaaaatataacgagggataaatttttggtggtgatagtgtcccagtacaaaaaggctgtaagatagtcaaccacagtagtcacctatgtctgtgcctcccttctttattggggacatgtgggctggaacagcagatttcagctacatatatgaacaaatcctttattattattataattatttttttgcgtgaaagtgttacatattctttcacttgtatgtacagagaggtttttctgaatatttattttaagggttaaatcacttttgcttgtgtttattactgcttgaggttgagccttttgagtatttaaaaaatatataccaacagaactactctcccaaggaaaatattgccaccatttgtagaccacgtaaccttcaagtatgtgctacttttttgtccctgtatctaactcaaatcaggaactgtattttttttaatgatttgcttttgaaacttgaagtcttgaaaacagtgtgatgcaattactgctgttctagcccccaaagagttttctgtgcaaaatcttgagaatcaatcaataaagaaagatggaaggaagggagaaattggaatgttttaactgcagccctcagaactttagtaacagcacaacaaattaaaaacaaaaacaactcatgccacagtatgtcgtcttcatgtgtcttgcaatgaactgtttcagtagccaatcctctttcttagtatatgaaaggacagggattttgttcttgttgttctcgttgttgttttaagtttactggggaaagtgcatttggccaaatgaaatggtagtcaagcctattgcaacaaagttaggaagtttgttgtttgtttattataaacaaaaagcatgtgaaagtgcacttaagatagagtttttattaattacttacttattacctagattttaaatagacaatccaaagtctccccttcgtgttgccatcatcttgttgaatcagccattttatcgaggcacgtgatcagtgttgcaacataatgaaaaagatggctactgtgccttgtgttacttaatcatacagtaagctgacctggaaatgaatgaaactattactcctaagaattacattgtatagccccacagattaaatttaattaattaattcaaaacatgttaaacgttactttcatgtactatggaaaagtacaagtaggtttacattactgatttccagaagtaagtagtttcccctttcctagtcttctgtgtatgtgatgttgttaatttcttttattgcattataaaataaaaggattatgtatttttaactaaggtgagacattgatatatccttttgctacaagctatagctaatgtgctgagcttgtgccttggtgattgattgattgattgactgattgttttaactgattactgtagatcaacctgatgatttgtttgtttgaaattggcaggaaaaatgcagctttcaaatcattggggggagaaaaaggatgtctttcaggattattttaattaatttttttcataattgagacagaactgtttgttatgtaccataatgctaaataaaactgtggcacttttcaccataatttaatttagtggaaaaagaagacaatgctttccatattgtgataaggtaacatggggtttttctgggccagcctttagaacactgttagggtacatacgctaccttgatgaaagggaccttcgtgcaactgtagtcatcttaaaggcttctcatccactgtgcttcttaatgtgtaattaaagtgaggagaaattaaatactctgagggcgttttatataataaattcgtgaagaaatgtgtgctcttcagttctcaagttttattattatggtatttattaaagttctacaattgtaataacgtatccatatgacaagttttaaagtggtaattgaaataggttatcagatatagagttgttcacatcaagtagacttttaacagagtcagaatgaacctacccttaaaattttagagaaaaaaaatcgtcggttgcacagaatagctgctctagcttgcttaattatgccgggcatgttgtcactcctcttacttttgctgccttttcattactatttaatggaatgtccctgaacaataaggaagagcaaaacatagacattttgactacagtggatacttcctctaccccaaatgttatgttataaaagtactttttttgcccaggtactctattatatattttggttttctttgaattanacctcaatctccaggaagctctggagggaaaaaaaggaaccataaactaaagtaactggttttccaaataaatgtaaacttttttaaccttttattattatagaacatttcaaacatacataaaacatgaaaacagcctgcagccaaacttttctggaccttggcagctccagcaaatgagctggtcatcctaaccctggtttcctgagacaactacttttggggatgcttgcttgtatagggagatgatagatagatagatacatatcaaaaagaaacttgaaaaaggcttcgaacagaacttgccgatgttactcatccctcctcggtacagacattctgttagaacagatggttgtaatggggcagcatcactccctattcccattaaaaacatgaccattctgagatttcaggccccttcgaggaatttttctcaagaattccatacaaactgtcagaggaagaaatgtcgtcccaagactagtccctgtgtagtcttgatccctttacctgcttactgtaattttttttctctgactttccgccagtgtctaagggccatctgtacccctcccacccttccatgagccactgtataatccaaaaacacaccttccatttgctccctcacttgtctccttttacctcaacagtgttagtgtgtaaagaattgcctggggagggtagagggttttacaagtacagagtcccaagtcttttctcccctccccgttagtgggttggcatttattaataggcactgcaagattttgatgcaggtgtggggtagatatcactgtgaaaggctactaatgcatggtagtttcaccgaaagtacagtcttcaaggatccttataatctcctcattgccaaaatcagtaacatctataaccttgacaacaccctagcttgggctgttgcttctctggctacttgtttttccatcccagtttacccagattttagatggatactcctccaattctgcttaaagtccttacctgttcttgcccagttccctctagtcaacctcagtcactcccaaagattcttccccaatcccatatcttttgctcagacctctgtctctgggatttctttgttacctcatagtcagtagtcctaaaaacaaaattcttcatcttgcatctctatcgaccgaccattctttgtttctttttaagaaatgtaaccttcaccccaatcatcaaaatctctcattcctcaattgtcacaggttgtcacttctttccccctaaacctctcccatcattccttccttctttatactgcccttacaggtcctgatcctctgactcacccggacattcttagcagctgcctaatttcactccctgactctcatctccctcttccaatccttttcattgtgctagaacactatcttgctaattttaatatcctctgcattcagtgcctccacagattgccccctcactgacctttccaatttggccttgtgttacacactttcctcgctgcattcctacccagcatcttcacttgtcatatttctcaaatactcttcatgaccagatatttaaagtacctcatccatgaagacttcatcaacccccaaagtgcctccaatgcttccgtggtagcacagcataatggggtacatttcttagttgaacagtgaggagtcactgggattcttacagagtgtcttagggtctcctcttgatactctttccacatttcagttaaggaattttcttacatctttttttcttctaataacctttgcctggagtgtaagtaaattcatgatagagactgtcatttttaaaaaaaaaaaacaaaccattttgcctttcacatgttattacctccatctttctgttatcttgtcagtgttgccacctaaatgattgaaaatgaccgagcatgcagtagaatgtagtgaagtttcctatttcatccattttttgcataagtgcattggtatctgtatatccatctgcccaagcaccagttgttgaaaagactattatttccccatgaatggtcctggtacccttgtcaaagaacagttgaccataaatataagactttctggattctcagtcttactccattgccctatatgtctgtcgttataccagcaccgcactgtcttgattgctgtagcttggtagtaagtttagatttgggatgtgcaagtcctccattttttttttttttctccccaaaatcattttgtctgttttgggtcccttgcattgcatatgaatttttatatgatcattgtgtcaattcctgcaaaacagctgggatcttgatagggatttagttgaattggtagataaatttgagaaataactgctattttaatggtgttaggttttctgttccatgactgtgggatgtctttgcatttgcttaggtctttatttcagtgatgttttagagatttcagtgtgcaagtcttgacgtctttaatttttttctaagtattttactgatgccactttaattatatgattattttctaatttttatttttgtattcatcactggtgttagaaataaaattaatttttgtatattgattttgtatattgtagcttttctaaaattctttttttgtcacttagtattttttgcatatgagatcatgcatctgtgaacagaaatacttttacttcttcctttccagtctagattcctattatttcattttcttgccttagtgtgctggctagcacctccagtacaatattggatagaagtgacaagagcagacatctttttcttgttcctgattttaaggggaaagcattcagtctttcaccattgagtatgatgttagctagctgtgggtttgcttcaagttgaggaaattcttttattaaacctagtttactgagtgttttttaatcaaaaaaaaaaaaggaggggctgtgggttttgttaaatgcttcttctgtatcaagattttcatgttgttttgtcctttattaatatgttgtattaatggacttttgtatattgaattaactttgcattcctgggataatctcagttgtccatgctacataaaccttgttctatgctgctggatttggtttgctagtattttgtttagaatgtttgcatctatattcataaggaatattggtctgtagttttcatattatatatctgtccantttggggatgagagtcatactcctgacagaatgaattgggagctttccctgttcttaaacctactgaggtattttttaagtgaactacttggagaccttcacctgtgatcttcagatgctgggggacacagggatggtacctgactctgaaaaggctctcagggtaagacgtgtctgaactggcctgtggcagttaactaaagagtactcctaccaataatggagtcaagatgtatgtttcccataggccacgctggtcactgaaagagatgggctatgagccatcttgaaaactaccctgcacaaatggactgccggcctggagccaggcaccctgcagctgagtgccatataatgttgaagctgttgagggaggagaggttggaagctgccagcttagagaatctcagctgtggtttcccagcagggtgtattccccaggaaagaaagtcattcccccacccctggctcaaagtaataattaacagtgactgggtaaggcaggatctttttttcctaattccctcccctccagaaagggcagcaacagctcttgaatgggaaagaaggtggagggaggaaaagaaaaaccaattgccccaacactgctgtctttaagcttcccacccaaagacctcagtaagaggcagaattatgttttcaattaagagagagtttggcctcttggtgtttcaaaagtgtaggctttttaatacctagagaaactgatgatttgttgattaccaaaaagggaccagaaaagctacatagcctgagatttcatccccagaaaaacgaatccagagagcagacttgcaa

SEQ ID NO: 281397 - DNA, 11607 bp, Homo sapiens
  misc_feature (7608)..(7608): n is a, c, g, or t
  misc_feature (10788)..(10788): n is a, c, g, or t
aaccctcctgggggggggggtgcccagagggcttccggaagtcccaggtttattctttcgggtcacagacagcagaaactaaaaagagggattaccctttctgtccagtcgcaagatggcgaccgagcctggtgggactccgaggggccgcaggccacctcctcttcccaatggcccgtgcgccggcggcgacggcaagcgggagggaggcggggccggcgaaggaaggaggggcggagcgcggcgccctcccgcgcgtcttggccccgccccacgtccccgcgtcccggcctggagccctcgcccggccgggcggcgcgcgctgcctgccgggatactcggcccgcccagccagtcctcccgtcttgcgccgcggccgcgagatccgtgtgtctcccaagatggtggcgctgggctcggggtgactacaggagacgacggggccttttcccttcgccaggacccgacacaccaggcttcgctcgctcgcgcacccctccgccgcgtagccatccgccagcgcgggcgcccgccatccgccgcctacttacgcttcacctctgccgacccggcgcgctcggctgcgggcggcggcgcctccttcggctcctcctcggaatagctcgcggcctgtagcccctggcaggagggcccctcagccccccggtgtggacaggcagcggcggctggcgacgaacgccgggatttcggcggccccggcgctccctttcccggcctcgttttccggataaggaagcgcgggtcccgcatgagccccggcggtggcggcagcgaaagagaacgaggcggtggcgggcggaggcggcgggcgagggcgactacgaccagtgaggcggccgccgcagcccaggcgcgggggcgacgacaggttaaaaatctgtaagagcctgattttagaattcaccagctcctcagaagtttggcgaaatatgagttattaagcctacgctcagatcaaggtagcagctagactggtgtgacaacctgtttttaatcagtgactcaaagctgtgatcaccctgatgtcaccgaatggccacagcttgtaaaagagagttacagtggaggtaaaaggagtggcttgcaggatggagaagctgcaccagtgttattggaagtgagccaccatttgaatttgctagctcatgctgcagtattcagattagtgggtgttttgtgatcatattttctgcgattcaaatcaagacctaaaattgattctcattctgagatttacattttattatccaatgttatttggttattgtttcagttttaaaatttctgacttgttattctgacacactttaggataacctaagtcaatagtttaatacaaaaatttccctttggttatatgttttgaattaggttatatgttctgcatttacaagcacatacaggattcttacttccagcaacttggcagtaaaagaataagtagactctttaggagccaaagtcaagcttgggaactgttgctaggtggtatatatttcatagtttatgtttgtttccaagacaaggtctcactccatcgcccaggctggagtgcagtggcacgatcacagttcactgcaactttgaccttctgggctcaagtgaccctcccacctcagcctcccaagttgctgggactaaaggcacccaccaccacacccggctaagagacgaggtttcatcatgttgcccaggttgaccttgaactcctgagctcaagtggtccttatgtcttgacctcccaaagtgctgagattacagacatgaactaccacacctggcatatgtcatagttttgagagtttgaattctaacctcgggacttttggtaacttatttataatattctagaaatatactgttattaggatgagtagaaattcattcagacagaaactattataaattactgcaagaaaaatgtctgctagttctgcatatattcatttttctcttgattaaaaaacaatttccaatttgagtagaacaactttgctatgtttaatagacccaggacagatttattttaaggtaataatctttcaatccttcttcttctatactggattggtttaaattacttagcttgtcttatcaatggtttttaatagcctactttaatatatgtaaaaagtagtaattaatatgttacagtttggtggcaaacattttgatgccaaagttcacatattctcttgcttagggaacagaaattgggaagatagatgtagttatcatttgataatgtatttaaactctatcccatttcaggatctcaaaactttgtaacagttacatattgtacttctaagacttagatttgtttttcttcttgtgtcttacctttttgcagtaatatttttattttcctatcatcatgtcctcattttttccctctcttctctttccctgttaattttgaaagttttgctgcctacgtgtttgaaaacttctaatctgcctctcttccctcagtgccagcaggtttattttttgttttgcaagccagctctgcctccttacagtatgacatctgatgctggagggtcgcactttcaaaaatgagtcagctggtacatggggttatcatcaatttttagctcttctgtctgggagatacaagtttggaagcaatcttggggtacttacccacaaggctggtggagaccagatcaggagaacctcagtctgacgacattgaagctagccgaatgaagcgagcagctgcaaagcatctaatagaacgctactaccaccagttaactgagggctgtggaaatgaagcctgcacgaatgagttttgtgcttcctgtccaacttttcttcgtatggataataatgcagcagctattaaagccctcgagctttataagattaatgcaaaactctgtgatcctcatccctccaagaaaggagcaagctcagcttaccttgagaactcgaaaggtgcccccaacaactcctgctctgagataaaaatgaacaagaaaggcgctagaattgattttaaagatgtgacttacttaacagaagagaaggtatatgaaattcttgaattatgtagagaaagagaggattattcccctttaatccgtgttattggaagagttttttctagtgctgaggcattggtacagagcttccggaaagttaaacaacacaccaaggaagaactgaaatctcttcaagcaaaagatgaagacaaagatgaagatgaaaaggaaaaagctgcatgttctgctgctgctatggaagaagactcagaagcatcttcctcaaggataggtgatagctcacagggagacaacaatttgcaaaaattaggccctgatgatgtgtctgtggatattgatgccattagaagggtctacaccagattgctctctaatgaaaaaattgaaactgcctttctcaatgcacttgtatatttgtcacctaacgtggaatgtgacttgacgtatcacaatgtatactctcgagatcctaattatctgaatttgttcattatcgtaatggagaatagaaatctccacagtcctgaatatctggaaatggctttgccattattttgcaaagcgatgagcaagctaccccttgcagcccaaggaaaactgatcagactgtggtctaaatacaatgcagaccagattcggagaatgatggagacatttcagcaacttattacttataaagtcataagcaatgaatttaacagtcgaaatctagtgaatgatgatgatgccattgttgctgcttcgaagtgcttgaaaatggtttactatgcaaatgtagtgggaggggaagtggacacaaatcacaatgaagaagatgatgaagagcccatccctgagtccagcgagctgacacttcaggaacttttgggagaagaaagaagaaacaagaaaggtcctcgagtggaccccctggaaactgaacttggtgttaaaaccctggattgtcgaaaaccacttatcccttttgaagagtttattaatgaaccactgaatgaggttctagaaatggataaagattatacttttttcaaagtagaaacagagaacaaattctcttttatgacatgtccctttatattgaatgctgtcacaaagaatttgggattatattatgacaatagaattcgcatgtacagtgaacgaagaatcactgttctctacagcttagttcaaggacagcagttgaatccatatttgagactcaaagttagacgtgaccatatcatagatgatgcacttgtccggctagagatgatcgctatggaaaatcctgcagacttgaagaagcagttgtatgtggaatttgaaggagaacaaggagttgatgagggaggtgtttccaaagaattttttcagctggttgtggaggaaatcttcaatccagatattggtatgttcacatacgatgaatctacaaaattgttttggtttaatccatcttcttttgaaactgagggtcagtttactctgattggcatagtactgggtctggctatttacaataactgtatactggatgtacattttcccatggttgtctacaggaagctaatggggaaaaaaggaacttttcgtgacttgggagactctcacccagttctatatcagagtttaaaagatttattggagtatgaagggaatgtggaagatgacatgatgatcactttccagatatcacagacagatctttttggtaacccaatgatgtatgatctaaaggaaaatggtgataaaattccaattacaaatgaaaacaggaaggaatttgtcaatctttattctgactacattctcaataaatcagtagaaaaacagttcaaggcttttcggagaggttttcatatggtgaccaatgaatctcccttaaagtacttattcagaccagaagaaattgaattgcttatatgtggaagccggaatctagatttccaagcactagaagaaactacagaatatgacggtggctataccagggactctgttctgattagggagttctgggaaatcgttcattcatttacagatgaacagaaaagactcttcttgcagtttacaacgggcacagacagagcacctgtgggaggactaggaaaattaaagatgattatagccaaaaatggcccagacacagaaaggttacctacatctcatacttgctttaatgtgcttttacttccggaatactcaagcaaagaaaaacttaaagagagattgttgaaggccatcacgtatgccaaaggatttggcatgctgtaaaacaaaacaaaacaaaataaaacaaaaaaaaggaaggaaaaaaaaagaaaaaatttaaaaaattttaaaaatataacgagggataaatttttggtggtgatagtgtcccagtacaaaaaggctgtaagatagtcaaccacagtagtcacctatgtctgtgcctcccttctttattggggacatgtgggctggaacagcagatttcagctacatatatgaacaaatcctttattattattataattatttttttgcgtgaaagtgttacatattctttcacttgtatgtacagagaggtttttctgaatatttattttaagggttaaatcacttttgcttgtgtttattactgcttgaggttgagccttttgagtatttaaaaaatatataccaacagaactactctcccaaggaaaatattgccaccatttgtagaccacgtaaccttcaagtatgtgctacttttttgtccctgtatctaactcaaatcaggaactgtattttttttaatgatttgcttttgaaacttgaagtcttgaaaacagtgtgatgcaattactgctgttctagcccccaaagagttttctgtgcaaaatcttgagaatcaatcaataaagaaagatggaaggaagggagaaattggaatgttttaactgcagccctcagaactttagtaacagcacaacaaattaaaaacaaaaacaactcatgccacagtatgtcgtcttcatgtgtcttgcaatgaactgtttcagtagccaatcctctttcttagtatatgaaaggacagggattttgttcttgttgttctcgttgttgttttaagtttactggggaaagtgcatttggccaaatgaaatggtagtcaagcctattgcaacaaagttaggaagtttgttgtttgtttattataaacaaaaagcatgtgaaagtgcacttaagatagagtttttattaattacttacttattacctagattttaaatagacaatccaaagtctccccttcgtgttgccatcatcttgttgaatcagccattttatcgaggcacgtgatcagtgttgcaacataatgaaaaagatggctactgtgccttgtgttacttaatcatacagtaagctgacctggaaatgaatgaaactattactcctaagaattacattgtatagccccacagattaaatttaattaattaattcaaaacatgttaaacgttactttcatgtactatggaaaagtacaagtaggtttacattactgatttccagaagtaagtagtttcccctttcctagtcttctgtgtatgtgatgttgttaatttcttttattgcattataaaataaaaggattatgtatttttaactaaggtgagacattgatatatccttttgctacaagctatagctaatgtgctgagcttgtgccttggtgattgattgattgattgactgattgttttaactgattactgtagatcaacctgatgatttgtttgtttgaaattggcaggaaaaatgcagctttcaaatcattggggggagaaaaaggatgtctttcaggattattttaattaatttttttcataattgagacagaactgtttgttatgtaccataatgctaaataaaactgtggcacttttcaccataatttaatttagtggaaaaagaagacaatgctttccatattgtgataaggtaacatggggtttttctgggccagcctttagaacactgttagggtacatacgctaccttgatgaaagggaccttcgtgcaactgtagtcatcttaaaggcttctcatccactgtgcttcttaatgtgtaattaaagtgaggagaaattaaatactctgagggcgttttatataataaattcgtgaagaaatgtgtgctcttcagttctcaagttttattattatggtatttattaaagttctacaattgtaataacgtatccatatgacaagttttaaagtggtaattgaaataggttatcagatatagagttgttcacatcaagtagacttttaacagagtcagaatgaacctacccttaaaattttagagaaaaaaaatcgtcggttgcacagaatagctgctctagcttgcttaattatgccgggcatgttgtcactcctcttacttttgctgccttttcattactatttaatggaatgtccctgaacaataaggaagagcaaaacatagacattttgactacagtggatacttcctctaccccaaatgttatgttataaaagtactttttttgcccaggtactctattatatattttggttttctttgaattanacctcaatctccaggaagctctggagggaaaaaaaggaaccataaactaaagtaactggttttccaaataaatgtaaacttttttaaccttttattattatagaacatttcaaacatacataaaacatgaaaacagcctgcagccaaacttttctggaccttggcagctccagcaaatgagctggtcatcctaaccctggtttcctgagacaactacttttggggatgcttgcttgtatagggagatgatagatagatagatacatatcaaaaagaaacttgaaaaaggcttcgaacagaacttgccgatgttactcatccctcctcggtacagacattctgttagaacagatggttgtaatggggcagcatcactccctattcccattaaaaacatgaccattctgagatttcaggccccttcgaggaatttttctcaagaattccatacaaactgtcagaggaagaaatgtcgtcccaagactagtccctgtgtagtcttgatccctttacctgcttactgtaattttttttctctgactttccgccagtgtctaagggccatctgtacccctcccacccttccatgagccactgtataatccaaaaacacaccttccatttgctccctcacttgtctccttttacctcaacagtgttagtgtgtaaagaattgcctggggagggtagagggttttacaagtacagagtcccaagtcttttctcccctccccgttagtgggttggcatttattaataggcactgcaagattttgatgcaggtgtggggtagatatcactgtgaaaggctactaatgcatggtagtttcaccgaaagtacagtcttcaaggatccttataatctcctcattgccaaaatcagtaacatctataaccttgacaacaccctagcttgggctgttgcttctctggctacttgtttttccatcccagtttacccagattttagatggatactcctccaattctgcttaaagtccttacctgttcttgcccagttccctctagtcaacctcagtcactcccaaagattcttccccaatcccatatcttttgctcagacctctgtctctgggatttctttgttacctcatagtcagtagtcctaaaaacaaaattcttcatcttgcatctctatcgaccgaccattctttgtttctttttaagaaatgtaaccttcaccccaatcatcaaaatctctcattcctcaattgtcacaggttgtcacttctttccccctaaacctctcccatcattccttccttctttatactgcccttacaggtcctgatcctctgactcacccggacattcttagcagctgcctaatttcactccctgactctcatctccctcttccaatccttttcattgtgctagaacactatcttgctaattttaatatcctctgcattcagtgcctccacagattgccccctcactgacctttccaatttggccttgtgttacacactttcctcgctgcattcctacccagcatcttcacttgtcatatttctcaaatactcttcatgaccagatatttaaagtacctcatccatgaagacttcatcaacccccaaagtgcctccaatgcttccgtggtagcacagcataatggggtacatttcttagttgaacagtgaggagtcactgggattcttacagagtgtcttagggtctcctcttgatactctttccacatttcagttaaggaattttcttacatctttttttcttctaataacctttgcctggagtgtaagtaaattcatgatagagactgtcatttttaaaaaaaaaaaacaaaccattttgcctttcacatgttattacctccatctttctgttatcttgtcagtgttgccacctaaatgattgaaaatgaccgagcatgcagtagaatgtagtgaagtttcctatttcatccattttttgcataagtgcattggtatctgtatatccatctgcccaagcaccagttgttgaaaagactattatttccccatgaatggtcctggtacccttgtcaaagaacagttgaccataaatataagactttctggattctcagtcttactccattgccctatatgtctgtcgttataccagcaccgcactgtcttgattgctgtagcttggtagtaagtttagatttgggatgtgcaagtcctccattttttttttttttctccccaaaatcattttgtctgttttgggtcccttgcattgcatatgaatttttatatgatcattgtgtcaattcctgcaaaacagctgggatcttgatagggatttagttgaattggtagataaatttgagaaataactgctattttaatggtgttaggttttctgttccatgactgtgggatgtctttgcatttgcttaggtctttatttcagtgatgttttagagatttcagtgtgcaagtcttgacgtctttaatttttttctaagtattttactgatgccactttaattatatgattattttctaatttttatttttgtattcatcactggtgttagaaataaaattaatttttgtatattgattttgtatattgtagcttttctaaaattctttttttgtcacttagtattttttgcatatgagatcatgcatctgtgaacagaaatacttttacttcttcctttccagtctagattcctattatttcattttcttgccttagtgtgctggctagcacctccagtacaatattggatagaagtgacaagagcagacatctttttcttgttcctgattttaaggggaaagcattcagtctttcaccattgagtatgatgttagctagctgtgggtttgcttcaagttgaggaaattcttttattaaacctagtttactgagtgttttttaatcaaaaaaaaaaaaggaggggctgtgggttttgttaaatgcttcttctgtatcaagattttcatgttgttttgtcctttattaatatgttgtattaatggacttttgtatattgaattaactttgcattcctgggataatctcagttgtccatgctacataaaccttgttctatgctgctggatttggtttgctagtattttgtttagaatgtttgcatctatattcataaggaatattggtctgtagttttcatattatatatctgtccantttggggatgagagtcatactcctgacagaatgaattgggagctttccctgttcttaaacctactgaggtattttttaagtgaactacttggagaccttcacctgtgatcttcagatgctgggggacacagggatggtacctgactctgaaaaggctctcagggtaagacgtgtctgaactggcctgtggcagttaactaaagagtactcctaccaataatggagtcaagatgtatgtttcccataggccacgctggtcactgaaagagatgggctatgagccatcttgaaaactaccctgcacaaatggactgccggcctggagccaggcaccctgcagctgagtgccatataatgttgaagctgttgagggaggagaggttggaagctgccagcttagagaatctcagctgtggtttcccagcagggtgtattccccaggaaagaaagtcattcccccacccctggctcaaagtaataattaacagtgactgggtaaggcaggatctttttttcctaattccctcccctccagaaagggcagcaacagctcttgaatgggaaagaaggtggagggaggaaaagaaaaaccaattgccccaacactgctgtctttaagcttcccacccaaagacctcagtaagaggcagaattatgttttcaattaagagagagtttggcctcttggtgtttcaaaagtgtaggctttttaatacctagagaaactgatgatttgttgattaccaaaaagggaccagaaaagctacatagcctgagatttcatccccagaaaaacgaatccagagagcagacttgcaa

SEQ ID NO: 281398 - DNA, 981 bp, Homo sapiens
  misc_feature (798)..(798): n is a, c, g, or t
cagggaaggagaacttaggctaggtacgaggcctgggtgttgctgtgccgcgcagttaggcagcagcagccgcggagcagtagccgccgtgggagggagccatgaagcattacgaggtggagattctggacgcaaagacaagggagaagctgtgtttcttggacaaggtggagccccacgccaccattgcggagatcaagaacctcttcactaagacccatccgcagtggtaccccgcccgccagtccctccgcctggaccccaagggcaagtccctgaaggatgaggatgttctgcagaagctgcccgtgggcaccacggccacactgtacttccgggacctgggggcccagatcagctgggtgacggtcttcctaacagagtacgcggggccccttttcatctacctgctcttctacttccgagtgcccttcatctatggccacaaatatgactttacgtccagtcggcatacagtggtgcacctcgcctgcatctgtcactcattccactacatcaagcgcctgctggagacgctcttcgtgcaccgcttctcccatggcactatgcctttgcgcaacatcttcaagaactgcacctactactggggcttcgccgcgtggatggcctattacatcaatcaccctctctacactccccctacctacggagctcagcaggtgaaactggcgctcgccatctttgtgatctgccagctcggcaacttctccatccacatggccctgcgggacctgcggcccgctgtgggtccaaaagcggaagatccatacccaccanaaccccttacgtggtttttctgctgaggtccgccccactaccacctcaaggtggggtctggattggttcccctcatgaccaagtctccagtgccctgtttccttggggctaaccaatacctttggccaggcagcacggagtacgaagattccggaacccgcctggatggcttatccttttgtt

SEQ ID NO: 281399 - DNA, 581 bp, Homo sapiens
  misc_feature (3)..(3): n is a, c, g, or t
  misc_feature (107)..(107): n is a, c, g, or t
  misc_feature (177)..(177): n is a, c, g, or t
canacattttcttgatctagaagaaaaaggaatccacaggctctaatcaaacacagggtatgtccaatacagtcaaaagtcacctttcacaaagcaaagccagtgantattgtccagaaagaactcaagtctccgggtttttcctttttttttttttttttttttttttttaagttncaggatacaagtgcagaacgtgcaggtttgttacataggtataagtgtgccatggtggtttactgcacctaacaatccgtcacctaggttttaagccctgcatatattagctatttgtcctgatgtttttcctctccttgctgcccccgcaacccaataggccccagtggccctgttctccctggtgggcttcacccagatgaccatctgggccaagggcaagcaccgcagctacctgaaggagttccgggactacccgcccctgcgcatgcccatcatccccttcctgctctgagcgctcacccctgctgaggctcagcccctcaacccggtggcattctgggggaggagtggggcccacagctctccagcacccggaataaagcccgcctgccccagtcgga

SEQ ID NO: 281400 - DNA, 199 bp, Homo sapiens
gcggccgcctactactactactactgctcgaattcaagcttctaacgatgtacggggacgcgcatgcccatcatccccttcctgctctgagcgctcacccctgctgaggctcagcccctcaacccggtggcattctgggggaggagtggggcccacagctctccagcacccggaataaagcccgcctgccccagtcgga

SEQ ID NO: 281401 - DNA, 544 bp, Homo sapiens
gcagactctctctcgagcttcccttacagggggaaacagcttggaagccatgggggaggaacttttttgtctgtcaggggagagcaaggaagaaccccaagtttctacctctcactgccaacagcagagacgcccccctaccaacagtatttccgcgtagcctgacagtggaaaaggactcatgcggttaggtgttcacctccaggtgccacctaggccctgccactcctggactgacccatcctcctggcaacatcaccaagagatggctaaagacacatggtccagggtcggctttcggtaagtgtttactctcaacgttttagggctaatggtgcgtaggaagagaagaaaaaaaaaaacaaaaataaatagggagtttttaaatcctcacacattagcattcactgccaccatccttgcacaaaaagtcagctccagatcaagcccagaagccagcctgaatcatcaacgggcacaggaacaaaaagccctgctctccttaccctccgaggcggccccgctctccggacctgggcggccg

SEQ ID NO: 281402 - DNA, 1402 bp, Homo sapiens
agcgggggggcggggcggacgcagagccgcgtttagtctatcgctgcggttgcgagcgctgtagggagcctgtgctgtgccgcgcagttaggcagcagcagccgcggagcagtagccgccgtgggagggagccatgaagcattacgaggtggagattctggacgcaaagacaagggagaagctgtgtttcttggacaaggtggagccccacgccaccattgcggagatcaagaacctcttcactaagacccatccgcagtggtaccccgcccgccagtccctccgcctggaccccaagggcaagtccctgaaggatgaggatgttctgcagaagctgcccgtgggcaccacggccacactgtacttccgggacctgggggcccagatcagctgggtgacggtcttcctaacagagtacgcggggccccttttcatctacctgctcttctacttccgagtgcccttcatctatggccacaaatatgactttacgtccagtcggcatacagtggtgcacctcgcctgcatctgtcactcattccactacatcaagcgcctgctggagacgctcttcgtgcaccgcttctcccatggcactatgcctttgcgcaacatcttcaagaactgcacctactactggggcttcgccgcgtggatggcctattacatcaatcaccctctctacactccccctacctacggagctcagcaggtgaaactggcgctcgccatctttgtgatctgccagctcggcaacttctccatccacatggccctgcgggacctgcggcccgctgggtccaagacgcggaagatcccataccccaccaagaaccccttcacgtggctcttcctgctggtgtcctgccccaactacacctacgaggtggggtcctggatcggtttcgccatcatgacgcagtgtctcccagtggccctgttctccctggtgggcttcacccagatgaccatctgggccaagggcaagcaccgcagctacctgaaggagttccgggactacccgcccctgcgcatgcccatcatccccttcctgctctgagcgctcacccctgctgaggctcagcccctcaacccggtggcattctgggggaggagtggggcccacagctctccagcacccggaataaagcccgcctgccccagtcggaaaaaaacaaccaacagcacacgacaccacacaacagcaaacagcagggggcgggcaacatcacccacgaggacacactacaccccactgtgaagacgccccacaaggacgcaataaagccggcggcgcctaaacacgacagcacaaccgtcattgtcgacccccttgtctaagaaccaccaaactcacaaaacaatagcgagctcacgatcatacagactaacagcgacagcc

SEQ ID NO: 281403 - DNA, 1201 bp, Homo sapiens
agcgggggggcggggcggacgcagagccgcgtttagtctatcgctgcggttgcgagcgctgtagggagcctgtgctgtgccgcgcagttaggcagcagcagccgcggagcagtagccgccgtgggagggagccatgaagcattacgaggtggagattctggacgcaaagacaagggagaagctgtgtttcttggacaagagctgacgtccctgcgcctgtgcttcccccaggtggagccccacgccaccattgcggagatcaagaacctcttcactaagacccatccgcagtggtaccccgcccgccagtccctccgcctggaccccaagggcaagtccctgaaggatgaggatgttctgcagaagctgcccgtgggcaccacggccacactgtacttccgggacctgggggcccagatcagctgggtgacggtcttcctaacagagtacgcggggccccttttcatctacctgctcttctacttccgagtgcccttcatctatggccacaaatatgactttacgtccagtcggcatacagtggtgcacctcgcctgcatctgtcactcattccactacatcaagcgcctgctggagacgctcttcgtgcaccgcttctcccatggcactatgcctttgcgcaacatcttcaagaactgcacctactactggggcttcgccgcgtggatggcctattacatcaatcaccctctctacactccccctacctacggagctcagcaggtgaaactggcgctcgccatctttgtgatctgccagctcggcaacttctccatccacatggccctgcgggacctgcggcccgctgggtccaagacgcggaagatcccataccccaccaagaaccccttcacgtggctcttcctgctggtgtcctgccccaactacacctacgaggtggggtcctggatcggtttcgccatcatgacgcagtgtctcccagtggccctgttctccctggtgggcttcacccagatgaccatctgggccaagggcaagcaccgcagctacctgaaggagttccgggactacccgcccctgcgcatgcccatcatccccttcctgctctgagcgctcacccctgctgaggctcagcccctcaacccggtggcattctgggggaggagtggggcccacagctctccagcacccggaataaagcccgcctgccccagtcgga

SEQ ID NO: 281404 - DNA, 369 bp, Homo sapiens
gtgctggattctgaaggagttccgggactacccgccccttcacgtggctcttcctgctggtgtcctgccccaactacacctacgaggtggggtcctggatcggtttcgccatcatgacgcagtgtctcccagtggccctgttctccctggtgggcttcacccagatgaccatctgggccaagggcaagcaccgcagctacctgaaggagttccgggactacccgcccctgcgcatgcccatcatccccttcctgctctgagcgctcacccctgctgaggctcagcccctcaacccggtggcattctgggggaggagtggggcccacagctctccagcacccggaataaagcccgcctgccccagtcgga

SEQ ID NO: 281405 - DNA, 1136 bp, Homo sapiens
  misc_feature (13)..(13): n is a, c, g, or t
aaaaaaaagaagntgtaccgtccgaatcccggatgggtgtactgtgccgcgcagttaggcagcagcagccgcggagcagtagccgccgtgggagggagccatgaagcattacgaggtggagattctggacgcaaagacaagggagaagctgtgtttcttggacaaggtggagccccacgccaccattgcggagatcaagaacctcttcactaagacccatccgcagtggtaccccgcccgccagtccctccgcctggaccccaagggcaagtccctgaaggatgaggatgttctgcagaagctgcccgtgggcaccacggccacactgtacttccgggacctgggggcccagatcagctgggtgacggtcttcctaacagagtacgcggggccccttttcatctacctgctcttctacttccgagtgcccttcatctatggccacaaatatgactttacgtccagtcggcatacagtggtgcacctcgcctgcatctgtcactcattccactacatcaagcgcctgctggagacgctcttcgtgcaccgcttctcccatggcactatgcctttgcgcaacatcttcaagaactgcacctactactggggcttcgccgcgtggatggcctattacatcaatcaccctctctacactccccctacctacggagctcagcaggtgaaactggcgctcgccatctttgtgatctgccagctcggcaacttctccatccacatggccctgcgggacctgcggcccgctgggtccaagacgcggaagatcccataccccaccaagaaccccttcacgtggctcttcctgctggtgtcctgccccaactacacctacgaggtggggtcctggatcggtttcgccatcatgacgcagtgtctcccagtggccctgttctccctggtgggcttcacccagatgaccatctgggccaagggcaagcaccgcagctacctgaaggagttccgggactacccgcccctgcgcatgcccatcatccccttcctgctctgagcgctcacccctgctgaggctcagcccctcaacccggtggcattctgggggaggagtggggcccacagctctccagcacccggaataaagcccgcctgccccagtcgga

SEQ ID NO: 281406 - DNA, 1369 bp, Homo sapiens
  misc_feature (13)..(13): n is a, c, g, or t
aaaaaaaagaagntgtaccgtccgaatcccggatgggtgtactgtgccgcgcagttaggcagcagcagccgcggagcagtagccgccgtgggagggagccatgaagcattacgaggtggagattctggacgcaaagacaagggagaagctgtgtttcttggacaaggtggagccccacgccaccattgcggagatcaagaacctcttcactaagacccatccgcagtggtaccccgcccgccagtccctccgcctggaccccaagggcaagtccctgaaggatgaggatgttctgcagaagctgcccgtgggcaccacggccacactgtacttccgggacctgggggcccagatcagctgggtgacggtcttcctaacagagtacgcggggccccttttcatctacctgctcttctacttccgagtgcccttcatctatggccacaaatatgactttacgtccagtcggcatacagtggtgcacctcgcctgcatctgtcactcattccactacatcaagcgcctgctggagacgctcttcgtgcaccgcttctcccatggcactatgcctttgcgcaacatcttcaagaactgcacctactactggggcttcgccgcgtggatggcctattacatcaatcaccctctctacactccccctacctacggagctcagcaggtgaaactggcgctcgccatctttgtgatctgccagctcggcaacttctccatccacatggccctgcgggacctgcggcccgctgggtccaagacgcggaagatcccataccccaccaagaaccccttcacgtggctcttcctgctggtgtcctgccccaactacacctacgaggtggggtcctggatcggtttcgccatcatgacgcagtgtctcccagtggccctgttctccctggtgggcttcacccagatgaccatctgggccaagggcaagcaccgcagctacctgaaggagttccgggactacccgcccctgcgcatgcccatcatccccttcctgctctgagcgctcacccctgctgaggctcagcccctcaacccggtggcattctgggggaggagtggggcccacagctctccagcacccggaataaagcccgcctgccccagtcggaaaaaaacaaccaacagcacacgacaccacacaacagcaaacagcagggggcgggcaacatcacccacgaggacacactacaccccactgtgaagacgccccacaaggacgcaataaagccggcggcgcctaaacacgacagcacaaccgtcattgtcgacccccttgtctaagaaccaccaaactcacaaaacaatagcgagctcacgatcatacagactaacagcgacagcc

SEQ ID NO: 281407 - DNA, 1302 bp, Homo sapiens
  misc_feature (13)..(13): n is a, c, g, or t
aaaaaaaagaagntgtaccgtccgaatcccggatgggtgtactgtgccgcgcagttaggcagcagcagccgcggagcagtagccgccgtgggagggagccatgaagcattacgaggtggagattctggacgcaaagacaagggagaagctgtgtttcttggacaaggtggagccccacgccaccattgcggagatcaagaacctcttcactaagacccatccgcagtggtaccccgcccgccagtccctccgcctggaccccaagggcaagtccctgaaggatgaggatgttctgcagaagctgcccgtgggcaccacggccacactgtacttccgggacctgggggcccagatcagctgggtgacggtcttcctaacagagtacgcggggccccttttcatctacctgctcttctacttccgagtgcccttcatctatggccacaaatatgactttacgtccagtcggcatacagtggtgcacctcgcctgcatctgtcactcattccactacatcaagcgcctgctggagacgctcttcgtgcaccgcttctcccatggcactatgcctttgcgcaacatcttcaagaactgcacctactactggggcttcgccgcgtggatggcctattacatcaatcaccctctctacactccccctacctacggagctcagcaggtgaaactggcgctcgccatctttgtgatctgccagctcggcaacttctccatccacatggccctgcgggacctgcggcccgctgggtccaagacgcggaagatcccataccccaccaagaaccccttcacgtggctcttcctgctggtgtcctgccccaactacacctacgaggtggggtcctggatcggtttcgccatcatgacgcagtgtctcccagtggccctgttctccctggtgggcttcacccagatgaccatctgggccaagggcaagcaccgcagctacctgaaggagttccgggactacccgcccctgcgcatgcccatcatccccttcctgctctgagcgctcacccctgctgaggctcagcccctcaacccggtggcattctgggggaggagtggggcccacagctctccagcacccggaataaagcccgcctgccccagtcggaaaaaaaaaacatcaccaccaccccccacacacccacacaccccaccccaacacacccccgctctacttccgccggcaaaaaaccacaaacgcgccgccacacctcccaccccctttccaagggcactcccgcccccaagggcgcaaccgacacgcgctccccccac

SEQ ID NO: 281408 - DNA, 1175 bp, Homo sapiens
  misc_feature (13)..(13): n is a, c, g, or t
  misc_feature (1140)..(1140): n is a, c, g, or t
aaaaaaaagaagntgtaccgtccgaatcccggatgggtgtactgtgccgcgcagttaggcagcagcagccgcggagcagtagccgccgtgggagggagccatgaagcattacgaggtggagattctggacgcaaagacaagggagaagctgtgtttcttggacaaggtggagccccacgccaccattgcggagatcaagaacctcttcactaagacccatccgcagtggtaccccgcccgccagtccctccgcctggaccccaagggcaagtccctgaaggatgaggatgttctgcagaagctgcccgtgggcaccacggccacactgtacttccgggacctgggggcccagatcagctgggtgacggtcttcctaacagagtacgcggggccccttttcatctacctgctcttctacttccgagtgcccttcatctatggccacaaatatgactttacgtccagtcggcatacagtggtgcacctcgcctgcatctgtcactcattccactacatcaagcgcctgctggagacgctcttcgtgcaccgcttctcccatggcactatgcctttgcgcaacatcttcaagaactgcacctactactggggcttcgccgcgtggatggcctattacatcaatcaccctctctacactccccctacctacggagctcagcaggtgaaactggcgctcgccatctttgtgatctgccagctcggcaacttctccatccacatggccctgcgggacctgcggcccgctgggtccaagacgcggaagatcccataccccaccaagaaccccttcacgtggctcttcctgctggtgtcctgccccaactacacctacgaggtggggtcctggatcggtttcgccatcatgacgcagtgtctcccagtggccctgttctccctggtgggcttcacccagatgaccatctgggccaagggcaagcaccgcagctacctgaaggagttccgggactacccgcccctgcgcatgcccatcatccccttcctgctctgagcgctcacccctgctgaggctcagcccctcaacccggtggcattctgggggaggagtggggcccacagctctccagcacccggaataaagcccgcctgccccagtcggagaanaaaacaaccacacaagacgcacagaccatgccaat

SEQ ID NO: 281409 - DNA, 1169 bp, Homo sapiens
  misc_feature (13)..(13): n is a, c, g, or t
aaaaaaaagaagntgtaccgtccgaatcccggatgggtgtactgtgccgcgcagttaggcagcagcagccgcggagcagtagccgccgtgggagggagccatgaagcattacgaggtggagattctggacgcaaagacaagggagaagctgtgtttcttggacaaggtggagccccacgccaccattgcggagatcaagaacctcttcactaagacccatccgcagtggtaccccgcccgccagtccctccgcctggaccccaagggcaagtccctgaaggatgaggatgttctgcagaagctgcccgtgggcaccacggccacactgtacttccgggacctgggggcccagatcagctgggtgacggtcttcctaacagagtacgcggggccccttttcatctacctgctcttctacttccgagtgcccttcatctatggccacaaatatgactttacgtccagtcggcatacagtggtgcacctcgcctgcatctgtcactcattccactacatcaagcgcctgctggagacgctcttcgtgcaccgcttctcccatggcactatgcctttgcgcaacatcttcaagaactgcacctactactggggcttcgccgcgtggatggcctattacatcaatcaccctctctacactccccctacctacggagctcagcaggtgaaactggcgctcgccatctttgtgatctgccagctcggcaacttctccatccacatggccctgcgggacctgcggcccgctgggtccaagacgcggaagatcccataccccaccaagaaccccttcacgtggctcttcctgctggtgtcctgccccaactacacctacgaggtggggtcctggatcggtttcgccatcatgacgcagtgtctcccagtggccctgttctccctggtgggcttcacccagatgaccatctgggccaagggcaagcaccgcagctacctgaaggagttccgggactacccgcccctgcgcatgcccatcatccccttcctgctctgagcgctcacccctgctgaggctcagcccctcaacccggtggcattctgggggaggagtggggcccacagctctccagcacccggaataaagcccgcctgccccagtcggaattttacaccaaccccacggtgcgttggcccaa

SEQ ID NO: 281410 - DNA, 1093 bp, Homo sapiens
actttcttcgcatcatattctctcatgaagcattacgaaggtggagattctggacgcaaagacaagggagaagctgtgtttcttggacaagagctgacgtccctgcgcctgtgcttcccccaggtggagccccacgccaccattgcggagatcaagaacctcttcactaagacccatccgcagtggtaccccgcccgccagtccctccgcctggaccccaagggcaagtccctgaaggatgaggatgttctgcagaagctgcccgtgggcaccacggccacactgtacttccgggacctgggggcccagatcagctgggtgacggtcttcctaacagagtacgcggggccccttttcatctacctgctcttctacttccgagtgcccttcatctatggccacaaatatgactttacgtccagtcggcatacagtggtgcacctcgcctgcatctgtcactcattccactacatcaagcgcctgctggagacgctcttcgtgcaccgcttctcccatggcactatgcctttgcgcaacatcttcaagaactgcacctactactggggcttcgccgcgtggatggcctattacatcaatcaccctctctacactccccctacctacggagctcagcaggtgaaactggcgctcgccatctttgtgatctgccagctcggcaacttctccatccacatggccctgcgggacctgcggcccgctgggtccaagacgcggaagatcccataccccaccaagaaccccttcacgtggctcttcctgctggtgtcctgccccaactacacctacgaggtggggtcctggatcggtttcgccatcatgacgcagtgtctcccagtggccctgttctccctggtgggcttcacccagatgaccatctgggccaagggcaagcaccgcagctacctgaaggagttccgggactacccgcccctgcgcatgcccatcatccccttcctgctctgagcgctcacccctgctgaggctcagcccctcaacccggtggcattctgggggaggagtggggcccacagctctccagcacccggaataaagcccgcctgccccagtcgga

SEQ ID NO: 281411 - DNA, 990 bp, Homo sapiens
cccgccgtaccagttggcgcccgcccgcccgccgtacagttgcggagatcaagaacctcttcactaagacccatccgcagtggtaccccgcccgccagtccctccgcctggaccccaagggcaagtccctgaaggatgaggatgttctgcagaagctgcccgtgggcaccacggccacactgtacttccgggacctgggggcccagatcagctgggtgacggtcttcctaacagagtacgcggggccccttttcatctacctgctcttctacttccgagtgcccttcatctatggccacaaatatgactttacgtccagtcggcatacagtggtgcacctcgcctgcatctgtcactcattccactacatcaagcgcctgctggagacgctcttcgtgcaccgcttctcccatggcactatgcctttgcgcaacatcttcaagaactgcacctactactggggcttcgccgcgtggatggcctattacatcaatcaccctctctacactccccctacctacggagctcagcaggtgaaactggcgctcgccatctttgtgatctgccagctcggcaacttctccatccacatggccctgcgggacctgcggcccgctgggtccaagacgcggaagatcccataccccaccaagaaccccttcacgtggctcttcctgctggtgtcctgccccaactacacctacgaggtggggtcctggatcggtttcgccatcatgacgcagtgtctcccagtggccctgttctccctggtgggcttcacccagatgaccatctgggccaagggcaagcaccgcagctacctgaaggagttccgggactacccgcccctgcgcatgcccatcatccccttcctgctctgagcgctcacccctgctgaggctcagcccctcaacccggtggcattctgggggaggagtggggcccacagctctccagcacccggaataaagcccgcctgccccagtcgga

SEQ ID NO: 281412 - DNA, 956 bp, Homo sapiens
  misc_feature (26)..(26): n is a, c, g, or t
  misc_feature (28)..(28): n is a, c, g, or t
tgaggtgactctaccggatccttacncntcactaagacatccgcagtggtaccccgcccgccagtccctccgcctggaccccaagggcaagtccctgaaggatgaggatgttctgcagaagctgcccgtgggcaccacggccacactgtacttccgggacctgggggcccagatcagctgggtgacggtcttcctaacagagtacgcggggccccttttcatctacctgctcttctacttccgagtgcccttcatctatggccacaaatatgactttacgtccagtcggcatacagtggtgcacctcgcctgcatctgtcactcattccactacatcaagcgcctgctggagacgctcttcgtgcaccgcttctcccatggcactatgcctttgcgcaacatcttcaagaactgcacctactactggggcttcgccgcgtggatggcctattacatcaatcaccctctctacactccccctacctacggagctcagcaggtgaaactggcgctcgccatctttgtgatctgccagctcggcaacttctccatccacatggccctgcgggacctgcggcccgctgggtccaagacgcggaagatcccataccccaccaagaaccccttcacgtggctcttcctgctggtgtcctgccccaactacacctacgaggtggggtcctggatcggtttcgccatcatgacgcagtgtctcccagtggccctgttctccctggtgggcttcacccagatgaccatctgggccaagggcaagcaccgcagctacctgaaggagttccgggactacccgcccctgcgcatgcccatcatccccttcctgctctgagcgctcacccctgctgaggctcagcccctcaacccggtggcattctgggggaggagtggggcccacagctctccagcacccggaataaagcccgcctgccccagtcgga

SEQ ID NO: 281413 - DNA, 1032 bp, Homo sapiens
ccttcacctggccatgaaggaccttttgaccaactccctgtcattcctaacctaaccttagagtccctcccccaatgcaggccacttctcctccctcctctctaaatgtagtcccctctcctccatctaaaggcaacattccttacccatctcgtctcttctctttacaagagaagagacgagatgttctgcagaagctgcccgtgggcaccacggccacactgtacttccgggacctgggggcccagatcagctgggtgacggtcttcctaacagagtacgcggggccccttttcatctacctgctcttctacttccgagtgcccttcatctatggccacaaatatgactttacgtccagtcggcatacagtggtgcacctcgcctgcatctgtcactcattccactacatcaagcgcctgctggagacgctcttcgtgcaccgcttctcccatggcactatgcctttgcgcaacatcttcaagaactgcacctactactggggcttcgccgcgtggatggcctattacatcaatcaccctctctacactccccctacctacggagctcagcaggtgaaactggcgctcgccatctttgtgatctgccagctcggcaacttctccatccacatggccctgcgggacctgcggcccgctgggtccaagacgcggaagatcccataccccaccaagaaccccttcacgtggctcttcctgctggtgtcctgccccaactacacctacgaggtggggtcctggatcggtttcgccatcatgacgcagtgtctcccagtggccctgttctccctggtgggcttcacccagatgaccatctgggccaagggcaagcaccgcagctacctgaaggagttccgggactacccgcccctgcgcatgcccatcatccccttcctgctctgagcgctcacccctgctgaggctcagcccctcaacccggtggcattctgggggaggagtggggcccacagctctccagcacccggaataaagcccgcctgccccagtcgga

SEQ ID NO: 281414 - DNA, 1220 bp, Homo sapiens
  misc_feature (13)..(13): n is a, c, g, or t
aaaaaaaagaagntgtaccgtccgaatcccggatgggtgtactgtgccgcgcagttaggcagcagcagccgcggagcagtagccgccgtgggagggagccatgaagcattacgaggtggagattctggacgcaaagacaagggagaagctgtgtttcttggacaaggtggagccccacgccaccattgcggagatcaagaacctcttcactaagacccatccgcagtggtaccccgcccgccagtccctccgcctggaccccaagggcaagtccctgaaggatgaggatgttctgcagaagctgcccgtgggcaccacggccacactgtacttccgggacctgggggcccagatcagctgggtgacggtcttcctaacagagtacgcggggccccttttcatctacctgctcttctacttccgagtgcccttcatctatggccacaaatatgactttacgtccagtcggcatacagtggtgcagtaagtggggcaggtgggaggagggtaggggaaggcagaagacctgccggaccagccccagctgagcctgctccccccgaccagcctcgcctgcatctgtcactcattccactacatcaagcgcctgctggagacgctcttcgtgcaccgcttctcccatggcactatgcctttgcgcaacatcttcaagaactgcacctactactggggcttcgccgcgtggatggcctattacatcaatcaccctctctacactccccctacctacggagctcagcaggtgaaactggcgctcgccatctttgtgatctgccagctcggcaacttctccatccacatggccctgcgggacctgcggcccgctgggtccaagacgcggaagatcccataccccaccaagaaccccttcacgtggctcttcctgctggtgtcctgccccaactacacctacgaggtggggtcctggatcggtttcgccatcatgacgcagtgtctcccagtggccctgttctccctggtgggcttcacccagatgaccatctgggccaagggcaagcaccgcagctacctgaaggagttccgggactacccgcccctgcgcatgcccatcatccccttcctgctctgagcgctcacccctgctgaggctcagcccctcaacccggtggcattctgggggaggagtggggcccacagctctccagcacccggaataaagcccgcctgccccagtcgga

SEQ ID NO: 281415 - DNA, 1235 bp, Homo sapiens
attagaaggggctggggcctcggccgagggcggcttgggatcctgtgctgaggggactgtgccgcgcagttaggcagcagcagccgcggagcagtagccgccgtgggagggagccatgaagcattacgaggtggagattctggacgcaaagacaagggagaagctgtgtttcttggacaaggtggagccccacgccaccattgcggagatcaagaacctcttcactaagacccatccgcagtggtaccccgcccgccagtccctccgcctggaccccaagggcaagtccctgaaggatgaggatgttctgcagaagctgcccgtgggcaccacggccacactgtacttccgggacctgggggcccagatcagctgggtgacggtcttcctaacagagtacgcggggccccttttcatctacctgctcttctacttccgagtgcccttcatctatggccacaaatatgactttacgtccagtcggcatacagtggtgcacctcgcctgcatctgtcactcattccactacatcaagcgcctgctggagacgctcttcgtgcaccgcttctcccatggcactatgcctttgcgcaacatcttcaagaactgcacctactactggggcttcgccgcgtggatggcctattacatcaatcaccctctctacactccccctacctacggagctcagcaggtgaaactggcgctcgccatctttgtgatctgccagctcggcaacttctccatccacatggccctgcgggacctgcggcccgctgggtgagtgcctaggtggctgggggcagggggacagctgggctgggtgagggggtctgactttctccttctgtcctgcctgccagggtccaagacgcggaagatcccataccccaccaagaaccccttcacgtggctcttcctgctggtgtcctgccccaactacacctacgaggtggggtcctggatcggtttcgccatcatgacgcagtgtctcccagtggccctgttctccctggtgggcttcacccagatgaccatctgggccaagggcaagcaccgcagctacctgaaggagttccgggactacccgcccctgcgcatgcccatcatccccttcctgctctgagcgctcacccctgctgaggctcagcccctcaacccggtggcattctgggggaggagtggggcccacagctctccagcacccggaataaagcccgcctgccccagtcgga

SEQ ID NO: 281416 - DNA, 693 bp, Homo sapiens
  misc_feature (13)..(13): n is a, c, g, or t
aaaaaaaagaagntgtaccgtccgaatcccggatgggtgtactgtgccgcgcagttaggcagcagcagccgcggagcagtagccgccgtgggagggagccatgaagcattacgaggtggagattctggacgcaaagacaagggagaagctgtgtttcttggacaagcttcgccgcgtggatggcctattacatcaatcaccctctctacactccccctacctacggagctcagcaggtgaaactggcgctcgccatctttgtgatctgccagctcggcaacttctccatccacatggccctgcgggacctgcggcccgctgggtccaagacgcggaagatcccataccccaccaagaaccccttcacgtggctcttcctgctggtgtcctgccccaactacacctacgaggtggggtcctggatcggtttcgccatcatgacgcagtgtctcccagtggccctgttctccctggtgggcttcacccagatgaccatctgggccaagggcaagcaccgcagctacctgaaggagttccgggactacccgcccctgcgcatgcccatcatccccttcctgctctgagcgctcacccctgctgaggctcagcccctcaacccggtggcattctgggggaggagtggggcccacagctctccagcacccggaataaagcccgcctgccccagtcgga

SEQ ID NO: 281417 - DNA, 1093 bp, Homo sapiens
attagaaggggctggggcctcggccgagggcggcttgggatcctgtgctgaggggactgtgccgcgcagttaggcagcagcagccgcggagcagtagccgccgtgggagggagccatgaagcattacgaggtggagattctggacgcaaagacaagggagaagctgtgtttcttggacaaggtggagccccacgccaccattgcggagatcaagaacctcttcactaagacccatccgcagtggtaccccgcccgccagtccctccgcctggaccccaagggcaagtccctgaaggatgaggatgttctgcagaagctgcccgtgggcaccacggccacactgtacttccgggacctgggggcccagatcagctgggtgacggtcttcctaacagagtacgcggggccccttttcatctacctgctcttctacttccgagtgcccttcatctatggccacaaatatgactttacgtccagtcggcatacagtggtgcacctcgcctgcatctgtcactcattccactacatcaagcgcctgctggagacgctcttcgtgcaccgcttctcccatggcactatgcctttgcgcaacatcttcaagaactgcacctactactggggcttcgccgcgtggatggcctattacatcaatcaccctctctacactccccctacctacggagctcagcaggtgaaactggcgctcgccatctttgtgggtccaagacgcggaagatcccataccccaccaagaaccccttcacgtggctcttcctgctggtgtcctgccccaactacacctacgaggtggggtcctggatcggtttcgccatcatgacgcagtgtctcccagtggccctgttctccctggtgggcttcacccagatgaccatctgggccaagggcaagcaccgcagctacctgaaggagttccgggactacccgcccctgcgcatgcccatcatccccttcctgctctgagcgctcacccctgctgaggctcagcccctcaacccggtggcattctgggggaggagtggggcccacagctctccagcacccggaataaagcccgcctgccccagtcgga

SEQ ID NO: 281418 - DNA, 612 bp, Homo sapiens
  misc_feature (13)..(13): n is a, c, g, or t
aaaaaaaagaagntgtaccgtccgaatcccggatgggtgtactgtgccgcgcagttaggcagcagcagccgcggagcagtagccgccgtgggagggagccatgaagcattacgaggtggagattctggacgcaaagacaagggagaagctgtgtttcttggacaaggtggagccccacgccaccattgcggagatcaagaacctcttcactaagacccatccgcagtggtaccccgcccgccagtccctccgcctggaccccaagggcaagtccctgaaggatgaggatgttctgcagaagctgcccgtgggcaccacggccacactgtacttccgggacctgggggcccagatcagctgggtgacggtcttcctaacagagtacgcggggccccttttcatctacctgctcttctacttccgagtgcccttcatctatggccacaaatatgactttacgtccagtcggcatacagtggtgcacctcgcctgcatctgtcactcattccactacatcaagcgcctgctggagacgctcttcgtgcaccgcttctcccatggcactatgcctttgcgcaacatcttcaagcggggggatcctcatagaacaga

SEQ ID NO: 281419 - DNA, 914 bp, Homo sapiens
  misc_feature (13)..(13): n is a, c, g, or t
aaaaaaaagaagntgtaccgtccgaatcccggatgggtgtactgtgccgcgcagttaggcagcagcagccgcggagcagtagccgccgtgggagggagccatgaagcattacgaggtaagaagcgagaaacaggggccgtgtggccactgctgacccattctttttccttctttgcgggaccacgggaccccactttctggtcctgtgccccgaaggaagagccagacggcgcaggcgcagtgggcaagcgttgcgccccgggccactcgtaaattccaatgcgcatgtgcgcaggaagtatttataaatctgcaacccaggctgttttgggggtactttttcttgggggtctctgcaggggctgggacgcttgcaggttccttgcagctcccccagcgggctgagttgcagactttgtcatgggagccacgaaggtgcgggacccttgctcccaatccgagggagtcttgcacaaatcttgcgccacgccgccgtcaccagcgtaggaaggggctttgctatcagtattcttgtgtacgacctttggaccccttccctcgcccgggacgttcccgggagacttaggcggtgagggaggtgcagctccacggctggctttcgcagagcggcgaagctgatcttgccttctggttatcaaagaggtcatctacgtcaacccttgggtgtcaccaaggagaaatcttatacccacccacagccactcttgaagcccaagtcttctgactcctaacttgggtctctttttcccttaaaacgaagtcttctgatgtgcttatcgccctaggtgataatataatattaataattcaaccaattatccctgaattattgctgacttttaagtaactatcatcaaataataaaatttgttattaaaatcaaaataacaatt

SEQ ID NO: 281420 - DNA, 562 bp, Homo sapiens
  misc_feature (13)..(13): n is a, c, g, or t
  misc_feature (545)..(545): n is a, c, g, or t
aaaaaaaagaagntgtaccgtccgaatcccggatgggtgtactgtgccgcgcagttaggcagcagcagccgcggagcagtagccgccgtgggagggagccatgaagcattacgaggtggagattctggacgcaaagacaagggagaagctgtgtttcttggacaaggtggagccccacgccaccattgcggagatcaagaacctcttcactaagacccatccgcagtggtaccccgcccgccagtccctccgcctggaccccaagggcaagtccctgaaggatgaggatgttctgcagaagctgcccgtgggcaccacggccacactgtacttccgggacctgggggcccagatcagctgggtgacggtcttcctaacagagtacgcggggccccttttcatctacctgctcttctacttccgagtgcccttcatctatggccacaaatatgactttacgtccagtcggcatacagtggtgcacctcgcctgcatctgtcactcattccacagctctccagcacccggaataaagcccgcctgcnccagtcggaaaaaaaaa

SEQ ID NO: 281421 - DNA, 278 bp, Homo sapiens
  misc_feature (36)..(36): n is a, c, g, or t
  misc_feature (39)..(39): n is a, c, g, or t
  misc_feature (252)..(252): n is a, c, g, or t
  misc_feature (278)..(278): n is a, c, g, or t
ggagggggacggagcggtaatggatagggggaaaangancttcaggtgacgtgactctctttttaaccccgatcaggtggagattctggacgcaaagacaagggagaagctgtgtttcttggacaaggtggagccccacgccaccattgcggagatcaagaacctcttcactaagacccgtgggaggagctgtggagtcctggggtccttgcaccctgggaaccctgagaagctggcacagctctccagcanccggaataaaacccgtatcggcaagn

SEQ ID NO: 281422 - DNA, 705 bp, Homo sapiens
  misc_feature (688)..(688): n is a, c, g, or t
tggtgcggcgttctagaggatccgatgtgagtgtgatatgtatttggcagcaggtgacacattttagggtcacagggaaaaacactcctttctttagactcacacgtgttgtgccctgtcagtgtttggtcatgatatgggaaataggcttccatagaaatgattggaagcacatgtaatcgccctttatttattaaagaatcttactcctttggtgttcctaaactttgaagctcacgttggggaagttgaaaataagagtgtggggattataggtgcaagccaccatgcccagccaaacaattattaaatataaatggttatatgtaaacaatcacatcatgcatgatgtgattgttccatccgcagtggtaccccgcccgccagtccctccgcctggaccccaagggcaagtccctgaaggatgaggatgttctgcagaagctgcccgtgggcaccacggccacactgtacttccgggacctgggggcccagatcagctgggtgacggtcttcctaacagagtacgcggggccccttttcatctacctgctcttctacttccgagtgcccttcatctatggccacaaatatgactttacgtccagtcggcatacagtggtgcacctcgcctgcatctgtcactcattccacagctctccagcacccggaataaagcccgcctgcnccagtcggaaaaaaaaa

SEQ ID NO: 281423 - DNA, 1169 bp, Homo sapiens
agcgggggggcggggcggacgcagagccgcgtttagtctatcgctgcggttgcgagcgctgtagggagcctgtgctgtgccgcgcagttaggcagcagcagccgcggagcagtagccgccgtgggagggagccatgaagcattacgaggtggagattctggacgcaaagacaagggagaagctgtgtttcttggacaaggtggagccccacgccaccattgcggagatcaagaacctcttcactaagacccatccgcagtggtaccccgcccgccagtccctccgcctggaccccaagggcaagtccctgaaggatgaggatgttctgcagaagctgcccgtgggcaccacggccacactgtacttccgggacctgggggcccagatcagctgggtgacggtcttcctaacagagtacgcggggccccttttcatctacctgctcttctacttccgagtgcccttcatctatggccacaaatatgactttacgtccagtcggcatacagtggtgcacctcgcctgcatctgtcactcattccactacatcaagcgcctgctggagacgctcttcgtgcaccgcttctcccatggcactatgcctttgcgcaacatcttcaagaactgcacctactactggggcttcgccgcgtggatggcctattacatcaatcaccctctctacactccccctacctacggagctcagcaggtgaaactggcgctcgccatctttgtgatctgccagctcggcaacttctccatccacatggccctgcgggacctgcggcccgctgggtccaagacgcggaagatcccataccccaccaagaaccccttcacgtggctcttcctgctggtgtcctgccccaactacacctacgaggtggggtcctggatcggtttcgccatcatgacgcagtgtctcccagtggccctgttctccctggtgggcttcacccagatgaccatctgggccaagggcaagcaccgcagctacctgaaggagttccgggactacccgcccctgcgcatgcccatcatccccttcctgctctgagcgctcacccctgctgaggctcagcccctcaacccggtggcattctgggggaggagtggggcccacagctctccagcacccggaataaagcccgcctgccccagtcgga

SEQ ID NO: 281424 - DNA, 241 bp, Homo sapiens
ctggtgtatggtgactgtgggagggagccatgaagcattacgaggtggagattctggacgcaaagacaagggagaagctgtgtttcttggacaaggtggagccccacgccaccattgcggagatcaagaacctcttcactaagacccatccgcagtggtaccccgcccgccagtccctccgcctggaccccaagggcaagtcccgtgaaggcgcttgatgtcagtggaatggggtcaccgc

SEQ ID NO: 281425 - DNA, 1151 bp, Homo sapiens
attagaaggggctggggcctcggccgagggcggcttgggatcctgtgctgaggggactgtgccgcgcagttaggcagcagcagccgcggagcagtagccgccgtgggagggagccatgaagcattacgaggtggagattctggacgcaaagacaagggagaagctgtgtttcttggacaaggtggagccccacgccaccattgcggagatcaagaacctcttcactaagacccatccgcagtggtaccccgcccgccagtccctccgcctggaccccaagggcaagtccctgaaggatgaggatgttctgcagaagctgcccgtgggcaccacggccacactgtacttccgggacctgggggcccagatcagctgggtgacggtcttcctaacagagtacgcggggccccttttcatctacctgctcttctacttccgagtgcccttcatctatggccacaaatatgactttacgtccagtcggcatacagtggtgcacctcgcctgcatctgtcactcattccactacatcaagcgcctgctggagacgctcttcgtgcaccgcttctcccatggcactatgcctttgcgcaacatcttcaagaactgcacctactactggggcttcgccgcgtggatggcctattacatcaatcaccctctctacactccccctacctacggagctcagcaggtgaaactggcgctcgccatctttgtgatctgccagctcggcaacttctccatccacatggccctgcgggacctgcggcccgctgggtccaagacgcggaagatcccataccccaccaagaaccccttcacgtggctcttcctgctggtgtcctgccccaactacacctacgaggtggggtcctggatcggtttcgccatcatgacgcagtgtctcccagtggccctgttctccctggtgggcttcacccagatgaccatctgggccaagggcaagcaccgcagctacctgaaggagttccgggactacccgcccctgcgcatgcccatcatccccttcctgctctgagcgctcacccctgctgaggctcagcccctcaacccggtggcattctgggggaggagtggggcccacagctctccagcacccggaataaagcccgcctgccccagtcgga

SEQ ID NO: 281426 - DNA, 1671 bp, Homo sapiens
  misc_feature (13)..(13): n is a, c, g, or t
aaaaaaaagaagntgtaccgtccgaatcccggatgggtgtactgtgccgcgcagttaggcagcagcagccgcggagcagtagccgccgtgggagggagccatgaagcattacgaggtggagattctggacgcaaagacaagggagaagctgtgtttcttggacaaggtggagccccacgccaccattgcggagatcaagaacctcttcactaagacccatccgcagtggtaccccgcccgccagtccctccgcctggaccccaagggcaagtccctgaaggatgaggatgttctgcagaagctgcccgtgggcaccacggccacactgtacttccgggacctgggggcccagatcagctgggtgacggtcttcctaacagagtacgcggggccccttttcatctacctgctcttctacttccgagtgcccttcatctatggccacaaatatgactttacgtccagtcggcatacagtggtgcacctcgcctgcatctgtcactcattccactacatcaagcgcctgctggagacgctcttcgtgcaccgcttctcccatggcactatgcctttgcgcaacatcttcaagaactgcacctactactggggcttcgccgcgtggatggcctattacatcaatcaccctctctacactccccctacctacggagctcagcaggtgaaactggcgctcgccatctttgtgatctgccagctcggcaacttctccatccacatggccctgcgggacctgcggcccgctgggtccaagacgcggaagatcccataccccaccaagaaccccttcacgtggctcttcctgctggtgtcctgccccaactacacctacgaggtggggtcctggatcggtttcgccatcatgacgcagtgtctcccagtggccctgttctccctggtgggcttcacccagatgaccatctgggccaagggcaagcaccgcagctacctgaaggagttccgggactacccgcccctgcgcatgcccatcatccccttcctgctctgagcgctcacccctgctgaggctcagcccctcaacccggtggcattctgggggaggagtggggcccacagctctccagcacccggaataaagcccgcctgccccagtcggaaaaaaaaaaaaaaaaaaaaaaaaaaaaaagaaaaaaaaaaaaacaaaaaaaaaaaaaaaaaaaaaaaaaaaaaaaaaaaaaaaaaaaaaaaaaacaacaagcagggatttttttgtgttttttttttttgcggggggggggggggccccctctcgccaggataccctatgtcgcaggcgcgcggtggcacgcactaacctacccattatcacactgacaattcgccaccgagatacgtggccgatgagacaatatccactactagaccggaggcgaatcgaccgaggtgcccccgccccaccacacgcccgcgagaactgcgcgccaacgacaaccaataaaccacacaagcccgggccgagaacaccacgctcggcggccacgaccaccaaaaacaggacgtgcccgacacacagcgcagcacgaacgaccaacacctcagtgccgcacaacaaagacgaccgcggcgcagggcggggatatcaaacaacaaacgtgacgagacgggacacaaacactaacacacgcaccacgc

SEQ ID NO: 281427 - DNA, 1097 bp, Homo sapiens
  misc_feature (36)..(36): n is a, c, g, or t
  misc_feature (39)..(39): n is a, c, g, or t
ggagggggacggagcggtaatggatagggggaaaangancttcaggtgacgtgactctctttttaaccccgatcaggtggagattctggacgcaaagacaagggagaagctgtgtttcttggacaaggtggagccccacgccaccattgcggagatcaagaacctcttcactaagacccatccgcagtggtaccccgcccgccagtccctccgcctggaccccaagggcaagtccctgaaggatgaggatgttctgcagaagctgcccgtgggcaccacggccacactgtacttccgggacctgggggcccagatcagctgggtgacggtcttcctaacagagtacgcggggccccttttcatctacctgctcttctacttccgagtgcccttcatctatggccacaaatatgactttacgtccagtcggcatacagtggtgcacctcgcctgcatctgtcactcattccactacatcaagcgcctgctggagacgctcttcgtgcaccgcttctcccatggcactatgcctttgcgcaacatcttcaagaactgcacctactactggggcttcgccgcgtggatggcctattacatcaatcaccctctctacactccccctacctacggagctcagcaggtgaaactggcgctcgccatctttgtgatctgccagctcggcaacttctccatccacatggccctgcgggacctgcggcccgctgggtccaagacgcggaagatcccataccccaccaagaaccccttcacgtggctcttcctgctggtgtcctgccccaactacacctacgaggtggggtcctggatcggtttcgccatcatgacgcagtgtctcccagtggccctgttctccctggtgggcttcacccagatgaccatctgggccaagggcaagcaccgcagctacctgaaggagttccgggactacccgcccctgcgcatgcccatcatccccttcctgctctgagcgctcacccctgctgaggctcagcccctcaacccggtggcattctgggggaggagtggggcccacagctctccagcacccggaataaagcccgcctgccccagtcgga

SEQ ID NO: 281428 - DNA, 1094 bp, Homo sapiens
  misc_feature (1047)..(1047): n is a, c, g, or t
  misc_feature (1049)..(1049): n is a, c, g, or t
  misc_feature (1052)..(1052): n is a, c, g, or t
  misc_feature (1054)..(1054): n is a, c, g, or t
attagaaggggctggggcctcggccgagggcggcttgggatcctgtgctgaggggactgtgccgcgcagttaggcagcagcagccgcggagcagtagccgccgtgggagggagccatgaagcattacgaggtggagattctggacgcaaagacaagggagaagctgtgtttcttggacaaggtggagccccacgccaccattgcggagatcaagaacctcttcactaagacccatccgcagtggtaccccgcccgccagtccctccgcctggaccccaagggcaagtccctgaaggatgaggatgttctgcagaagctgcccgtgggcaccacggccacactgtacttccgggacctgggggcccagatcagctgggtgacggtcttcctaacagagtacgcggggccccttttcatctacctgctcttctacttccgagtgcccttcatctatggccacaaatatgactttacgtccagtcggcatacagtggtgcacctcgcctgcatctgtcactcattccactacatcaagcgcctgctggagacgctcttcgtgcaccgcttctcccatggcactatgcctttgcgcaacatcttcaagaactgcacctactactggggcttcgccgcgtggatggcctattacatcaatcaccctctctacactccccctacctacggagctcagcaggtgaaactggcgctcgccatctttgtgatctgccagctcggcaacttctccatccacatggccctgcgggacctgcggcccgctgggtccaagacgcggaagatcccataccccaccaagaaccccttcacgtggctcttcctgctggtgtcctgccccaactacacctacgaggtggggtcctggatcggtttcgccatcatgacgcagtgtctcccagtggccctgttctccctggtgggcttcacccagatgaccatctgggccaagggcaagcaccgcagctacctgaaggagttccgggactacccgccccttggatgcaatatcctctgttgaggtacctgtgagtnanctnancggggtcgggagaggggccaggttcgacgaaagcgtgccg

SEQ ID NO: 281429 - DNA, 1072 bp, Homo sapiens
  misc_feature (22)..(24): n is a, c, g, or t
  misc_feature (27)..(28): n is a, c, g, or t
tccggaggatgtgttgggcaannnaanntttgcaacccacagccccctcaggaggaaccatctggccgcattgaaagggagaagctgtgtctcttggacaaggtggagccccacgccaccattgcggagatcaagaacctcttcactaagacccatccgcagtggtaccccgcccgccagtccctccgcctggaccccaagggcaagtccctgaaggatgaggatgttctgcagaagctgcccgtgggcaccacggccacactgtacttccgggacctgggggcccagatcagctgggtgacggtcttcctaacagagtacgcggggccccttttcatctacctgctcttctacttccgagtgcccttcatctatggccacaaatatgactttacgtccagtcggcatacagtggtgcacctcgcctgcatctgtcactcattccactacatcaagcgcctgctggagacgctcttcgtgcaccgcttctcccatggcactatgcctttgcgcaacatcttcaagaactgcacctactactggggcttcgccgcgtggatggcctattacatcaatcaccctctctacactccccctacctacggagctcagcaggtgaaactggcgctcgccatctttgtgatctgccagctcggcaacttctccatccacatggccctgcgggacctgcggcccgctgggtccaagacgcggaagatcccataccccaccaagaaccccttcacgtggctcttcctgctggtgtcctgccccaactacacctacgaggtggggtcctggatcggtttcgccatcatgacgcagtgtctcccagtggccctgttctccctggtgggcttcacccagatgaccatctgggccaagggcaagcaccgcagctacctgaaggagttccgggactacccgcccctgcgcatgcccatcatccccttcctgctctgagcgctcacccctgctgaggctcagcccctcaacccggtggcattctgggggaggagtggggcccacagctctccagcacccggaataaagcccgcctgccccagtcgga

SEQ ID NO: 281430 - DNA, 1233 bp, Homo sapiens
  misc_feature (13)..(13): n is a, c, g, or t
aaaaaaaagaagntgtaccgtccgaatcccggatgggtgtactgtgccgcgcagttaggcagcagcagccgcggagcagtagccgccgtgggagggagccatgaagcattacgaggtggagattctggacgcaaagacaagggagaagctgtgtttcttggacaaggtggagccccacgccaccattgcggagatcaagaacctcttcactaagacccatccgcagtggtaccccgcccgccagtccctccgcctggaccccagtgagtacagctgtccactcggcccgccccctgggctcctgggtggcagtgggagaaggcccgggtagcccctgagccctggcccgcctctctgcagagggcaagtccctgaaggatgaggatgttctgcagaagctgcccgtgggcaccacggccacactgtacttccgggacctgggggcccagatcagctgggtgacggtcttcctaacagagtacgcggggccccttttcatctacctgctcttctacttccgagtgcccttcatctatggccacaaatatgactttacgtccagtcggcatacagtggtgcacctcgcctgcatctgtcactcattccactacatcaagcgcctgctggagacgctcttcgtgcaccgcttctcccatggcactatgcctttgcgcaacatcttcaagaactgcacctactactggggcttcgccgcgtggatggcctattacatcaatcaccctctctacactccccctacctacggagctcagcaggtgaaactggcgctcgccatctttgtgatctgccagctcggcaacttctccatccacatggccctgcgggacctgcggcccgctgggtccaagacgcggaagatcccataccccaccaagaaccccttcacgtggctcttcctgctggtgtcctgccccaactacacctacgaggtggggtcctggatcggtttcgccatcatgacgcagtgtctcccagtggccctgttctccctggtgggcttcacccagatgaccatctgggccaagggcaagcaccgcagctacctgaaggagttccgggactacccgcccctgcgcatgcccatcatccccttcctgctctgagcgctcacccctgctgaggctcagcccctcaacccggtggcattctgggggaggagtggggcccacagctctccagcacccggaataaagcccgcctgccccagtcgga

SEQ ID NO: 281431 - DNA, 1241 bp, Homo sapiens
attagaaggggctggggcctcggccgagggcggcttgggatcctgtgctgaggggactgtgccgcgcagttaggcagcagcagccgcggagcagtagccgccgtgggagggagccatgaagcattacgaggtggagattctggacgcaaagacaagggagaagctgtgtttcttggacaaggtggagccccacgccaccattgcggagatcaagaacctcttcactaagacccatccgcagtggtaccccgcccgccagtccctccgcctggaccccaagggcaagtccctgaaggatgaggatgttctgcagaagctgcccgtgggcaccacggccacactgtacttccgggacctgggggcccagatcagctgggtgacggtcttcctaacagagtacgcggggccccttttcatctacctgctcttctacttccgagtgcccttcatctatggccacaaatatgactttacgtccagtcggcatacagtggtgcacctcgcctgcatctgtcactcattccactacatcaagcgcctgctggagacgctcttcgtgcaccgcttctcccatggcactatgcctttgcgcaacatcttcaagaactgcacctactactggggcttcgccgcgtggatggcctattacatcaatcaccctctctacactccccctagtaagtggcctcagaccatccttccctcccccacggtccccacccagcgggtcctcccctcatgggctcccctccctgcttcctcttcagcctacggagctcagcaggtgaaactggcgctcgccatctttgtgatctgccagctcggcaacttctccatccacatggccctgcgggacctgcggcccgctgggtccaagacgcggaagatcccataccccaccaagaaccccttcacgtggctcttcctgctggtgtcctgccccaactacacctacgaggtggggtcctggatcggtttcgccatcatgacgcagtgtctcccagtggccctgttctccctggtgggcttcacccagatgaccatctgggccaagggcaagcaccgcagctacctgaaggagttccgggactacccgcccctgcgcatgcccatcatccccttcctgctctgagcgctcacccctgctgaggctcagcccctcaacccggtggcattctgggggaggagtggggcccacagctctccagcacccggaataaagcccgcctgccccagtcgga

SEQ ID NO: 281432 - DNA, 1105 bp, Homo sapiens
attagaaggggctggggcctcggccgagggcggcttgggatcctgtgctgaggggactgtgccgcgcagttaggcagcagcagccgcggagcagtagccgccgtgggagggagccatgaagcattacgaggtggagattctggacgcaaagacaagggagaagctgtgtttcttggacaaggtggagccccacgccaccattgcggagatcaagaacctcttcactaagacccatccgcagtggtaccccgcccgccagtccctccgcctggaccccaagggcaagtccctgaaggatgaggatgttctgcagaagctgcccgtgggcaccacggccacactgtacttccgggacctgggggcccagatcagctgggtgacggtcttcctaacagagtacgcggggccccttttcatctacctgctcttctacttccgagtgcccttcatctatggccacaaatatgactttacgtccagtcggcatacagtggtgcacctcgcctgcatctgtcactcattccactacatcaagcgcctgctggagacgctcttcgtgcaccgcttctcccatggcactatgcctttgcgcaacatcttcaagaactgcacctactactggggcttcgccgcgtggatggcctattacatcaatcaccctctctacactccccctacctacggagctcagcaggtgaaactggcgctcgccatctttgtgatctgccagctcggcaacttctccatccacatggccctgcgggacctgcggcccgctgggtccaagacgcggaagatcccataccccaccaagaaccccttcacgtggctcttcctgctggtgtcctgccccaactacacctacgagtggccctgttctccctggtgggcttcacccagatgaccatctgggccaagggcaagcaccgcagctacctgaaggagttccgggactacccgcccctgcgcatgcccatcatccccttcctgctctgagcgctcacccctgctgaggctcagcccctcaacccggtggcattctgggggaggagtggggcccacagctctccagcacccggaataaagcccgcctgccccagtcgga

SEQ ID NO: 281433 - DNA, 1107 bp, Homo sapiens
attagaaggggctggggcctcggccgagggcggcttgggatcctgtgctgaggggactgtgccgcgcagttaggcagcagcagccgcggagcagtagccgccgtgggagggagccatgaagcattacgaggtggagattctggacgcaaagacaagggagaagctgtgtttcttggacaaggtggagccccacgccaccattgcggagatcaagaacctcttcactaagacccatccgcagtggtaccccgcccgccagtccctccgcctggaccccaagggcaagtccctgaaggatgaggatgttctgcagaagctgcccgtgggcaccacggccacactgtacttccgggacctgggggcccagatcagctgggtgacggtcttcctaacagagtacgcggggccccttttcatctacctgctcttctacttccgagtgcccttcatctatggccacaaatatgactttacgtccagtcggcatacagtggtgcacctcgcctgcatctgtcactcattccactacatcaagcgcctgctggagacgctcttcgtgcaccgcttctcccatggcactatgcctttgcgcaacatcttcaagaactgcacctactactggggcttcgccgcgtggatggcctattacatcaatcaccctctctacactccccctaatctgccagctcggcaacttctccatccacatggccctgcgggacctgcggcccgctgggtccaagacgcggaagatcccataccccaccaagaaccccttcacgtggctcttcctgctggtgtcctgccccaactacacctacgaggtggggtcctggatcggtttcgccatcatgacgcagtgtctcccagtggccctgttctccctggtgggcttcacccagatgaccatctgggccaagggcaagcaccgcagctacctgaaggagttccgggactacccgcccctgcgcatgcccatcatccccttcctgctctgagcgctcacccctgctgaggctcagcccctcaacccggtggcattctgggggaggagtggggcccacagctctccagcacccggaataaagcccgcctgccccagtcgga

SEQ ID NO: 281434 - DNA, 1304 bp, Homo sapiens
  misc_feature (13)..(13): n is a, c, g, or t
aaaaaaaagaagntgtaccgtccgaatcccggatgggtgtactgtgccgcgcagttaggcagcagcagccgcggagcagtagccgccgtgggagggagccatgaagcattacgaggtggagattctggacgcaaagacaagggagaagctgtgtttcttggacaaggtggagccccacgccaccattgcggagatcaagaacctcttcactaagacccatccgcagtggtaccccgcccgccagtccctccgcctggaccccaagggcaagtccctgaaggatgaggatgttctgcagaagctgcccgtgggcaccacggccacactgtacttccgggacctgggggcccagatcagctgggtgacggtcttcctaacagagtacgcggggccccttttcatctacctgctcttctacttccgagtgcccttcatctatggccacaaatatgactttacgtccagtcggcatacagtggtgcagtaagtggggcaggtgggaggagggtaggggaaggcagaagacctgccggaccagccccagctgagcctgctccccccgaccagcctcgcctgcatctgtcactcattccactacatcaagcgcctgctggagacgctcttcgtgcaccgcttctcccatggcactatgcctttgcgcaacatcttcaagaactgcacctactactggggcttcgccgcgtggatggcctattacatcaatcaccctctctacactccccctacctacggagctcagcaggtgaaactggcgctcgccatctttgtgatctgccagctcggcaacttctccatccacatggccctgcgggacctgcggcccgctgggtgagtgcctaggtggctgggggcagggggacagctgggctgggtgagggggtctgactttctccttctgtcctgcctgccagggtccaagacgcggaagatcccataccccaccaagaaccccttcacgtggctcttcctgctggtgtcctgccccaactacacctacgaggtggggtcctggatcggtttcgccatcatgacgcagtgtctcccagtggccctgttctccctggtgggcttcacccagatgaccatctgggccaagggcaagcaccgcagctacctgaaggagttccgggactacccgcccctgcgcatgcccatcatccccttcctgctctgagcgctcacccctgctgaggctcagcccctcaacccggtggcattctgggggaggagtggggcccacagctctccagcacccggaataaagcccgcctgccccagtcgga

SEQ ID NO: 281435 - DNA, 505 bp, Homo sapiens
  misc_feature (13)..(13): n is a, c, g, or t
aaaaaaaagaagntgtaccgtccgaatcccggatgggtgtactgtgccgcgcagttaggcagcagcagccgcggagcagtagccgccgtgggagggagccatgaagcattacgaggtggagattctggacgcaaagacaagggagaagctgtgtttcttggacaaggtggagccccacgccaccattgcggagatcaagaacctcttcactaagacccatccgcagtggtaccccgcccgccagtccctccgcctggaccccaagggcaagtccctgaaggatgaggatgttctgcagaagctgcccgtgggcaccacggccacactgtacttccgggacctgggggcccagatcagctgggtgacggtcttcctaacagagtacgcggggccccttttcatctacctgctcttctcttgtatacaagagagagacgagatgatatcatttacgggggaaggcgctttgtgaagtagccttatttctcttgtcctttcatacagt

SEQ ID NO: 281436 - DNA, 3252 bp, Homo sapiens
gcacatggaagtgcctcggacctggagtactggatagggagcaggactggagattggacgatgaagggctcggtttgggacgcacggagtgtgaggcttctttgggtcaccacagcagaagtattctcctggaaaatattcagagggcagtggaatgaagcttggggcccgggaggcaggcatcggctcccagacaccagctgaagccaaggtgacagtgagagcgtcaccttccctggggagtaagtacagcatccacgtctggacacacgggtctttagatcgcagagtgagccacacattctctgctgcctggacaggccctcccaggctgtcaaggccattggccctggccaggtacccctgcagggctacagaccgctctggagtgttagatgagctatttgggaagaaatggcaaaagagatgtgaaggggaaacagatgaagaagagcaaagtgccaagaataagatctctaagttggtggaggaggtgaagtatttctcaaaattccacacaccccttgtgaagttgccatagagccacttccctctgcttttacaaaggctgttgagtctctatggcaattcctttacttcatccttcattcctttcttgcgtgagtagtgaaccgttgaagacacagctgtacccattgtgaaccacagagacagaatgcccatatcacaagcctctgggtttcgagtcaggggaggtcacaccggaccagatcacctgctctaacccggagcagtatgtgggctggtattcttcgtggactgcaaacaaggcccggctcaacagtcaaggctttgggtgtgcctggctctccaagttccaggacagtagccagtggttacagatagatctgaaggagatcaaagtgatttcagggatcctcacccaggggcgctgtgacatcgatgagtggatgaccaagtacagcgtgcagtacaggaccgatgagcgcctgaactggatttactacaaggaccagactggaaacaaccgggtcttctatggcaactcggaccgcacctccacggttcagaacctgctgcggccccccatcatctcccgcttcatccgcctcatcccgctgggctggcacgtccgcattgccatccggatggagctgctggagtgcgtcagcaagtgtgcctgatgcctgcctcagctcggcgcctgccagggggtgactggcacagagcgggccgtaggggaccccctcacacaccaccgagatggacagggctatatttcgcaaagcaattgtaactgcagtgctgggtagataatttttttttttttaagatatagctttctgatttcaatgaaataaaaatgaacttattccccactcagggccagagaaagtcagaacaaagaaaatgtccccgaaacgaattttcttacaaaagcctaagtagcaggggtaattttctgctcattttttgtctcagtgatactgtgaaaggtgcagtctcaggggaacacaaagcagccctgataatttgaaaattcatttgctttaccacattcaagatagaaacatacagtttcctaaagcctggctttgaatgcagaagggagcagctcctcctagttaagtttccactaaatcatcgccaaagaggacttcacagccctggggaggcagctgagggtctcaagggtgactgggtggcacggatgaatgcggtgggtgagaatcccggtgccctgagaggctatacgtgacaaatgaccaaaagcccaacgtaggggagtttcctctgctcacagttcttaccttcaaggcggatctgggcttccaccctcatgaacacagggattggggagggaccagagcgcccaatacacacagctccattatgcaatccattccagcaaattcccgtgtctgtggtcaccatttaggtgatcatacaggacaggctgcacatctcagtatatgtagggaccccaaatgaccacaacacagtacaattgccctttacctagggctaccatttcctagcaaaccaaacatagttcgagaacagctggcccaggagctaccactggctactcagaggaggctcattagctggctacatgcttcgcaggaagtgggaaggactcacatcataaaaaggaccatgtagctttttccctgaaagcttctcaccctccaccctctgccttgcaatacgcaaactgcgcctgctcctgaaaagctctctgggaaggaatgggcctggctttccgttcctggaggcggcgcttagattgggaggcctcattggcacttagagcgcacgctgagtttccaggccccttcctgggagaggctgttaacacgggggaggggcaggagagggatatggagagcaggtggtggaatcagaggacgaggctgctctaaagactgttctggccccagacacagggtagtctttgctagcagctcatttccgagttacttttcattttcaaatgccaaggcaagtgactagactcgcgctaatacagtgctggacaacacattcaccttttctgtgaacaggcagccttctaaaagccccaaacatccttcttgatgctttgggggctcaattattttatatccaaccccagcatctttctagtccctatgctgtatgcttgaacttcggaaaatgctttttccccgcccaatcttctcttcaaatataaacacatcacaacagggtgttgggggtggggggggggtggggggacttatccctggccttaggacacaggacaaatctattttggatagaaatgcctgaacagagacccttatttggaaaggtgaattaactttggtcacgacatggactgtcagacaaaatggcagtatcctaagagttaaggcacatcaaacacaggagtcgagagagtgcagttcagggaaaaaggagaggaggaaacagtgaggcagggagaaaggctttccaaataagagttcatgttggaaacttttgtcacggctttattgagattaagttcacatacaatttgtatccatttaaagtgtacaatttgatgacttttggtatattcagagttgtgcaaccattatcactagatcaattttagaaagtttatcaccccaaagagaaatcctgcacccatcagccaacactccccaacccatcggccaccccaagccctctgcaaccacgaatcgactgtctctgtagattggccttctggacgttctacataaatgaaatcatatagta

SEQ ID NO: 281437 - DNA, 2776 bp, Homo sapiens
gaggacgaggggaagatgtcacgcaagatagaaggctttttgttattacttctctttggctatgaagccacattgggattatcgtctaccgaggatgaaggcgaggacccctggtaccaaaaagcatgcaagtgcgattgccaaggaggacccaatgctctgtggtctgcaggtgccacctccttggactgtataccagaatgcccatatcacaagcctctgggtttcgagtcaggggaggtcacaccggaccagatcacctgctctaacccggagcagtatgtgggctggtattcttcgtggactgcaaacaaggcccggctcaacagtcaaggctttgggtgtgcctggctctccaagttccaggacagtagccagtggttacagatagatctgaaggagatcaaagtgatttcagggatcctcacccaggggcgctgtgacatcgatgagtggatgaccaagtacagcgtgcagtacaggaccgatgagcgcctgaactggatttactacaaggaccagactggaaacaaccgggtcttctatggcaactcggaccgcacctccacggttcagaacctgctgcggccccccatcatctcccgcttcatccgcctcatcccgctgggctggcacgtccgcattgccatccggatggagctgctggagtgcgtcagcaagtgtgcctgatgcctgcctcagctcggcgcctgccagggggtgactggcacagagcgggccgtaggggaccccctcacacaccaccgagatggacagggctatatttcgcaaagcaattgtaactgcagtgctgggtagataatttttttttttttaagatatagctttctgatttcaatgaaataaaaatgaacttattccccactcagggccagagaaagtcagaacaaagaaaatgtccccgaaacgaattttcttacaaaagcctaagtagcaggggtaattttctgctcattttttgtctcagtgatactgtgaaaggtgcagtctcaggggaacacaaagcagccctgataatttgaaaattcatttgctttaccacattcaagatagaaacatacagtttcctaaagcctggctttgaatgcagaagggagcagctcctcctagttaagtttccactaaatcatcgccaaagaggacttcacagccctggggaggcagctgagggtctcaagggtgactgggtggcacggatgaatgcggtgggtgagaatcccggtgccctgagaggctatacgtgacaaatgaccaaaagcccaacgtaggggagtttcctctgctcacagttcttaccttcaaggcggatctgggcttccaccctcatgaacacagggattggggagggaccagagcgcccaatacacacagctccattatgcaatccattccagcaaattcccgtgtctgtggtcaccatttaggtgatcatacaggacaggctgcacatctcagtatatgtagggaccccaaatgaccacaacacagtacaattgccctttacctagggctaccatttcctagcaaaccaaacatagttcgagaacagctggcccaggagctaccactggctactcagaggaggctcattagctggctacatgcttcgcaggaagtgggaaggactcacatcataaaaaggaccatgtagctttttccctgaaagcttctcaccctccaccctctgccttgcaatacgcaaactgcgcctgctcctgaaaagctctctgggaaggaatgggcctggctttccgttcctggaggcggcgcttagattgggaggcctcattggcacttagagcgcacgctgagtttccaggccccttcctgggagaggctgttaacacgggggaggggcaggagagggatatggagagcaggtggtggaatcagaggacgaggctgctctaaagactgttctggccccagacacagggtagtctttgctagcagctcatttccgagttacttttcattttcaaatgccaaggcaagtgactagactcgcgctaatacagtgctggacaacacattcaccttttctgtgaacaggcagccttctaaaagccccaaacatccttcttgatgctttgggggctcaattattttatatccaaccccagcatctttctagtccctatgctgtatgcttgaacttcggaaaatgctttttccccgcccaatcttctcttcaaatataaacacatcacaacagggtgttgggggtggggggggggtggggggacttatccctggccttaggacacaggacaaatctattttggatagaaatgcctgaacagagacccttatttggaaaggtgaattaactttggtcacgacatggactgtcagacaaaatggcagtatcctaagagttaaggcacatcaaacacaggagtcgagagagtgcagttcagggaaaaaggagaggaggaaacagtgaggcagggagaaaggctttccaaataagagttcatgttggaaacttttgtcacggctttattgagattaagttcacatacaatttgtatccatttaaagtgtacaatttgatgacttttggtatattcagagttgtgcaaccattatcactagatcaattttagaaagtttatcaccccaaagagaaatcctgcacccatcagccaacactccccaacccatcggccaccccaagccctctgcaaccacgaatcgactgtctctgtagattggccttctggacgttctacataaatgaaatcatatagta

SEQ ID NO: 281438 - DNA, 481 bp, Homo sapiens
tctggacacacgggtctttagatcgcagagtgagccacacattctctgctgcctggacaggccctcccaggctgtcaaggccattggccctggccaggtacccctgcagggctacagaccgctctggagtgttagatgagctatttgggaagaaatggcaaaagagatgtgaaggggaaacagatgaagaagagcaaagtgccaagaataaggtgactgggagaggtggcactggctttttcccttcccctctgcctactctctcagagctagtagccctgagcggggcggcggcggcgggtgggggtggaaaacaaaaaggaggttcagtcatcaaatgctcaaagtggaggggcctcagagacacccaaggttagaattttgcccatgaaaaatccctgccacctggccttgtgcccctccccctgatcgctcgggcttgtcttcccagctggaggggtgtcgcgggtgggggaggagc

SEQ ID NO: 281439 - DNA, 332 bp, Homo sapiens
agaagtgagatgtcttcctcttcacttgctccacatagagtgccactgtcccaaactaaccatgctttaactggagggctagagccagcaaaaatcaacataactgccaaagccccctctacagaatacaaccagagtcatataaaagcccttttacctgaagaaagtagaacggcaggcagagttaaaacggaaatttgaacagttgaaacaggagagaattagtcgatatcagggggtgaatctctacattaagaacttggatgacactattgatgatgagggtgtaaattgtattgaaaaagatcgcgaataaaaatcaacaaatgtga

SEQ ID NO: 281440 - DNA, 3099 bp, Homo sapiens
  misc_feature (13)..(13): n is a, c, g, or t
agcggctctctcngccccgggtcgctgccgcctccgccgctttcgggcttcgcagcctgaggaaaaaaagagaaaaagataaaaaaaatctgaaaacgcttcaaaatcctgaaaaaaaaaaaggaaaagaaaaaacgaatcctcggagaacccgcggggaagtcactttcgtacgcttccggcctgccccgcgcccgccgccgcagcgcttggcgtccgtcggtctccgtccgtcggtccgggggtgagccgcccgcccggcccgccgtgccctccccccgctcgggccccgagccccgcgccccgcgcctgccccggcgcaccacgtgtccgtgctgcccttcgccgcccgcccggggctcgccgagtcggcgcccacaaagatttggtttccctctgccccggcggttgtaatcttaaaccgccggagcccgaggcctatatttatagagaaacgcgtgtccccgaggccgccgtgggcagcgtccggtcgcctcttaaaggatttttacccttcggaaggggattccccgtttaatttttttcctactttgattttttgaaatttggagcttcgcaccaggaccgcggagaagtgcaaagtcgcggggagggccgtattgtgcggagagccttttgtctgcggtgctgcggccgtgggagccggcccccgcctcccgtttccgtcccgtctccaagcccgccgactccagctcgtcctcgccgcgccggtgccacctgtgagccgcggcgcgggcccgggctccgaaggcgcccctttgtcctgcggcgggcccgataagaagtcctcctggcggggctcggggtggtggggggcggggagatgaacgctgcggccagcagctaccccatggcctccctgtacgtgggcgacctgcattcggacgtcaccgaggccatgctgtacgaaaagttcagccccgcggggcctgtgctgtccatccgggtctgccgcgatatgatcacccgccgctccctgggctatgcctacgtcaacttccagcagccggccgacgctgagcgggctttggacaccatgaactttgatgtgattaagggaaagccaatccgcatcatgtggtctcagagggatccctctttgagaaaatctggtgtgggaaacgtcttcatcaagaacctggacaaatctatagataacaaggcactttatgatactttttctgcttttggaaacatactgtcctgcaaggtggtgtgtgatgagaacggctctaagggttatgcctttgtccacttcgagacccaagaggctgccgacaaggccatcgagaagatgaatggcatgctcctcaatgaccgcaaagtatttgtgggcagattcaagtctcgcaaagagcgggaagctgagcttggagccaaagccaaggaattcaccaatgtttatatcaaaaactttggggaagaggtggatgatgagagtctgaaagagctattcagtcagtttggtaagaccctaagtgtcaaggtgatgagagatcccaatgggaaatccaaaggctttggctttgtgagttacgaaaaacacgaggatgccaataaggctgtggaagagatgaatggaaaagaaataagtggtaaaatcatatttgtaggccgtgcacaaaagaaagtagaacggcaggcagagttaaaacggaaatttgaacagttgaaacaggagagaattagtcgatatcagggggtgaatctctacattaagaacttggatgacactattgatgatgagaaattaaggaaagaattttctccttttggatcaattaccagtgctaaggtaatgctggaggatggaagaagcaaagggtttggcttcgtctgcttctcatctcctgaagaagcaaccaaagcagtcactgagatgaatggacgcattgtgggctccaagccactatatgttgccctggcccagaggaaggaagagagaaaggctcacctgaccaaccagtatatgcaacgagtggctggaatgagagcacttcctgccaatgccatcttaaatcagttccagcctgcagcgggtggctactttgtgccagcagtcccacaggctcagggaaggcctccatattatacacctaaccagttagcacagatgaggcctaatccacgctggcagcaaggtgggagacctcaaggcttccaaggaatgccaagtgctatacgccagtctgggcctcgtccaactcttcgccatctggctccaactgggtctgagtgcccggaccgcttggctatggactttggtggggctggtgccgcccagcaagggctgactgacagctgccagtctggaggcgttcccacagctgtgcagaacttagcgccacgcgctgctgttgctgctgctgctccccgggctgttgccccctacaaatacgcctccagtgtccgcagccctcatcctgccatacagcctctgcaggcaccccagcctgcggtccatgtgcaggggcaggagccactgactgcctccatgctggctgcagcacccccccaggaacagaagcagatgctgggagaacgcttgttcccactcatccaaacaatgcattcaaatctggctgggaagatcacgggaatgctgctggagatagacaactctgagctgctgcacatgttagagtcccccgagtctctccgctccaaggtggatgaagctgtagcagttctacaggctcatcatgccaagaaagaagctgcccagaaggtgggcgctgttgctgctgctacctcttagacaaggaaaaaccgattcaaaagccaaataaccccttatggaattcaactcaaggtttgaagacttcctagcttgtcctatggacctcaacaccaaggattacaaattgcaaatttaataggtcattttgtatcaaaaggtcaattatgaagcacctagaatttttcaattatacgaatatgttctttgggttctgctgtggcccagacagtgttaactttttttttattgtgggttttgattttttcccccagaaattggttttatttgatgtacccaagtcttacgtttcccaataaagaaaaaaaatctccataaaa

SEQ ID NO: 281441 - DNA, 2829 bp, Homo sapiens
  misc_feature (13)..(13): n is a, c, g, or t
agcggctctctcngccccgggtcgctgccgcctccgccgctttcgggcttcgcagcctgaggaaaaaaagagaaaaagataaaaaaaatctgaaaacgcttcaaaatcctgaaaaaaaaaaaggaaaagaaaaaacgaatcctcggagaacccgcggggaagtcactttcgtacgcttccggcctgccccgcgcccgccgccgcagcgcttggcgtccgtcggtctccgtccgtcggtccggggaaatttggagcttcgcaccaggaccgcggagaagtgcaaagtcgcggggagggccgtattgtgcggagagccttttgtctgcggtgctgcggccgtgggagccggcccccgcctcccgtttccgtcccgtctccaagcccgccgactccagctcgtcctcgccgcgccggtgccacctgtgagccgcggcgcgggcccgggctccgaaggcgcccctttgtcctgcggcgggcccgataagaagtcctcctggcggggctcggggtggtggggggcggggagatgaacgctgcggccagcagctaccccatggcctccctgtacgtgggcgacctgcattcggacgtcaccgaggccatgctgtacgaaaagttcagccccgcggggcctgtgctgtccatccgggtctgccgcgatatgatcacccgccgctccctgggctatgcctacgtcaacttccagcagccggccgacgctgagcgggctttggacaccatgaactttgatgtgattaagggaaagccaatccgcatcatgtggtctcagagggatccctctttgagaaaatctggtgtgggaaacgtcttcatcaagaacctggacaaatctatagataacaaggcactttatgatactttttctgcttttggaaacatactgtcctgcaaggtggtgtgtgatgagaacggctctaagggttatgcctttgtccacttcgagacccaagaggctgccgacaaggccatcgagaagatgaatggcatgctcctcaatgaccgcaaagtatttgtgggcagattcaagtctcgcaaagagcgggaagctgagcttggagccaaagccaaggaattcaccaatgtttatatcaaaaactttggggaagaggtggatgatgagagtctgaaagagctattcagtcagtttggtaagaccctaagtgtcaaggtgatgagagatcccaatgggaaatccaaaggctttggctttgtgagttacgaaaaacacgaggatgccaataaggctgtggaagagatgaatggaaaagaaataagtggtaaaatcatatttgtaggccgtgcacaaaagaaagtagaacggcaggcagagttaaaacggaaatttgaacagttgaaacaggagagaattagtcgatatcagggggtgaatctctacattaagaacttggatgacactattgatgatgagaaattaaggaaagaattttctccttttggatcaattaccagtgctaaggtaatgctggaggatggaagaagcaaagggtttggcttcgtctgcttctcatctcctgaagaagcaaccaaagcagtcactgagatgaatggacgcattgtgggctccaagccactatatgttgccctggcccagaggaaggaagagagaaaggctcacctgaccaaccagtatatgcaacgagtggctggaatgagagcacttcctgccaatgccatcttaaatcagttccagcctgcagcgggtggctactttgtgccagcagtcccacaggctcagggaaggcctccatattatacacctaaccagttagcacagatgaggcctaatccacgctggcagcaaggtgggagacctcaaggcttccaaggaatgccaagtgctatacgccagtctgggcctcgtccaactcttcgccatctggctccaactggtaatgctccggcctctcgtggcctccctactaccactcagagagtcgggtctgagtgcccggaccgcttggctatggactttggtggggctggtgccgcccagcaagggctgactgacagctgccagtctggaggcgttcccacagctgtgcagaacttagcgccacgcgctgctgttgctgctgctgctccccgggctgttgccccctacaaatacgcctccagtgtccgcagccctcatcctgccatacagcctctgcaggcaccccagcctgcggtccatgtgcaggggcaggagccactgactgcctccatgctggctgcagcacccccccaggaacagaagcagatgctgggagaacgcttgttcccactcatccaaacaatgcattcaaatctggctgggaagatcacgggaatgctgctggagatagacaactctgagctgctgcacatgttagagtcccccgagtctctccgctccaaggtggatgaagctgtagcagttctacaggctcatcatgccaagaaagaagctgcccagaaggtgggcgctgttgctgctgctacctcttagacaaggaaaaaccgattcaaaagccaaataaccccttatggaattcaactcaaggtttgaagacttcctagcttgtcctatggacctcaacaccaaggattacaaattgcaaatttaataggtcattttgtatcaaaaggtcaattatgaagcacctagaatttttcaattatacgaatatgttctttgggttctgctgtggcccagacagtgttaactttttttttattgtgggttttgattttttcccccagaaattggttttatttgatgtacccaagtcttacgtttcccaataaagaaaaaaaatctccataaaa

SEQ ID NO: 281442 - DNA, 2360 bp, Homo sapiens
aatttattgacataaaggacagcgctgtggtgaattcagttcacgagggcgcggccagatagtgctgcggccagcagctaccccatggcctccctgtacgtgggcgacctgcattcggacgtcaccgaggccatgctgtacgaaaagttcagccccgcggggcctgtgctgtccatccgggtctgccgcgatatgatcacccgccgctccctgggctatgcctacgtcaacttccagcagccggccgacgctgagcgggctttggacaccatgaactttgatgtgattaagggaaagccaatccgcatcatgtggtctcagagggatccctctttgagaaaatctggtgtgggaaacgtcttcatcaagaacctggacaaatctatagataacaaggcactttatgatactttttctgcttttggaaacatactgtcctgcaaggtggtgtgtgatgagaacggctctaagggttatgcctttgtccacttcgagacccaagaggctgccgacaaggccatcgagaagatgaatggcatgctcctcaatgaccgcaaagtatttgtgggcagattcaagtctcgcaaagagcgggaagctgagcttggagccaaagccaaggaattcaccaatgtttatatcaaaaactttggggaagaggtggatgatgagagtctgaaagagctattcagtcagtttggtaagaccctaagtgtcaaggtgatgagagatcccaatgggaaatccaaaggctttggctttgtgagttacgaaaaacacgaggatgccaataaggctgtggaagagatgaatggaaaagaaataagtggtaaaatcatatttgtaggccgtgcacaaaagaaagtagaacggcaggcagagttaaaacggaaatttgaacagttgaaacaggagagaattagtcgatatcagggggtgaatctctacattaagaacttggatgacactattgatgatgagaaattaaggaaagaattttctccttttggatcaattaccagtgctaaggtaatgctggaggatggaagaagcaaagggtttggcttcgtctgcttctcatctcctgaagaagcaaccaaagcagtcactgagatgaatggacgcattgtgggctccaagccactatatgttgccctggcccagaggaaggaagagagaaaggctcacctgaccaaccagtatatgcaacgagtggctggaatgagagcacttcctgccaatgccatcttaaatcagttccagcctgcagcgggtggctactttgtgccagcagtcccacaggctcagggaaggcctccatattatacacctaaccagttagcacagatgaggcctaatccacgctggcagcaaggtgggagacctcaaggcttccaaggaatgccaagtgctatacgccagtctgggcctcgtccaactcttcgccatctggctccaactggtaatgctccggcctctcgtggcctccctactaccactcagagagtcgggtctgagtgcccggaccgcttggctatggactttggtggggctggtgccgcccagcaagggctgactgacagctgccagtctggaggcgttcccacagctgtgcagaacttagcgccacgcgctgctgttgctgctgctgctccccgggctgttgccccctacaaatacgcctccagtgtccgcagccctcatcctgccatacagcctctgcaggcaccccagcctgcggtccatgtgcaggggcaggagccactgactgcctccatgctggctgcagcacccccccaggaacagaagcagatgctgggagaacgcttgttcccactcatccaaacaatgcattcaaatctggctgggaagatcacgggaatgctgctggagatagacaactctgagctgctgcacatgttagagtcccccgagtctctccgctccaaggtggatgaagctgtagcagttctacaggctcatcatgccaagaaagaagctgcccagaaggtgggcgctgttgctgctgctacctcttagacaaggaaaaaccgattcaaaagccaaataaccccttatggaattcaactcaaggtttgaagacttcctagcttgtcctatggacctcaacaccaaggattacaaattgcaaatttaataggtcattttgtatcaaaaggtcaattatgaagcacctagaatttttcaattatacgaatatgttctttgggttctgctgtggcccagacagtgttaactttttttttattgtgggttttgattttttcccccagaaattggttttatttgatgtacccaagtcttacgtttcccaataaagaaaaaaaatctccataaaa

SEQ ID NO: 281443 - DNA, 3060 bp, Homo sapiens
  misc_feature (13)..(13): n is a, c, g, or t
agcggctctctcngccccgggtcgctgccgcctccgccgctttcgggcttcgcagcctgaggaaaaaaagagaaaaagataaaaaaaatctgaaaacgcttcaaaatcctgaaaaaaaaaaaggaaaagaaaaaacgaatcctcggagaacccgcggggaagtcactttcgtacgcttccggcctgccccgcgcccgccgccgcagcgcttggcgtccgtcggtctccgtccgtcggtccgggggtgagccgcccgcccggcccgccgtgccctccccccgctcgggccccgagccccgcgccccgcgcctgccccggcgcaccacgtgtccgtgctgcccttcgccgcccgcccggggctcgccgagtcggcgcccacaaagatttggtttccctctgccccggcggttgtaatcttaaaccgccggagcccgaggcctatatttatagagaaacgcgtgtccccgaggccgccgtgggcagcgtccggtcgcctcttaaaggatttttacccttcggaaggggattccccgtttaatttttttcctactttgattttttgaaatttggagcttcgcaccaggaccgcggagaagtgcaaagtcgcggggagggccgtattgtgcggagagccttttgtctgcggtgctgcggccgtgggagccggcccccgcctcccgtttccgtcccgtctccaagcccgccgactccagctcgtcctcgccgcgccggtgccacctgtgagccgcggcgcgggcccgggctccgaaggcgcccctttgtcctgcggcgggcccgataagaagtcctcctggcggggctcggggtggtggggggcggggagatgaacgctgcggccagcagctaccccatggcctccctgtacgtgggcgacctgcattcggacgtcaccgaggccatgctgtacgaaaagttcagccccgcggggcctgtgctgtccatccgggtctgccgcgatatgatcacccgccgctccctgggctatgcctacgtcaacttccagcagccggccgacgctgagcgggctttggacaccatgaactttgatgtgattaagggaaagccaatccgcatcatgtggtctcagagggatccctctttgagaaaatctggtgtgggaaacgtcttcatcaagaacctggacaaatctatagataacaaggcactttatgatactttttctgcttttggaaacatactgtcctgcaaggtggtgtgtgatgagaacggctctaagggttatgcctttgtccacttcgagacccaagaggctgccgacaaggccatcgagaagatgaatggcatgctcctcaatgaccgcaaagtatttgtgggcagattcaagtctcgcaaagagcgggaagctgagcttggagccaaagccaaggaattcaccaatgtttatatcaaaaactttggggaagaggtggatgatgagagtctgaaagagctattcagtcagtttggtaagaccctaagtgtcaaggtgatgagagatcccaatgggaaatccaaaggctttggctttgtgagttacgaaaaacacgaggatgccaataaggctgtggaagagatgaatggaaaagaaataagtggtaaaatcatatttgtaggccgtgcacaaaagaaagtagaacggcaggcagagttaaaacggaaatttgaacagttgaaacaggagagaattagtcgatatcagggggtgaatctctacattaagaacttggatgacactattgatgatgagaaattaaggaaagaattttctccttttggatcaattaccagtgctaaggtaatgctggaggatggaagaagcaaagggtttggcttcgtctgcttctcatctcctgaagaagcaaccaaagcagtcactgagatgaatggacgcattgtgggctccaagccactatatgttgccctggcccagaggaaggaagagagaaaggctcacctgaccaaccagtatatgcaacgagtggctggaatgagagcacttcctgccaatgccatcttaaatcagttccagcctgcagcgggtggctactttgtgccagcagtcccacaggctcagggaaggcctccatattatacacctaaccagttagcacagatgaggcctaatccacgctggcagcaaggtgggagacctcaaggcttccaaggaatgccaagtgctatacgccagtctgggcctcgtccaactcttcgccatctggctccaactggtaatgctccggcctctcgtggcctccctactaccactcagagagtcggcgttcccacagctgtgcagaacttagcgccacgcgctgctgttgctgctgctgctccccgggctgttgccccctacaaatacgcctccagtgtccgcagccctcatcctgccatacagcctctgcaggcaccccagcctgcggtccatgtgcaggggcaggagccactgactgcctccatgctggctgcagcacccccccaggaacagaagcagatgctgggagaacgcttgttcccactcatccaaacaatgcattcaaatctggctgggaagatcacgggaatgctgctggagatagacaactctgagctgctgcacatgttagagtcccccgagtctctccgctccaaggtggatgaagctgtagcagttctacaggctcatcatgccaagaaagaagctgcccagaaggtgggcgctgttgctgctgctacctcttagacaaggaaaaaccgattcaaaagccaaataaccccttatggaattcaactcaaggtttgaagacttcctagcttgtcctatggacctcaacaccaaggattacaaattgcaaatttaataggtcattttgtatcaaaaggtcaattatgaagcacctagaatttttcaattatacgaatatgttctttgggttctgctgtggcccagacagtgttaactttttttttattgtgggttttgattttttcccccagaaattggttttatttgatgtacccaagtcttacgtttcccaataaagaaaaaaaatctccataaaa

SEQ ID NO: 281444 - DNA, 4296 bp, Homo sapiens
  misc_feature (13)..(13): n is a, c, g, or t
agcggctctctcngccccgggtcgctgccgcctccgccgctttcgggcttcgcagcctgaggaaaaaaagagaaaaagataaaaaaaatctgaaaacgcttcaaaatcctgaaaaaaaaaaaggaaaagaaaaaacgaatcctcggagaacccgcggggaagtcactttcgtacgcttccggcctgccccgcgcccgccgccgcagcgcttggcgtccgtcggtctccgtccgtcggtccgggggtgagccgcccgcccggcccgccgtgccctccccccgctcgggccccgagccccgcgccccgcgcctgccccggcgcaccacgtgtccgtgctgcccttcgccgcccgcccggggctcgccgagtcggcgcccacaaagatttggtttccctctgccccggcggttgtaatcttaaaccgccggagcccgaggcctatatttatagagaaacgcgtgtccccgaggccgccgtgggcagcgtccggtcgcctcttaaaggatttttacccttcggaaggggattccccgtttaatttttttcctactttgattttttgaaatttggagcttcgcaccaggaccgcggagaagtgcaaagtcgcggggagggccgtattgtgcggagagccttttgtctgcggtgctgcggccgtgggagccggcccccgcctcccgtttccgtcccgtctccaagcccgccgactccagctcgtcctcgccgcgccggtgccacctgtgagccgcggcgcgggcccgggctccgaaggcgcccctttgtcctgcggcgggcccgataagaagtcctcctggcggggctcggggtggtggggggcggggagatgaacgctgcggccagcagctaccccatggcctccctgtacgtgggcgacctgcattcggacgtcaccgaggccatgctgtacgaaaagttcagccccgcggggcctgtgctgtccatccgggtctgccgcgatatgatcacccgccgctccctgggctatgcctacgtcaacttccagcagccggccgacgctgagcgggctttggacaccatgaactttgatgtgattaagggaaagccaatccgcatcatgtggtctcagagggatccctctttgagaaaatctggtgtgggaaacgtcttcatcaagaacctggacaaatctatagataacaaggcactttatgatactttttctgcttttggaaacatactgtcctgcaaggtggtgtgtgatgagaacggctctaagggttatgcctttgtccacttcgagacccaagaggctgccgacaaggccatcgagaagatgaatggcatgctcctcaatgaccgcaaagtatttgtgggcagattcaagtctcgcaaagagcgggaagctgagcttggagccaaagccaaggaattcaccaatgtttatatcaaaaactttggggaagaggtggatgatgagagtctgaaagagctattcagtcagtttggtaagaccctaagtgtcaaggtgatgagagatcccaatgggaaatccaaaggctttggctttgtgagttacgaaaaacacgaggatgccaataaggctgtggaagagatgaatggaaaagaaataagtggtaaaatcatatttgtaggccgtgcacaaaagaaagtagaacggcaggcagagttaaaacggaaatttgaacagttgaaacaggagagaattagtcgatatcagggggtgaatctctacattaagaacttggatgacactattgatgatgagaaattaaggaaagaattttctccttttggatcaattaccagtgctaaggtaatgctggaggatggaagaagcaaagggtttggcttcgtctgcttctcatctcctgaagaagcaaccaaagcagtcactgagatgaatggacgcattgtgggctccaagccactatatgttgccctggcccagaggaaggaagagagaaaggctcacctgaccaaccagtatatgcaacgagtggctggaatgagagcacttcctgccaatgccatcttaaatcagttccagcctgcagcgggtggctactttgtgccagcagtcccacaggctcagggaaggcctccatattatacacctaaccagttagcacagatgaggcctaatccacgctggcagcaaggtgggagacctcaaggcttccaaggaatgccaagtgctatacgccagtctgggcctcgtccaactcttcgccatctggctccaactgggtctgagtgcccggaccgcttggctatggactttggtggggctggtgccgcccagcaagggctgactgacagctgccagtctggaggcgttcccacagctgtgcagaacttagcgccacgcgctgctgttgctgctgctgctccccgggctgttgccccctacaaatacgcctccagtgtccgcagccctcatcctgccatacagcctctgcaggtgaggttcaccagacagaatgcttaaaaggatttcccccatttccacttgatgtaaaagaagctgtgcttttgattccttcaacaggtattaaatgcctgctctgtgttatgacgctatgttctgattcactgtccctgcccttcaggggctcactagtgggaaagaaggggcttaaaagtgctctgcctgatgccagttcactcagaaatgcctcagagcgggcagccagtgcttcctcttctgtttgtacgaaataatgtgctcattcagctgtttgagcctccaggtcacttccgcatccaatgacctattggatccttggctgctctgcaagatgattggtacattaatgcaggaaataacttcaacttacagatcggatgttcagcttcaaagatgtaaagtgtgtgtaggaggtgaaggggttgaacctagagcttagattttctaagctgtaacttgctgtctctagacctgtgctctagatgcaactagtttgtttcagagcctaatagcaatttgctgtggaggtgtcaccctaagccttcaggcccataagctgcttaggagattactctttaactgtcctgtctcatactctctaagttggggatttcctagaacttgatgctatgtaaaataccttttctttgcaaggctttgactagcattgacgttgcatgttgaccgtttttaagcatttgatacaaaaacatttggtagaattaaggtgatgtggaatgtaattataaatgtgttgatatttactccctttgatccaatctgcactgagatttaccctaaaggaaaactaattttcaggaaaaggttatatacaagtgtttacccttatttatatcaaggcttttcattcttgagtaactttgggtgtattaaggaaatgtcagaaaatgcttgcctagcactataggtttgttttattatttacgtttcacttcgctttctgatagcatgccattttcattgtaattggttgtgtttatgtccataccactctgttcctcaacacacccctcaatccttcaaggactgaaattagttcctttagagcaaggacagccacctcctctcctctttcacatagtcagatgttcagatattgaacaggcactcaaccaccatcaggtgttgtcctttcctcagtgctaacccactgcctttcctggttcccaggcaccccagcctgcggtccatgtgcaggggcaggagccactgactgcctccatgctggctgcagcacccccccaggaacagaagcagatgctgggagaacgcttgttcccactcatccaaacaatgcattcaaatctggctgggaagatcacgggaatgctgctggagatagacaactctgagctgctgcacatgttagagtcccccgagtctctccgctccaaggtggatgaagctgtagcagttctacaggctcatcatgccaagaaagaagctgcccagaaggtgggcgctgttgctgctgctacctcttagacaaggaaaaaccgattcaaaagccaaataaccccttatggaattcaactcaaggtttgaagacttcctagcttgtcctatggacctcaacaccaaggattacaaattgcaaatttaataggtcattttgtatcaaaaggtcaattatgaagcacctagaatttttcaattatacgaatatgttctttgggttctgctgtggcccagacagtgttaactttttttttattgtgggttttgattttttcccccagaaattggttttatttgatgtacccaagtcttacgtttcccaataaagaaaaaaaatctccataaaa

SEQ ID NO: 281445 - DNA, 3012 bp, Homo sapiens
  misc_feature (13)..(13): n is a, c, g, or t
agcggctctctcngccccgggtcgctgccgcctccgccgctttcgggcttcgcagcctgaggaaaaaaagagaaaaagataaaaaaaatctgaaaacgcttcaaaatcctgaaaaaaaaaaaggaaaagaaaaaacgaatcctcggagaacccgcggggaagtcactttcgtacgcttccggcctgccccgcgcccgccgccgcagcgcttggcgtccgtcggtctccgtccgtcggtccgggggtgagccgcccgcccggcccgccgtgccctccccccgctcgggccccgagccccgcgccccgcgcctgccccggcgcaccacgtgtccgtgctgcccttcgccgcccgcccggggctcgccgagtcggcgcccacaaagatttggtttccctctgccccggcggttgtaatcttaaaccgccggagcccgaggcctatatttatagagaaacgcgtgtccccgaggccgccgtgggcagcgtccggtcgcctcttaaaggatttttacccttcggaaggggattccccgtttaatttttttcctactttgattttttgaaatttggagcttcgcaccaggaccgcggagaagtgcaaagtcgcggggagggccgtattgtgcggagagccttttgtctgcggtgctgcggccgtgggagccggcccccgcctcccgtttccgtcccgtctccaagcccgccgactccagctcgtcctcgccgcgccggtgccacctgtgagccgcggcgcgggcccgggctccgaaggcgcccctttgtcctgcggcgggcccgataagaagtcctcctggcggggctcggggtggtggggggcggggagatgaacgctgcggccagcagctaccccatggcctccctgtacgtgggcgacctgcattcggacgtcaccgaggccatgctgtacgaaaagttcagccccgcggggcctgtgctgtccatccgggtctgccgcgatatgatcacccgccgctccctgggctatgcctacgtcaacttccagcagccggccgacgctgagcgggctttggacaccatgaactttgatgtgattaagggaaagccaatccgcatcatgtggtctcagagggatccctctttgagaaaatctggtgtgggaaacgtcttcatcaagaacctggacaaatctatagataacaaggcactttatgatactttttctgcttttggaaacatactgtcctgcaaggtggtgtgtgatgagaacggctctaagggttatgcctttgtccacttcgagacccaagaggctgccgacaaggccatcgagaagatgaatggcatgctcctcaatgaccgcaaagtatttgtgggcagattcaagtctcgcaaagagcgggaagctgagcttggagccaaagccaaggaattcaccaatgtttatatcaaaaactttggggaagaggtggatgatgagagtctgaaagagctattcagtcagtttggtaagaccctaagtgtcaaggtgatgagagatcccaatgggaaatccaaaggctttggctttgtgagttacgaaaaacacgaggatgccaataaggctgtggaagagatgaatggaaaagaaataagtggtaaaatcatatttgtaggccgtgcacaaaagaaagtagaacggcaggcagagttaaaacggaaatttgaacagttgaaacaggagagaattagtcgatatcagggggtgaatctctacattaagaacttggatgacactattgatgatgagaaattaaggaaagaattttctccttttggatcaattaccagtgctaaggtaatgctggaggatggaagaagcaaagggtttggcttcgtctgcttctcatctcctgaagaagcaaccaaagcagtcactgagatgaatggacgcattgtgggctccaagccactatatgttgccctggcccagaggaaggaagagagaaaggctcacctgaccaaccagtatatgcaacgagtggctggaatgagagcacttcctgccaatgccatcttaaatcagttccagcctgcagcgggtggctactttgtgccagcagtcccacaggctcagggaaggcctccatattatacacctaaccagttagcacagatgaggcctaatccacgctggcagcaaggtgggagacctcaaggcttccaaggaatgccaagtgctatacgccagtctgggcctcgtccaactcttcgccatctggctccaactggcgttcccacagctgtgcagaacttagcgccacgcgctgctgttgctgctgctgctccccgggctgttgccccctacaaatacgcctccagtgtccgcagccctcatcctgccatacagcctctgcaggcaccccagcctgcggtccatgtgcaggggcaggagccactgactgcctccatgctggctgcagcacccccccaggaacagaagcagatgctgggagaacgcttgttcccactcatccaaacaatgcattcaaatctggctgggaagatcacgggaatgctgctggagatagacaactctgagctgctgcacatgttagagtcccccgagtctctccgctccaaggtggatgaagctgtagcagttctacaggctcatcatgccaagaaagaagctgcccagaaggtgggcgctgttgctgctgctacctcttagacaaggaaaaaccgattcaaaagccaaataaccccttatggaattcaactcaaggtttgaagacttcctagcttgtcctatggacctcaacaccaaggattacaaattgcaaatttaataggtcattttgtatcaaaaggtcaattatgaagcacctagaatttttcaattatacgaatatgttctttgggttctgctgtggcccagacagtgttaactttttttttattgtgggttttgattttttcccccagaaattggttttatttgatgtacccaagtcttacgtttcccaataaagaaaaaaaatctccataaaa

SEQ ID NO: 281446 - DNA, 3093 bp, Homo sapiens
  misc_feature (13)..(13): n is a, c, g, or t
agcggctctctcngccccgggtcgctgccgcctccgccgctttcgggcttcgcagcctgaggaaaaaaagagaaaaagataaaaaaaatctgaaaacgcttcaaaatcctgaaaaaaaaaaaggaaaagaaaaaacgaatcctcggagaacccgcggggaagtcactttcgtacgcttccggcctgccccgcgcccgccgccgcagcgcttggcgtccgtcggtctccgtccgtcggtccgggggtgagccgcccgcccggcccgccgtgccctccccccgctcgggccccgagccccgcgccccgcgcctgccccggcgcaccacgtgtccgtgctgcccttcgccgcccgcccggggctcgccgagtcggcgcccacaaagatttggtttccctctgccccggcggttgtaatcttaaaccgccggagcccgaggcctatatttatagagaaacgcgtgtccccgaggccgccgtgggcagcgtccggtcgcctcttaaaggatttttacccttcggaaggggattccccgtttaatttttttcctactttgattttttgaaatttggagcttcgcaccaggaccgcggagaagtgcaaagtcgcggggagggccgtattgtgcggagagccttttgtctgcggtgctgcggccgtgggagccggcccccgcctcccgtttccgtcccgtctccaagcccgccgactccagctcgtcctcgccgcgccggtgccacctgtgagccgcggcgcgggcccgggctccgaaggcgcccctttgtcctgcggcgggcccgataagaagtcctcctggcggggctcggggtggtggggggcggggagatgaacgctgcggccagcagctaccccatggcctccctgtacgtgggcgacctgcattcggacgtcaccgaggccatgctgtacgaaaaccgccgctccctgggctatgcctacgtcaacttccagcagccggccgacgctgagcgggctttggacaccatgaactttgatgtgattaagggaaagccaatccgcatcatgtggtctcagagggatccctctttgagaaaatctggtgtgggaaacgtcttcatcaagaacctggacaaatctatagataacaaggcactttatgatactttttctgcttttggaaacatactgtcctgcaaggtggtgtgtgatgagaacggctctaagggttatgcctttgtccacttcgagacccaagaggctgccgacaaggccatcgagaagatgaatggcatgctcctcaatgaccgcaaagtatttgtgggcagattcaagtctcgcaaagagcgggaagctgagcttggagccaaagccaaggaattcaccaatgtttatatcaaaaactttggggaagaggtggatgatgagagtctgaaagagctattcagtcagtttggtaagaccctaagtgtcaaggtgatgagagatcccaatgggaaatccaaaggctttggctttgtgagttacgaaaaacacgaggatgccaataaggctgtggaagagatgaatggaaaagaaataagtggtaaaatcatatttgtaggccgtgcacaaaagaaagtagaacggcaggcagagttaaaacggaaatttgaacagttgaaacaggagagaattagtcgatatcagggggtgaatctctacattaagaacttggatgacactattgatgatgagaaattaaggaaagaattttctccttttggatcaattaccagtgctaaggtaatgctggaggatggaagaagcaaagggtttggcttcgtctgcttctcatctcctgaagaagcaaccaaagcagtcactgagatgaatggacgcattgtgggctccaagccactatatgttgccctggcccagaggaaggaagagagaaaggctcacctgaccaaccagtatatgcaacgagtggctggaatgagagcacttcctgccaatgccatcttaaatcagttccagcctgcagcgggtggctactttgtgccagcagtcccacaggctcagggaaggcctccatattatacacctaaccagttagcacagatgaggcctaatccacgctggcagcaaggtgggagacctcaaggcttccaaggaatgccaagtgctatacgccagtctgggcctcgtccaactcttcgccatctggctccaactggtaatgctccggcctctcgtggcctccctactaccactcagagagtcgggtctgagtgcccggaccgcttggctatggactttggtggggctggtgccgcccagcaagggctgactgacagctgccagtctggaggcgttcccacagctgtgcagaacttagcgccacgcgctgctgttgctgctgctgctccccgggctgttgccccctacaaatacgcctccagtgtccgcagccctcatcctgccatacagcctctgcaggcaccccagcctgcggtccatgtgcaggggcaggagccactgactgcctccatgctggctgcagcacccccccaggaacagaagcagatgctgggagaacgcttgttcccactcatccaaacaatgcattcaaatctggctgggaagatcacgggaatgctgctggagatagacaactctgagctgctgcacatgttagagtcccccgagtctctccgctccaaggtggatgaagctgtagcagttctacaggctcatcatgccaagaaagaagctgcccagaaggtgggcgctgttgctgctgctacctcttagacaaggaaaaaccgattcaaaagccaaataaccccttatggaattcaactcaaggtttgaagacttcctagcttgtcctatggacctcaacaccaaggattacaaattgcaaatttaataggtcattttgtatcaaaaggtcaattatgaagcacctagaatttttcaattatacgaatatgttctttgggttctgctgtggcccagacagtgttaactttttttttattgtgggttttgattttttcccccagaaattggttttatttgatgtacccaagtcttacgtttcccaataaagaaaaaaaatctccataaaa

SEQ ID NO: 281447 - DNA, 1975 bp, Homo sapiens
taggtacgaggccctgggggtgactttttctgctttggaaaccatactgttcctgcaaggtggtgtgtgatgagaacggctctaagggttatgcctttgtccacttcgagacccaagaggctgccgacaaggccatcgagaagatgaatggcatgctcctcaatgaccgcaaagtatttgtgggcagattcaagtctcgcaaagagcgggaagctgagcttggagccaaagccaaggaattcaccaatgtttatatcaaaaactttggggaagaggtggatgatgagagtctgaaagagctattcagtcagtttggtaagaccctaagtgtcaaggtgatgagagatcccaatgggaaatccaaaggctttggctttgtgagttacgaaaaacacgaggatgccaataaggctgtggaagagatgaatggaaaagaaataagtggtaaaatcatatttgtaggccgtgcacaaaagaaagtagaacggcaggcagagttaaaacggaaatttgaacagttgaaacaggagagaattagtcgatatcagggggtgaatctctacattaagaacttggatgacactattgatgatgagaaattaaggaaagaattttctccttttggatcaattaccagtgctaaggtaatgctggaggatggaagaagcaaagggtttggcttcgtctgcttctcatctcctgaagaagcaaccaaagcagtcactgagatgaatggacgcattgtgggctccaagccactatatgttgccctggcccagaggaaggaagagagaaaggctcacctgaccaaccagtatatgcaacgagtggctggaatgagagcacttcctgccaatgccatcttaaatcagttccagcctgcagcgggtggctactttgtgccagcagtcccacaggctcagggaaggcctccatattatacacctaaccagttagcacagatgaggcctaatccacgctggcagcaaggtgggagacctcaaggcttccaaggaatgccaagtgctatacgccagtctgggcctcgtccaactcttcgccatctggctccaactggtaatgctccggcctctcgtggcctccctactaccactcagagagtcgggtctgagtgcccggaccgcttggctatggactttggtggggctggtgccgcccagcaagggctgactgacagctgccagtctggaggcgttcccacagctgtgcagaacttagcgccacgcgctgctgttgctgctgctgctccccgggctgttgccccctacaaatacgcctccagtgtccgcagccctcatcctgccatacagcctctgcaggcaccccagcctgcggtccatgtgcaggggcaggagccactgactgcctccatgctggctgcagcacccccccaggaacagaagcagatgctgggagaacgcttgttcccactcatccaaacaatgcattcaaatctggctgggaagatcacgggaatgctgctggagatagacaactctgagctgctgcacatgttagagtcccccgagtctctccgctccaaggtggatgaagctgtagcagttctacaggctcatcatgccaagaaagaagctgcccagaaggtgggcgctgttgctgctgctacctcttagacaaggaaaaaccgattcaaaagccaaataaccccttatggaattcaactcaaggtttgaagacttcctagcttgtcctatggacctcaacaccaaggattacaaattgcaaatttaataggtcattttgtatcaaaaggtcaattatgaagcacctagaatttttcaattatacgaatatgttctttgggttctgctgtggcccagacagtgttaactttttttttattgtgggttttgattttttcccccagaaattggttttatttgatgtacccaagtcttacgtttcccaataaagaaaaaaaatctccataaaa

SEQ ID NO: 281448 - DNA, 3170 bp, Homo sapiens
  misc_feature (13)..(13): n is a, c, g, or t
  misc_feature (1862)..(1862): n is a, c, g, or t
agcggctctctcngccccgggtcgctgccgcctccgccgctttcgggcttcgcagcctgaggaaaaaaagagaaaaagataaaaaaaatctgaaaacgcttcaaaatcctgaaaaaaaaaaaggaaaagaaaaaacgaatcctcggagaacccgcggggaagtcactttcgtacgcttccggcctgccccgcgcccgccgccgcagcgcttggcgtccgtcggtctccgtccgtcggtccgggggtgagccgcccgcccggcccgccgtgccctccccccgctcgggccccgagccccgcgccccgcgcctgccccggcgcaccacgtgtccgtgctgcccttcgccgcccgcccggggctcgccgagtcggcgcccacaaagatttggtttccctctgccccggcggttgtaatcttaaaccgccggagcccgaggcctatatttatagagaaacgcgtgtccccgaggccgccgtgggcagcgtccggtcgcctcttaaaggatttttacccttcggaaggggattccccgtttaatttttttcctactttgattttttgaaatttggagcttcgcaccaggaccgcggagaagtgcaaagtcgcggggagggccgtattgtgcggagagccttttgtctgcggtgctgcggccgtgggagccggcccccgcctcccgtttccgtcccgtctccaagcccgccgactccagctcgtcctcgccgcgccggtgccacctgtgagccgcggcgcgggcccgggctccgaaggcgcccctttgtcctgcggcgggcccgataagaagtcctcctggcggggctcggggtggtggggggcggggagatgaacgctgcggccagcagctaccccatggcctccctgtacgtgggcgacctgcattcggacgtcaccgaggccatgctgtacgaaaagttcagccccgcggggcctgtgctgtccatccgggtctgccgcgatatgatcacccgccgctccctgggctatgcctacgtcaacttccagcagccggccgacgctgagcgggctttggacaccatgaactttgatgtgattaagggaaagccaatccgcatcatgtggtctcagagggatccctctttgagaaaatctggtgtgggaaacgtcttcatcaagaacctggacaaatctatagataacaaggcactttatgatactttttctgcttttggaaacatactgtcctgcaaggtggtgtgtgatgagaacggctctaagggttatgcctttgtccacttcgagacccaagaggctgccgacaaggccatcgagaagatgaatggcatgctcctcaatgaccgcaaagtatttgtgggcagattcaagtctcgcaaagagcgggaagctgagcttggagccaaagccaaggaattcaccaatgtttatatcaaaaactttggggaagaggtggatgatgagagtctgaaagagctattcagtcagtttggtaagaccctaagtgtcaaggtgatgagagatcccaatgggaaatccaaaggctttggctttgtgagttacgaaaaacacgaggatgccaataaggctgtggaagagatgaatggaaaagaaataagtggtaaaatcatatttgtaggccgtgcacaaaagaaagtagaacggcaggcagagttaaaacggaaatttgaacagttgaaacaggagagaattagtcgatatcagggggtgaatctctacattaagaacttggatgacactattgatgatgagaaattaaggaaagaattttctccttttggatcaattaccagtgctaagaatgctggacggagtggtaacgtaaggcacacaggggttttggacnttctgttcttgcatgtcatccattcatctctagaagcaagctaacgctagagatgcaagtacaactgacgatgacatggacagcattagtgggcatccgagagcgcatcgtactattgtagcaccatggggctccaagaggcaacgggaagaagagaagaggctcgaccgtgtacacaaatccgacgtataatgcgaactgagttggcctcggacaatgaggagcacttcctgccaatgccatcttaaatcagttccagcctgcagcgggtggctactttgtgccagcagtcccacaggctcagggaaggcctccatattatacacctaaccagttagcacagatgaggcctaatccacgctggcagcaaggtgggagacctcaaggcttccaaggaatgccaagtgctatacgccagtctgggcctcgtccaactcttcgccatctggctccaactgggtctgagtgcccggaccgcttggctatggactttggtggggctggtgccgcccagcaagggctgactgacagctgccagtctggaggcgttcccacagctgtgcagaacttagcgccacgcgctgctgttgctgctgctgctccccgggctgttgccccctacaaatacgcctccagtgtccgcagccctcatcctgccatacagcctctgcaggcaccccagcctgcggtccatgtgcaggggcaggagccactgactgcctccatgctggctgcagcacccccccaggaacagaagcagatgctgggagaacgcttgttcccactcatccaaacaatgcattcaaatctggctgggaagatcacgggaatgctgctggagatagacaactctgagctgctgcacatgttagagtcccccgagtctctccgctccaaggtggatgaagctgtagcagttctacaggctcatcatgccaagaaagaagctgcccagaaggtgggcgctgttgctgctgctacctcttagacaaggaaaaaccgattcaaaagccaaataaccccttatggaattcaactcaaggtttgaagacttcctagcttgtcctatggacctcaacaccaaggattacaaattgcaaatttaataggtcattttgtatcaaaaggtcaattatgaagcacctagaatttttcaattatacgaatatgttctttgggttctgctgtggcccagacagtgttaactttttttttattgtgggttttgattttttcccccagaaattggttttatttgatgtacccaagtcttacgtttcccaataaagaaaaaaaatctccataaaa

SEQ ID NO: 281449 - DNA, 1825 bp, Homo sapiens
atgatgctgtggtactgccaggggacagtgttgtgtctgtggagcctgggctgctgcgggaagctgagcttggagccaaagccaaggaattcaccaatgtttatatcaaaaactttggggaagaggtggatgatgagagtctgaaagagctattcagtcagtttggtaagaccctaagtgtcaaggtgatgagagatcccaatgggaaatccaaaggctttggctttgtgagttacgaaaaacacgaggatgccaataaggctgtggaagagatgaatggaaaagaaataagtggtaaaatcatatttgtaggccgtgcacaaaagaaagtagaacggcaggcagagttaaaacggaaatttgaacagttgaaacaggagagaattagtcgatatcagggggtgaatctctacattaagaacttggatgacactattgatgatgagaaattaaggaaagaattttctccttttggatcaattaccagtgctaaggtaatgctggaggatggaagaagcaaagggtttggcttcgtctgcttctcatctcctgaagaagcaaccaaagcagtcactgagatgaatggacgcattgtgggctccaagccactatatgttgccctggcccagaggaaggaagagagaaaggctcacctgaccaaccagtatatgcaacgagtggctggaatgagagcacttcctgccaatgccatcttaaatcagttccagcctgcagcgggtggctactttgtgccagcagtcccacaggctcagggaaggcctccatattatacacctaaccagttagcacagatgaggcctaatccacgctggcagcaaggtgggagacctcaaggcttccaaggaatgccaagtgctatacgccagtctgggcctcgtccaactcttcgccatctggctccaactggtaatgctccggcctctcgtggcctccctactaccactcagagagtcgggtctgagtgcccggaccgcttggctatggactttggtggggctggtgccgcccagcaagggctgactgacagctgccagtctggaggcgttcccacagctgtgcagaacttagcgccacgcgctgctgttgctgctgctgctccccgggctgttgccccctacaaatacgcctccagtgtccgcagccctcatcctgccatacagcctctgcaggcaccccagcctgcggtccatgtgcaggggcaggagccactgactgcctccatgctggctgcagcacccccccaggaacagaagcagatgctgggagaacgcttgttcccactcatccaaacaatgcattcaaatctggctgggaagatcacgggaatgctgctggagatagacaactctgagctgctgcacatgttagagtcccccgagtctctccgctccaaggtggatgaagctgtagcagttctacaggctcatcatgccaagaaagaagctgcccagaaggtgggcgctgttgctgctgctacctcttagacaaggaaaaaccgattcaaaagccaaataaccccttatggaattcaactcaaggtttgaagacttcctagcttgtcctatggacctcaacaccaaggattacaaattgcaaatttaataggtcattttgtatcaaaaggtcaattatgaagcacctagaatttttcaattatacgaatatgttctttgggttctgctgtggcccagacagtgttaactttttttttattgtgggttttgattttttcccccagaaattggttttatttgatgtacccaagtcttacgtttcccaataaagaaaaaaaatctccataaaa

SEQ ID NO: 281450 - DNA, 3662 bp, Homo sapiens
  misc_feature (13)..(13): n is a, c, g, or t
agcggctctctcngccccgggtcgctgccgcctccgccgctttcgggcttcgcagcctgaggaaaaaaagagaaaaagataaaaaaaatctgaaaacgcttcaaaatcctgaaaaaaaaaaaggaaaagaaaaaacgaatcctcggagaacccgcggggaagtcactttcgtacgcttccggcctgccccgcgcccgccgccgcagcgcttggcgtccgtcggtctccgtccgtcggtccgggggtgagccgcccgcccggcccgccgtgccctccccccgctcgggccccgagccccgcgccccgcgcctgccccggcgcaccacgtgtccgtgctgcccttcgccgcccgcccggggctcgccgagtcggcgcccacaaagatttggtttccctctgccccggcggttgtaatcttaaaccgccggagcccgaggcctatatttatagagaaacgcgtgtccccgaggccgccgtgggcagcgtccggtcgcctcttaaaggatttttacccttcggaaggggattccccgtttaatttttttcctactttgattttttgaaatttggagcttcgcaccaggaccgcggagaagtgcaaagtcgcggggagggccgtattgtgcggagagccttttgtctgcggtgctgcggccgtgggagccggcccccgcctcccgtttccgtcccgtctccaagcccgccgactccagctcgtcctcgccgcgccggtgccacctgtgagccgcggcgcgggcccgggctccgaaggcgcccctttgtcctgcggcgggcccgataagaagtcctcctggcggggctcggggtggtggggggcggggagatgaacgctgcggccagcagctaccccatggcctccctgtacgtgggcgacctgcattcggacgtcaccgaggccatgctgtacgaaaagttcagccccgcggggcctgtgctgtccatccgggtctgccgcgatatgatcacccgccgctccctgggctatgcctacgtcaacttccagcagccggccgacgctgagcgggctttggacaccatgaactttgatgtgattaagggaaagccaatccgcatcatgtggtctcagagggatccctctttgagaaaatctggtgtgggaaacgtcttcatcaagaacctggacaaatctatagataacaaggcactttatgatactttttctgcttttggaaacatactgtcctgcaaggtggtgtgtgatgagaacggctctaagggttatgcctttgtccacttcgagacccaagaggctgccgacaaggccatcgagaagatgaatggcatgctcctcaatgaccgcaaagtatttgtgggcagattcaagtctcgcaaagagcgggaagctgagcttggagccaaagccaaggaattcaccaatgtttatatcaaaaactttggggaagaggtggatgatgagagtctgaaagagctattcagtcagtttggtaagaccctaagtgtcaaggtgatgagagatcccaatgggaaatccaaaggctttggctttgtgagttacgaaaaacacgaggatgccaataaggctgtggaagagatgaatggaaaagaaataagtggtaaaatcatatttgtaggccgtgcacaaaagaaagtagaacggcaggcagagttaaaacggaaatttgaacagttgaaacaggagagaattagtcgatatcagggggtgaatctctacattaagaacttggatgacactattgatgatgagaaattaaggaaagaattttctccttttggatcaattaccagtgctaaggtaatgctggaggatggaagaagcaaagggtttggcttcgtctgcttctcatctcctgaagaagcaaccaaagcagtcactgagatgaatggacgcattgtgggctccaagccactatatgttgccctggcccagaggaaggaagagagaaaggctcacctgaccaaccagtatatgcaacgagtggctggaatgagagcacttcctgccaatgccatcttaaatcagttccagcctgcagcgggtggctactttgtgccagcagtcccacaggctcagggaaggcctccatattatacacctaaccagttagcacagatgaggcctaatccacgctggcagcaaggtgggagacctcaaggcttccaaggaatgccaagtgctatacgccagtctgggcctcgtccaactcttcgccatctggctccaactgggtctgagtgcccggaccgcttggctatggactttggtggggctggtgccgcccagcaagggctgactgacagctgccagtctggaggcgttcccacagctgtgcagaacttagcgccacgcgctgctgttgctgctgctgctccccgggctgttgccccctacaaatacgcctccagtgtccgcagccctcatcctgccatacagcctctgcaggcaccccagcctgcggtccatgtgcaggggcaggagccactgactgcctccatgctggctgcagcacccccccaggaacagaagcagatgctgggagaacgcttgttcccactcatccaaacaatgcattcaaatctggctgggaagatcacgggaatgctgctggagatagacaactctgagctgctgcacatgttagagtcccccgagtctctccgctccaaggtggatgaagctgtagcagttctacaggctcatcatgccaagaaagaagctgcccagaaggtgggcgctgttgctgctgctacctcttagacaaggaaaaaccgtatgtgtggctattttcatttttgttcctatgagcattgttcctatgagcattgtctttgtggtttgacctgaggttgtatatatgctcactgcttagctctgggaatacaataagtacagttagttacacggagtgtgttgcaggtgacttcttatcatgaggactgtggactttgtctgcaggagcttgagtgaataataaaactagtactggttgatggttgtaggtgtctccagatagggaaagaagagacagtaaaataagctaaggaaaaagcacatggtaaggaccagagctggtgtgttgggagggttgacttggcatagtcatgaccctcttgtcaagggcctcaggagccttgtcatctagtggtaaagaccagagatgctgctaaatgttgtacagtacacaggaggacagacccaacagaatgtccaaagtgtcaatagcactgaggttgagaaactctcttctagaataccttcctttatccactatatgttaatgaatctaaattatttgattatgcatttatttgtgttggtgcttttctttacagggattcaaaagccaaataaccccttatggaattcaactcaaggtttgaagacttcctagcttgtcctatggacctcaacaccaaggattacaaattgcaaatttaataggtcattttgtatcaaaaggtcaattatgaagcacctagaatttttcaattatacgaatatgttctttgggttctgctgtggcccagacagtgttaactttttttttattgtgggttttgattttttcccccagaaattggttttatttgatgtacccaagtcttacgtttcccaataaagaaaaaaaatctccataaaa

SEQ ID NO: 281451 - DNA, 3051 bp, Homo sapiens
  misc_feature (13)..(13): n is a, c, g, or t
agcggctctctcngccccgggtcgctgccgcctccgccgctttcgggcttcgcagcctgaggaaaaaaagagaaaaagataaaaaaaatctgaaaacgcttcaaaatcctgaaaaaaaaaaaggaaaagaaaaaacgaatcctcggagaacccgcggggaagtcactttcgtacgcttccggcctgccccgcgcccgccgccgcagcgcttggcgtccgtcggtctccgtccgtcggtccgggggtgagccgcccgcccggcccgccgtgccctccccccgctcgggccccgagccccgcgccccgcgcctgccccggcgcaccacgtgtccgtgctgcccttcgccgcccgcccggggctcgccgagtcggcgcccacaaagatttggtttccctctgccccggcggttgtaatcttaaaccgccggagcccgaggcctatatttatagagaaacgcgtgtccccgaggccgccgtgggcagcgtccggtcgcctcttaaaggatttttacccttcggaaggggattccccgtttaatttttttcctactttgattttttgaaatttggagcttcgcaccaggaccgcggagaagtgcaaagtcgcggggagggccgtattgtgcggagagccttttgtctgcggtgctgcggccgtgggagccggcccccgcctcccgtttccgtcccgtctccaagcccgccgactccagctcgtcctcgccgcgccggtgccacctgtgagccgcggcgcgggcccgggctccgaaggcgcccctttgtcctgcggcgggcccgataagaagtcctcctggcggggctcggggtggtggggggcggggagatgaacgctgcggccagcagctaccccatggcctccctgtacgtgggcgacctgcattcggacgtcaccgaggccatgctgtacgaaaagttcagccccgcggggcctgtgctgtccatccgggtctgccgcgatatgatcacccgccgctccctgggctatgcctacgtcaacttccagcagccggccgacgctgagcgggctttggacaccatgaactttgatgtgattaagggaaagccaatccgcatcatgtggtctcagagggatccctctttgagaaaatctggtgtgggaaacgtcttcatcaagaacctggacaaatctatagataacaaggcactttatgatactttttctgcttttggaaacatactgtcctgcaaggtggtgtgtgatgagaacggctctaagggttatgcctttgtccacttcgagacccaagaggctgccgacaaggccatcgagaagatgaatggcatgctcctcaatgaccgcaaagtatttgtgggcagattcaagtctcgcaaagagcgggaagctgagcttggagccaaagccaaggaattcaccaatgtttatatcaaaaactttggggaagaggtggatgatgagagtctgaaagagctattcagtcagtttggtaagaccctaagtgtcaaggtgatgagagatcccaatgggaaatccaaaggctttggctttgtgagttacgaaaaacacgaggatgccaataaggctgtggaagagatgaatggaaaagaaataagtggtaaaatcatatttgtaggccgtgcacaaaagaaagtagaacggcaggcagagttaaaacggaaatttgaacagttgaaacaggagagaattagtcgatatcagggggtgaatctctacattaagaacttggatgacactattgatgatgagaaattaaggaaagaattttctccttttggatcaattaccagtgctaaggtaatgctggaggatggaagaagcaaagggtttggcttcgtctgcttctcatctcctgaagaagcaaccaaagcagtcactgagatgaatggacgcattgtgggctccaagccactatatgttgccctggcccagaggaaggaagagagaaaggctcacctgaccaaccagtatatgcaacgagtggctggaatgagagcacttcctgccaatgccatcttaaatcagttccagcctgcagcgggtggctactttgtgccagcagtcccacaggctcagggaaggcctccatattatacacctaaccagttagcacagatgaggcctaatccacgctggcagcaaggtgggagacctcaaggcttccaaggaatgccaagtgctatacgccagtctgggcctcgtccaactcttcgccatctggctccaactgggtctgagtgcccggaccgcttggctatggactttggtggggctggtgccgcccagcaagggctgactgacagctgccagtctggaggcgttcccacagctgtgcagaacttagcgccacgcgctgctgttgctgctgctgctccccgggctgttgccccctacaaatacgcctccagtgtccgcagccctcatcctgccatacagcctctgcaggcaccccagcctgcggtccatgtgcaggggcaggagccactgactgcctccatgctggctgcagcacccccccaggaacagaagcagatgctgggagaacgcttgttcccactcatccaaacaatgcattcaaatctggctgggaagatcacgggaatgctgctggagatagacaactctgagctgctgcacatgttagagtcccccgagtctctccgctccaaggtggatgaagctgtagcagttctacaggctcatcatgccaagaaagaagctgcccgattcaaaagccaaataaccccttatggaattcaactcaaggtttgaagacttcctagcttgtcctatggacctcaacaccaaggattacaaattgcaaatttaataggtcattttgtatcaaaaggtcaattatgaagcacctagaatttttcaattatacgaatatgttctttgggttctgctgtggcccagacagtgttaactttttttttattgtgggttttgattttttcccccagaaattggttttatttgatgtacccaagtcttacgtttcccaataaagaaaaaaaatctccataaaa

SEQ ID NO: 281452 - DNA, 3554 bp, Homo sapiens
  misc_feature (13)..(13): n is a, c, g, or t
agcggctctctcngccccgggtcgctgccgcctccgccgctttcgggcttcgcagcctgaggaaaaaaagagaaaaagataaaaaaaatctgaaaacgcttcaaaatcctgaaaaaaaaaaaggaaaagaaaaaacgaatcctcggagaacccgcggggaagtcactttcgtacgcttccggcctgccccgcgcccgccgccgcagcgcttggcgtccgtcggtctccgtccgtcggtccgggggtgagccgcccgcccggcccgccgtgccctccccccgctcgggccccgagccccgcgccccgcgcctgccccggcgcaccacgtgtccgtgctgcccttcgccgcccgcccggggctcgccgagtcggcgcccacaaagatttggtttccctctgccccggcggttgtaatcttaaaccgccggagcccgaggcctatatttatagagaaacgcgtgtccccgaggccgccgtgggcagcgtccggtcgcctcttaaaggatttttacccttcggaaggggattccccgtttaatttttttcctactttgattttttgaaatttggagcttcgcaccaggaccgcggagaagtgcaaagtcgcggggagggccgtattgtgcggagagccttttgtctgcggtgctgcggccgtgggagccggcccccgcctcccgtttccgtcccgtctccaagcccgccgactccagctcgtcctcgccgcgccggtgccacctgtgagccgcggcgcgggcccgggctccgaaggcgcccctttgtcctgcggcgggcccgataagaagtcctcctggcggggctcggggtggtggggggcggggagatgaacgctgcggccagcagctaccccatggcctccctgtacgtgggcgacctgcattcggacgtcaccgaggccatgctgtacgaaaagttcagccccgcggggcctgtgctgtccatccgggtctgccgcgatatgatcacccgccgctccctgggctatgcctacgtcaacttccagcagccggccgacgctgagcgggctttggacaccatgaactttgatgtgattaagggaaagccaatccgcatcatgtggtctcagagggatccctctttgagaaaatctggtgtgggaaacgtcttcatcaagaacctggacaaatctatagataacaaggcactttatgatactttttctgcttttggaaacatactgtcctgcaaggtggtgtgtgatgagaacggctctaagggttatgcctttgtccacttcgagacccaagaggctgccgacaaggccatcgagaagatgaatggcatgctcctcaatgaccgcaaagtatttgtgggcagattcaagtctcgcaaagagcgggaagctgagcttggagccaaagccaaggaattcaccaatgtttatatcaaaaactttggggaagaggtggatgatgagagtctgaaagagctattcagtcagtttggtaagaccctaagtgtcaaggtgatgagagatcccaatgggaaatccaaaggctttggctttgtgagttacgaaaaacacgaggatgccaataaggctgtggaagagatgaatggaaaagaaataagtggtaaaatcatatttgtaggccgtgcacaaaagaaagtagaacggcaggcagagttaaaacggaaatttgaacagttgaaacaggagagaattagtcgatatcagggggtgaatctctacattaagaacttggatgacactattgatgatgagaaattaaggaaagaattttctccttttggatcaattaccagtgctaaggtaatgctggaggatggaagaagcaaagggtttggcttcgtctgcttctcatctcctgaagaagcaaccaaagcagtcactgagatgaatggacgcattgtgggctccaagccactatatgttgccctggcccagaggaaggaagagagaaaggctcacctgaccaaccagtatatgcaacgagtggctggaatgagagcacttcctgccaatgccatcttaaatcagttccagcctgcagcgggtggctactttgtgccagcagtcccacaggctcagggaaggcctccatattatacacctaaccagttagcacagatgaggcctaatccacgctggcagcaaggtgggagacctcaaggcttccaaggaatgccaagtgctatacgccagtctgggcctcgtccaactcttcgccatctggctccaactgggtctgagtgcccggaccgcttggctatggactttggtggggctggtgccgcccagcaagggctgactgacagctgccagtctggaggcgttcccacagctgtgcagaacttagcgccacgcgctgctgttgctgctgctgctccccgggctgttgccccctacaaatacgcctccagtgtccgcagccctcatcctgccatacagcctctgcaggcaccccagcctgcggtccatgtgcaggggcaggagccactgactgcctccatgctggctgcagcacccccccaggaacagaagcagatgctgggagaacgcttgttcccactcatccaaacaatgcattcaaatctggctgggaagatcacgggaatgctgctggagatagacaactctgagctgctgcacatgttagagtcccccgagtctctccgctccaaggtggatgaagctgtagcagttctacaggctcatcatgccaagaaagaagctgcccgattcaaaagccaaataaccccttatggaattcaactcaaggtttgaagacttcctagcttgtcctatggacctcaacaccaaggattacaaattgcaaatttaataggtcattttgtatcaaaaggtcaattatgaagcacctagaatttttcaattatacgaatatgttctttgggttctgctgtggcccagacagtgttaactttttttttattgtgggttttgattttttcccccagaaattggttttatttgatgtacccaagtcttacgtttcccaataaagaaaaaaaatctccataaaaaaaaaaaaaaaaaaaaaaaaaaaaaaaaaaaaaaaaaaaaaaaaaaaaaaaaaaaaaaaaaaaaaaaaaaaaaaaaagggggggggggggaaaaaccggggggggaatgcccacgttttgtaagaaacagagggggcccccaagtagtggaggggagttattataaatcacagaggggagcgggcgcgaagttataaaaacaacaggtgtgagggagggaaaacaaacgccgttgtgcggaggatatcttttttgggagaaagaaagccaccactcatgtgtggggggagggaggaaacaataattggggaacaacaccctacacgcagaagatgattttacgcgcccccgggcgggcaaataataaaataaacgcgtggggggtttattatgtagtggtgcacccacacagcgtgtgattattgttgtgtgcggtagcataaaagattttgtgctgcacgacggcgatgtgatatatgaagaaaactaattttaccaggggg

SEQ ID NO: 281453 - DNA, 2608 bp, Homo sapiens
  misc_feature (13)..(13): n is a, c, g, or t
agcggctctctcngccccgggtcgctgccgcctccgccgctttcgggcttcgcagcctgaggaaaaaaagagaaaaagataaaaaaaatctgaaaacgcttcaaaatcctgaaaaaaaaaaaggaaaagaaaaaacgaatcctcggagaacccgcggggaagtcactttcgtacgcttccggcctgccccgcgcccgccgccgcagcgcttggcgtccgtcggtctccgtccgtcggtccgggggtgagccgcccgcccggcccgccgtgccctccccccgctcgggccccgagccccgcgccccgcgcctgccccggcgcaccacgtgtccgtgctgcccttcgccgcccgcccggggctcgccgagtcggcgcccacaaagatttggtttccctctgccccggcggttgtaatcttaaaccgccggagcccgaggcctatatttatagagaaacgcgtgtccccgaggccgccgtgggcagcgtccggtcgcctcttaaaggatttttacccttcggaaggggattccccgtttaatttttttcctactttgattttttgaaatttggagcttcgcaccaggaccgcggagaagtgcaaagtcgcggggagggccgtattgtgcggagagccttttgtctgcggtgctgcggccgtgggagccggcccccgcctcccgtttccgtcccgtctccaagcccgccgactccagctcgtcctcgccgcgccggtgccacctgtgagccgcggcgcgggcccgggctccgaaggcgcccctttgtcctgcggcgggcccgataagaagtcctcctggcggggctcggggtggtggggggcggggagatgaacgctgcggccagcagctaccccatggcctccctgtacgtgggcgacctgcattcggacgtcaccgaggccatgctgtacgaaaagttcagccccgcggggcctgtgctgtccatccgggtctgccgcgatatgatcacccgccgctccctgggctatgcctacgtcaacttccagcagccggccgacgctgagcgggctttggacaccatgaactttgatgtgattaagggaaagccaatccgcatcatgtggtctcagagggatccctctttgagaaaatctggtgtgggaaacgtcttcatcaagaacctggacaaatctatagataacaaggcactttatgatactttttctgcttttggaaacatactgtcctgcaaggtggtgtgtgatgagaacggctctaagggttatgcctttgtccacttcgagacccaagaggctgccgacaaggccatcgagaagatgaatggcatgctcctcaatgaccgcaaagtatttgtgggcagattcaagtctcgcaaagagcgggaagctgagcttggagccaaagccaaggaattcaccaatgtttatatcaaaaactttggggaagaggtggatgatgagagtctgaaagagctattcagtcagtttggtaagaccctaagtgtcaaggtgatgagagatcccaatgggaaatccaaaggctttggctttgtgagttacgaaaaacacgaggatgccaataaggctgtggaagagatgaatggaaaagaaataagtggtaaaatcatatttgtaggccgtgcacaaaagaaagtagaacggcaggcagagttaaaacggaaatttgaacagttgaaacaggagagaattagtcgatatcagggggtgaatctctacattaagaacttggatgacactattgatgatgagaaattaaggaaagaattttctccttttggatcaattaccagtgctaaggtaatgctggaggatggaagaagcaaagggtttggcttcgtctgcttctcatctcctgaagaagcaaccaaagcagtcactgagatgaatggacgcattgtgggctccaagccactatatgttgccctggcccagaggaaggaagagagaaaggctcacctgaccaaccagtatatgcaacgagtggctggaatgagagcacttcctgccaatgccatcttaaatcagttccagcctgcagcgggtggctactttgtgccagcagtcccacaggctcagggaaggcctccatattatacacctaaccagttagcacagatgaggcctaatccacgctggcagcaaggtgggagacctcaaggcttccaaggaatgccaagtgctatacgccagtctgggcctcgtccaactcttcgccatctggctccaactgggtctgagtgcccggaccgcttggctatggactttggtggggctggtgccgcccagcaagggctgactgacagctgccagtctggaggcgttcccacagctgtgcagaacttagcgccacgcgctgctgttgctgctgctgctccccgggctgttgccccctacaaatacgcctccagtgtccgcagccctcatcctgccatacagcctctgcaggcaccccagcctgcggtccatgtgcaggggcaggagccactgactgcctccatgctggctgcagcacccccccaggaacagaagcagatgctgggagaacgcattgttcccactcatccgaagcagtcgcaagggatcctgtaa

SEQ ID NO: 281454 - DNA, 2885 bp, Homo sapiens
  misc_feature (13)..(13): n is a, c, g, or t
agcggctctctcngccccgggtcgctgccgcctccgccgctttcgggcttcgcagcctgaggaaaaaaagagaaaaagataaaaaaaatctgaaaacgcttcaaaatcctgaaaaaaaaaaaggaaaagaaaaaacgaatcctcggagaacccgcggggaagtcactttcgtacgcttccggcctgccccgcgcccgccgccgcagcgcttggcgtccgtcggtctccgtccgtcggtccgggggtgagccgcccgcccggcccgccgtgccctccccccgctcgggccccgagccccgcgccccgcgcctgccccggcgcaccacgtgtccgtgctgcccttcgccgcccgcccggggctcgccgagtcggcgcccacaaagatttggtttccctctgccccggcggttgtaatcttaaaccgccggagcccgaggcctatatttatagagaaacgcgtgtccccgaggccgccgtgggcagcgtccggtcgcctcttaaaggatttttacccttcggaaggggattccccgtttaatttttttcctactttgattttttgaaatttggagcttcgcaccaggaccgcggagaagtgcaaagtcgcggggagggccgtattgtgcggagagccttttgtctgcggtgctgcggccgtgggagccggcccccgcctcccgtttccgtcccgtctccaagcccgccgactccagctcgtcctcgccgcgccggtgccacctgtgagccgcggcgcgggcccgggctccgaaggcgcccctttgtcctgcggcgggcccgataagaagtcctcctggcggggctcggggtggtggggggcggggagatgaacgctgcggccagcagctaccccatggcctccctgtacgtgggcgacctgcattcggacgtcaccgaggccatgctgtacgaaaagttcagccccgcggggcctgtgctgtccatccgggtctgccgcgatatgatcacccgccgctccctgggctatgcctacgtcaacttccagcagccggccgacgctgagcgggctttggacaccatgaactttgatgtgattaagggaaagccaatccgcatcatgtggtctcagagggatccctctttgagaaaatctggtgtgggaaacgtcttcatcaagaacctggacaaatctatagataacaaggcactttatgatactttttctgcttttggaaacatactgtcctgcaaggtggtgtgtgatgagaacggctctaagggttatgcctttgtccacttcgagacccaagaggctgccgacaaggccatcgagaagatgaatggcatgctcctcaatgaccgcaaagtatttgtgggcagattcaagtctcgcaaagagcgggaagctgagcttggagccaaagccaaggaattcaccaatgtttatatcaaaaactttggggaagaggtggatgatgagagtctgaaagagctattcagtcagtttggtaagaccctaagtgtcaaggtgatgagagatcccaatgggaaatccaaaggctttggctttgtgagttacgaaaaacacgaggatgccaataaggctgtggaagagatgaatggaaaagaaataagtggtaaaatcatatttgtaggccgtgcacaaaagaaagtagaacggcaggcagagttaaaacggaaatttgaacagttgaaacaggagagaattagtcgatatcagggggtgaatctctacattaagaacttggatgacactattgatgatgagaaattaaggaaagaattttctccttttggatcaattaccagtgctaaggtaatgctggaggatggaagaagcaaagggtttggcttcgtctgcttctcatctcctgaagaagcaaccaaagcagtcactgagatgaatggacgcattgtgggctccaagccactatatgttgccctggcccagaggaaggaagagagaaaggctcacctgaccaaccagtatatgcaacgagtggctggaatgagagcacttcctgccaatgccatcttaaatcagttccagcctgcagcgggtggctactttgtgccagcagtcccacaggctcagggaaggcctccatattatacacctaaccagttagcacagatgaggcctaatccacgctggcagcaaggtgggagacctcaaggcttccaaggaatgccaagtgctatacgccagtctgggcctcgtccaactcttcgccatctggctccaactggtaatgctccggcctctcgtggcctccctactaccactcagagagtcggtgagcaaactggcctttagaagtgtggcctggggaggagggagtcaggatgactaggctctgtcctgggttggtcagtttgttgggctcgaatttatcgagtcctggttctgtaatcttagctgtgtgcttaggtggccacttcaggagcagagaaacagtatgagttctaggtgtgtcagttgcttttaacattctttgctcatcggtgacctatgtgaaaaaggttagttgtagaagtttgctagctggatgaccacagaggcagcttgttcttttgggtggggtgaggaatacaaggaaacagtgtatacagaatatgtcttgtattccaagatgtggaaagagttgtatgttatcctttggctcatcctcgaaagtagtagtggccccctgtgcaatgtgttgcgtaaacgtgctttgaaatttctccttccgtgggacgtggccagttggacatctgccgccaacactgatgtgcatttgctggtctgttgtagggtctgagtgcccggaccgcttggctatggactttggtggtgtggactcaggtggtgtggactcaggtgattggactcaggtggtgtg

SEQ ID NO: 281455 - DNA, 2369 bp, Homo sapiens
  misc_feature (13)..(13): n is a, c, g, or t
agcggctctctcngccccgggtcgctgccgcctccgccgctttcgggcttcgcagcctgaggaaaaaaagagaaaaagataaaaaaaatctgaaaacgcttcaaaatcctgaaaaaaaaaaaggaaaagaaaaaacgaatcctcggagaacccgcggggaagtcactttcgtacgcttccggcctgccccgcgcccgccgccgcagcgcttggcgtccgtcggtctccgtccgtcggtccgggggtgagccgcccgcccggcccgccgtgccctccccccgctcgggccccgagccccgcgccccgcgcctgccccggcgcaccacgtgtccgtgctgcccttcgccgcccgcccggggctcgccgagtcggcgcccacaaagatttggtttccctctgccccggcggttgtaatcttaaaccgccggagcccgaggcctatatttatagagaaacgcgtgtccccgaggccgccgtgggcagcgtccggtcgcctcttaaaggatttttacccttcggaaggggattccccgtttaatttttttcctactttgattttttgaaatttggagcttcgcaccaggaccgcggagaagtgcaaagtcgcggggagggccgtattgtgcggagagccttttgtctgcggtgctgcggccgtgggagccggcccccgcctcccgtttccgtcccgtctccaagcccgccgactccagctcgtcctcgccgcgccggtgccacctgtgagccgcggcgcgggcccgggctccgaaggcgcccctttgtcctgcggcgggcccgataagaagtcctcctggcggggctcggggtggtggggggcggggagatgaacgctgcggccagcagctaccccatggcctccctgtacgtgggcgacctgcattcggacgtcaccgaggccatgctgtacgaaaagttcagccccgcggggcctgtgctgtccatccgggtctgccgcgatatgatcacccgccgctccctgggctatgcctacgtcaacttccagcagccggccgacgctgagcgggctttggacaccatgaactttgatgtgattaagggaaagccaatccgcatcatgtggtctcagagggatccctctttgagaaaatctggtgtgggaaacgtcttcatcaagaacctggacaaatctatagataacaaggcactttatgatactttttctgcttttggaaacatactgtcctgcaaggtggtgtgtgatgagaacggctctaagggttatgcctttgtccacttcgagacccaagaggctgccgacaaggccatcgagaagatgaatggcatgctcctcaatgaccgcaaagtatttgtgggcagattcaagtctcgcaaagagcgggaagctgagcttggagccaaagccaaggaattcaccaatgtttatatcaaaaactttggggaagaggtggatgatgagagtctgaaagagctattcagtcagtttggtaagaccctaagtgtcaaggtgatgagagatcccaatgggaaatccaaaggctttggctttgtgagttacgaaaaacacgaggatgccaataaggctgtggaagagatgaatggaaaagaaataagtggtaaaatcatatttgtaggccgtgcacaaaagaaagtagaacggcaggcagagttaaaacggaaatttgaacagttgaaacaggagagaattagtcgatatcagggggtgaatctctacattaagaacttggatgacactattgatgatgagaaattaaggaaagaattttctccttttggatcaattaccagtgctaaggtattatactgcgatctggggattgaaagcagtggtattccattataggcttattggcatttgtcccattgaaggaatagcatttaaattatgttcatttctgaaagtagctactacgtttttctagcaaaatttctggatgcattctggagaatgacatttcattaggttaacattacactgtttcccaagcactggagtctggagaggaatttgacccagcccctccttgccaactcagagcacctgaatctttcccattccttgctgcctcgtgccggtgtggggacagatggtgctacagaatgagcagaggaaatccagacaggttgttttccatttgtcttggggcctgtctctacagctctgccacattttctccttgagaatgaaggtattttgaagattttggaggtgggcttgggaacttctaccctggtcttaaaaagagaggaaaggggagtggaaggtttttctatgtttcgtagtgtgcatcatttgcttgattttctttgataatcatatcaactaagttagcagggtaagtaggaac

SEQ ID NO: 281456 - DNA, 1682 bp, Homo sapiens
  misc_feature (13)..(13): n is a, c, g, or t
agcggctctctcngccccgggtcgctgccgcctccgccgctttcgggcttcgcagcctgaggaaaaaaagagaaaaagataaaaaaaatctgaaaacgcttcaaaatcctgaaaaaaaaaaaggaaaagaaaaaacgaatcctcggagaacccgcggggaagtcactttcgtacgcttccggcctgccccgcgcccgccgccgcagcgcttggcgtccgtcggtctccgtccgtcggtccgggggtgagccgcccgcccggcccgccgtgccctccccccgctcgggccccgagccccgcgccccgcgcctgccccggcgcaccacgtgtccgtgctgcccttcgccgcccgcccggggctcgccgagtcggcgcccacaaagatttggtttccctctgccccggcggttgtaatcttaaaccgccggagcccgaggcctatatttatagagaaacgcgtgtccccgaggccgccgtgggcagcgtccggtcgcctcttaaaggatttttacccttcggaaggggattccccgtttaatttttttcctactttgattttttgaaatttggagcttcgcaccaggaccgcggagaagtgcaaagtcgcggggagggccgtattgtgcggagagccttttgtctgcggtgctgcggccgtgggagccggcccccgcctcccgtttccgtcccgtctccaagcccgccgactccagctcgtcctcgccgcgccggtgccacctgtgagccgcggcgcgggcccgggctccgaaggcgcccctttgtcctgcggcgggcccgataagaagtcctcctggcggggctcggggtggtggggggcggggagatgaacgctgcggccagcagctaccccatggcctccctgtacgtgggcgacctgcattcggacgtcaccgaggccatgctgtacgaaaagttcagccccgcggggcctgtgctgtccatccgggtctgccgcgatatgatcacccgccgctccctgggctatgcctacgtcaacttccagcagccggccgacgctgagcgggctttggacaccatgaactttgatgtgattaagggaaagccaatccgcatcatgtggtctcagagggatccctctttgagaaaatctggtgtgggaaacgtcttcatcaagaacctggacaaatctatagataacaaggcactttatgatactttttctgcttttggaaacatactgtcctgcaaggtggtgtgtgatgagaacggctctaagggttatgcctttgtccacttcgagacccaagaggctgccgacaaggccatcgagaagatgaatggcatgctcctcaatgaccgcaaagtatttgtgggcagattcaagtctcgcaaagagcgggaagctgagcttggagccaaagccaaggaattcaccaatgtttatatcaaaaactttggggaagaggtggatgatgagagtctgaaagagctattcagtcagtttggtaagaccctaagtgtcaaggtgatgagagatcccaatgggaaatccaaaggctttggctttgtgagttacgaaaaacacgaggatgccaataaggtgagtataccacaaagattgggaaaagcttttaagaggttgccccagagtatgggtagggtcttgctagcacctacctagagctgggacggtctgagta

SEQ ID NO: 281457 - DNA, 1330 bp, Homo sapiens
  misc_feature (13)..(13): n is a, c, g, or t
agcggctctctcngccccgggtcgctgccgcctccgccgctttcgggcttcgcagcctgaggaaaaaaagagaaaaagataaaaaaaatctgaaaacgcttcaaaatcctgaaaaaaaaaaaggaaaagaaaaaacgaatcctcggagaacccgcggggaagtcactttcgtacgcttccggcctgccccgcgcccgccgccgcagcgcttggcgtccgtcggtctccgtccgtcggtccgggggtgagccgcccgcccggcccgccgtgccctccccccgctcgggccccgagccccgcgccccgcgcctgccccggcgcaccacgtgtccgtgctgcccttcgccgcccgcccggggctcgccgagtcggcgcccacaaagatttggtttccctctgccccggcggttgtaatcttaaaccgccggagcccgaggcctatatttatagagaaacgcgtgtccccgaggccgccgtgggcagcgtccggtcgcctcttaaaggatttttacccttcggaaggggattccccgtttaatttttttcctactttgattttttgaaatttggagcttcgcaccaggaccgcggagaagtgcaaagtcgcggggagggccgtattgtgcggagagccttttgtctgcggtgctgcggccgtgggagccggcccccgcctcccgtttccgtcccgtctccaagcccgccgactccagctcgtcctcgccgcgccggtgccacctgtgagccgcggcgcgggcccgggctccgaaggcgcccctttgtcctgcggcgggcccgataagaagtcctcctggcggggctcggggtggtggggggcggggagatgaacgctgcggccagcagctaccccatggcctccctgtacgtgggcgacctgcattcggacgtcaccgaggccatgctgtacgaaaagttcagccccgcggggcctgtgctgtccatccgggtctgccgcgatatgatcacccgccgctccctgggctatgcctacgtcaacttccagcagccggccgacgctgagcgggctttggacaccatgaactttgatgtgattaagggaaagccaatccgcatcatgtggtctcagagggatccctctttgagaaaatctggtgtgggaaacgtcttcatcaagaacctggacaaatctatagataacaaggcactttatgatactttttctgcttttggaaacatactgtcctgcaagtggtgtgttatgagaaccgctctaagggtatagccttcgtccacactcggacccaaggagtcgccgacaggcatagcgatagtagatggatactcctca

SEQ ID NO: 281458 - DNA, 285 bp, Homo sapiens
gtgagatgagatgagatacttctctaggatgggttcagtccttaagggggtgtttgggtattcttctgtcttacaggctcagggaaggcctccatattatacacctaaccagttagcacagatgaggcctaatccacgctggcagcaaggtgggagacctcaagaggtaggtggtggggaacagtaattgacagcccaggatatacctgtcctggtctcccctgcctttccttcttccccactctgaggcacagcctaggttctggtccacatcacttctcaatg

SEQ ID NO: 281459 - DNA, 3147 bp, Homo sapiens
  misc_feature (13)..(13): n is a, c, g, or t
agcggctctctcngccccgggtcgctgccgcctccgccgctttcgggcttcgcagcctgaggaaaaaaagagaaaaagataaaaaaaatctgaaaacgcttcaaaatcctgaaaaaaaaaaaggaaaagaaaaaacgaatcctcggagaacccgcggggaagtcactttcgtacgcttccggcctgccccgcgcccgccgccgcagcgcttggcgtccgtcggtctccgtccgtcggtccgggggtgagccgcccgcccggcccgccgtgccctccccccgctcgggccccgagccccgcgccccgcgcctgccccggcgcaccacgtgtccgtgctgcccttcgccgcccgcccggggctcgccgagtcggcgcccacaaagatttggtttccctctgccccggcggttgtaatcttaaaccgccggagcccgaggcctatatttatagagaaacgcgtgtccccgaggccgccgtgggcagcgtccggtcgcctcttaaaggatttttacccttcggaaggggattccccgtttaatttttttcctactttgattttttgaaatttggagcttcgcaccaggaccgcggagaagtgcaaagtcgcggggagggccgtattgtgcggagagccttttgtctgcggtgctgcggccgtgggagccggcccccgcctcccgtttccgtcccgtctccaagcccgccgactccagctcgtcctcgccgcgccggtgccacctgtgagccgcggcgcgggcccgggctccgaaggcgcccctttgtcctgcggcgggcccgataagaagtcctcctggcggggctcggggtggtggggggcggggagatgaacgctgcggccagcagctaccccatggcctccctgtacgtgggcgacctgcattcggacgtcaccgaggccatgctgtacgaaaagttcagccccgcggggcctgtgctgtccatccgggtctgccgcgatatgatcacccgccgctccctgggctatgcctacgtcaacttccagcagccggccgacgctgagcgggctttggacaccatgaactttgatgtgattaagggaaagccaatccgcatcatgtggtctcagagggatccctctttgagaaaatctggtgtgggaaacgtcttcatcaagaacctggacaaatctatagataacaaggcactttatgatactttttctgcttttggaaacatactgtcctgcaaggtggtgtgtgatgagaacggctctaagggttatgcctttgtccacttcgagacccaagaggctgccgacaaggccatcgagaagatgaatggcatgctcctcaatgaccgcaaagtatttgtgggcagattcaagtctcgcaaagagcgggaagctgagcttggagccaaagccaaggaattcaccaatgtttatatcaaaaactttggggaagaggtggatgatgagagtctgaaagagctattcagtcagtttggtaagaccctaagtgtcaaggtgatgagagatcccaatgggaaatccaaaggctttggctttgtgagttacgaaaaacacgaggatgccaataaggctgtggaagagatgaatggaaaagaaataagtggtaaaatcatatttgtaggccgtgcacaaaagaaagtagaacggcaggcagagttaaaacggaaatttgaacagttgaaacaggagagaattagtcgatatcagggggtgaatctctacattaagaacttggatgacactattgatgatgagaaattaaggaaagaattttctccttttggatcaattaccagtgctaaggtaatgctggaggatggaagaagcaaagggtttggcttcgtctgcttctcatctcctgaagaagcaaccaaagcagtcactgagatgaatggacgcattgtgggctccaagccactatatgttgccctggcccagaggaaggaagagagaaaggctcacctgaccaaccagtatatgcaacgagtggctggaatgagagcacttcctgccaatgccatcttaaatcagttccagcctgcagcgggtggctactttgtgccagcagtcccacaggctcagggaaggcctccatattatacacctaaccagttagcacagatgaggcctaatccacgctggcagcaaggtgggagacctcaaggcttccaaggaatgccaagtgctatacgccagtctgggcctcgtccaactcttcgccatctggctccaactggtaatgctccggcctctcgtggcctccctactaccactcagagagtcgggtctgagtgcccggaccgcttggctatggactttggtggggctggtgccgcccagcaagggctgactgacagctgccagtctggaggcgttcccacagctgtgcagaacttagcgccacgcgctgctgttgctgctgctgctccccgggctgttgccccctacaaatacgcctccagtgtccgcagccctcatcctgccatacagcctctgcaggcaccccagcctgcggtccatgtgcaggggcaggagccactgactgcctccatgctggctgcagcacccccccaggaacagaagcagatgctgggagaacgcttgttcccactcatccaaacaatgcattcaaatctggctgggaagatcacgggaatgctgctggagatagacaactctgagctgctgcacatgttagagtcccccgagtctctccgctccaaggtggatgaagctgtagcagttctacaggctcatcatgccaagaaagaagctgcccagaaggtgggcgctgttgctgctgctacctcttagacaaggaaaaaccgattcaaaagccaaataaccccttatggaattcaactcaaggtttgaagacttcctagcttgtcctatggacctcaacaccaaggattacaaattgcaaatttaataggtcattttgtatcaaaaggtcaattatgaagcacctagaatttttcaattatacgaatatgttctttgggttctgctgtggcccagacagtgttaactttttttttattgtgggttttgattttttcccccagaaattggttttatttgatgtacccaagtcttacgtttcccaataaagaaaaaaaatctccataaaa

SEQ ID NO: 281460 - DNA, 3515 bp, Homo sapiens
  misc_feature (13)..(13): n is a, c, g, or t
agcggctctctcngccccgggtcgctgccgcctccgccgctttcgggcttcgcagcctgaggaaaaaaagagaaaaagataaaaaaaatctgaaaacgcttcaaaatcctgaaaaaaaaaaaggaaaagaaaaaacgaatcctcggagaacccgcggggaagtcactttcgtacgcttccggcctgccccgcgcccgccgccgcagcgcttggcgtccgtcggtctccgtccgtcggtccgggggtgagccgcccgcccggcccgccgtgccctccccccgctcgggccccgagccccgcgccccgcgcctgccccggcgcaccacgtgtccgtgctgcccttcgccgcccgcccggggctcgccgagtcggcgcccacaaagatttggtttccctctgccccggcggttgtaatcttaaaccgccggagcccgaggcctatatttatagagaaacgcgtgtccccgaggccgccgtgggcagcgtccggtcgcctcttaaaggatttttacccttcggaaggggattccccgtttaatttttttcctactttgattttttgaaatttggagcttcgcaccaggaccgcggagaagtgcaaagtcgcggggagggccgtattgtgcggagagccttttgtctgcggtgctgcggccgtgggagccggcccccgcctcccgtttccgtcccgtctccaagcccgccgactccagctcgtcctcgccgcgccggtgccacctgtgagccgcggcgcgggcccgggctccgaaggcgcccctttgtcctgcggcgggcccgataagaagtcctcctggcggggctcggggtggtggggggcggggagatgaacgctgcggccagcagctaccccatggcctccctgtacgtgggcgacctgcattcggacgtcaccgaggccatgctgtacgaaaagttcagccccgcggggcctgtgctgtccatccgggtctgccgcgatatgatcacccgccgctccctgggctatgcctacgtcaacttccagcagccggccgacgctgagcgggctttggacaccatgaactttgatgtgattaagggaaagccaatccgcatcatgtggtctcagagggatccctctttgagaaaatctggtgtgggaaacgtcttcatcaagaacctggacaaatctatagataacaaggcactttatgatactttttctgcttttggaaacatactgtcctgcaaggtggtgtgtgatgagaacggctctaagggttatgcctttgtccacttcgagacccaagaggctgccgacaaggccatcgagaagatgaatggcatgctcctcaatgaccgcaaagtatttgtgggcagattcaagtctcgcaaagagcgggaagctgagcttggagccaaagccaaggaattcaccaatgtttatatcaaaaactttggggaagaggtggatgatgagagtctgaaagagctattcagtcagtttggtaagaccctaagtgtcaaggtgatgagagatcccaatgggaaatccaaaggctttggctttgtgagttacgaaaaacacgaggatgccaataaggctgtggaagagatgaatggaaaagaaataagtggtaaaatcatatttgtaggccgtgcacaaaagaaagtagaacggcaggcagagttaaaacggaaatttgaacagttgaaacaggagagaattagtcgatatcagggggtgaatctctacattaagaacttggatgacactattgatgatgagaaattaaggaaagaattttctccttttggatcaattaccagtgctaaggtaatgctggaggatggaagaagcaaagggtttggcttcgtctgcttctcatctcctgaagaagcaaccaaagcagtcactgagatgaatggacgcattgtgggctccaagccactatatgttgccctggcccagaggaaggaagagagaaaggctcacctgaccaaccagtatatgcaacgagtggctggaatgagagcacttcctgccaatgccatcttaaatcagttccagcctgcagcgggtggctactttgtgccagcagtcccacaggctcagggaaggcctccatattatacacctaaccagttagcacagatgaggcctaatccacgctggcagcaaggtgggagacctcaaggcttccaaggaatgccaagtgctatacgccagtctgggcctcgtccaactcttcgccatctggctccaactgggtctgagtgcccggaccgcttggctatggactttggtggggctggtgccgcccagcaagggctgactgacagctgccagtctggaggcgttcccacagctgtgcagaacttagcgccacgcgctgctgttgctgctgctgctccccgggctgttgccccctacaaatacgcctccagtgtccgcagccctcatcctgccatacagcctctgcaggcaccccagcctgcggtccatgtgcaggggcaggagccactgactgcctccatgctggctgcagcacccccccaggaacagaagcagatgctgggagaacgcttgttcccactcatccaaacaatgcattcaaatctggctgggaagatcacgggaatgctgctggagatagacaactctgagctgctgcacatgttagagtcccccgagtctctccgctccaaggtggatgaagctgtagcagttctacaggctcatcatgccaagaaagaagctgcccagaaggtgggcgctgttgctgctgctacctcttagacaaggaaaaaccgattcaaaagccaaataaccccttatggaattcaactcaaggtttgaagacttcctagcttgtcctatggacctcaacaccaaggattacaaattgcaaatttaataggtcattttgtatcaaaaggtcaattatgaagcacctagaatttttcaattatacgaatatgttctttgggttctgctgtggcccagacagtgttaactttttttttattgtgggttttgattttttcccccagaaattggttttatttgatgtacccaagtcttacgtttcccaataaagaaaaaaaatctccataaaaaaaaaaaaaaaaaaaaaaaaaaaaaaaaaaaaaaaaaaaaaaaaaaaaaaaaaaaaaaaaaaaaaaaggggggggggggtaaaaatttccgggggggggcccccagactgtagccaacagcaccagattgttggtcgaagagagggggcccccataagtggggacgaggcgactatataaacacagaaaggaagcagggggccggctgttttaaaaaccaacgcgtctcgtcgcgtggaacacaaccttgcatacgtggaggatattctgggggagaaggacccccttatgcgggcggtggcaccatatgtgggggacaccctaccagcaggatttagaagttcgaggggaaatcaacacgttgcagcgttatggggtgtacaccccgcgatatagctgcggtgaaaactgtgcca

SEQ ID NO: 281461 - DNA, 3602 bp, Homo sapiens
  misc_feature (13)..(13): n is a, c, g, or t
agcggctctctcngccccgggtcgctgccgcctccgccgctttcgggcttcgcagcctgaggaaaaaaagagaaaaagataaaaaaaatctgaaaacgcttcaaaatcctgaaaaaaaaaaaggaaaagaaaaaacgaatcctcggagaacccgcggggaagtcactttcgtacgcttccggcctgccccgcgcccgccgccgcagcgcttggcgtccgtcggtctccgtccgtcggtccgggggtgagccgcccgcccggcccgccgtgccctccccccgctcgggccccgagccccgcgccccgcgcctgccccggcgcaccacgtgtccgtgctgcccttcgccgcccgcccggggctcgccgagtcggcgcccacaaagatttggtttccctctgccccggcggttgtaatcttaaaccgccggagcccgaggcctatatttatagagaaacgcgtgtccccgaggccgccgtgggcagcgtccggtcgcctcttaaaggatttttacccttcggaaggggattccccgtttaatttttttcctactttgattttttgaaatttggagcttcgcaccaggaccgcggagaagtgcaaagtcgcggggagggccgtattgtgcggagagccttttgtctgcggtgctgcggccgtgggagccggcccccgcctcccgtttccgtcccgtctccaagcccgccgactccagctcgtcctcgccgcgccggtgccacctgtgagccgcggcgcgggcccgggctccgaaggcgcccctttgtcctgcggcgggcccgataagaagtcctcctggcggggctcggggtggtggggggcggggagatgaacgctgcggccagcagctaccccatggcctccctgtacgtgggcgacctgcattcggacgtcaccgaggccatgctgtacgaaaagttcagccccgcggggcctgtgctgtccatccgggtctgccgcgatatgatcacccgccgctccctgggctatgcctacgtcaacttccagcagccggccgacgctgagcgggctttggacaccatgaactttgatgtgattaagggaaagccaatccgcatcatgtggtctcagagggatccctctttgagaaaatctggtgtgggaaacgtcttcatcaagaacctggacaaatctatagataacaaggcactttatgatactttttctgcttttggaaacatactgtcctgcaaggtggtgtgtgatgagaacggctctaagggttatgcctttgtccacttcgagacccaagaggctgccgacaaggccatcgagaagatgaatggcatgctcctcaatgaccgcaaagtatttgtgggcagattcaagtctcgcaaagagcgggaagctgagcttggagccaaagccaaggaattcaccaatgtttatatcaaaaactttggggaagaggtggatgatgagagtctgaaagagctattcagtcagtttggtaagaccctaagtgtcaaggtgatgagagatcccaatgggaaatccaaaggctttggctttgtgagttacgaaaaacacgaggatgccaataaggctgtggaagagatgaatggaaaagaaataagtggtaaaatcatatttgtaggccgtgcacaaaagaaagtagaacggcaggcagagttaaaacggaaatttgaacagttgaaacaggagagaattagtcgatatcagggggtgaatctctacattaagaacttggatgacactattgatgatgagaaattaaggaaagaattttctccttttggatcaattaccagtgctaaggtaatgctggaggatggaagaagcaaagggtttggcttcgtctgcttctcatctcctgaagaagcaaccaaagcagtcactgagatgaatggacgcattgtgggctccaagccactatatgttgccctggcccagaggaaggaagagagaaaggctcacctgaccaaccagtatatgcaacgagtggctggaatgagagcacttcctgccaatgccatcttaaatcagttccagcctgcagcgggtggctactttgtgccagcagtcccacaggctcagggaaggcctccatattatacacctaaccagttagcacagatgaggcctaatccacgctggcagcaaggtgggagacctcaaggcttccaaggaatgccaagtgctatacgccagtctgggcctcgtccaactcttcgccatctggctccaactgggtctgagtgcccggaccgcttggctatggactttggtggggctggtgccgcccagcaagggctgactgacagctgccagtctggaggcgttcccacagctgtgcagaacttagcgccacgcgctgctgttgctgctgctgctccccgggctgttgccccctacaaatacgcctccagtgtccgcagccctcatcctgccatacagcctctgcaggcaccccagcctgcggtccatgtgcaggggcaggagccactgactgcctccatgctggctgcagcacccccccaggaacagaagcagatgctgggagaacgcttgttcccactcatccaaacaatgcattcaaatctggctgggaagatcacgggaatgctgctggagatagacaactctgagctgctgcacatgttagagtcccccgagtctctccgctccaaggtggatgaagctgtagcagttctacaggctcatcatgccaagaaagaagctgcccagaaggtgggcgctgttgctgctgctacctcttagacaaggaaaaaccgattcaaaagccaaataaccccttatggaattcaactcaaggtttgaagacttcctagcttgtcctatggacctcaacaccaaggattacaaattgcaaatttaataggtcattttgtatcaaaaggtcaattatgaagcacctagaatttttcaattatacgaatatgttctttgggttctgctgtggcccagacagtgttaactttttttttattgtgggttttgattttttcccccagaaattggttttatttgatgtacccaagtcttacgtttcccaataaagaaaaaaaatctccataaaaaaaaaaaaaaaaaaaaaaaaaaaaaaaaaaaaaaaaaaaaaaaaaaaaaaaaaaaaaaaaaaaaaaaaaaaaaaaaagggggggggggggaaaaaccggggggggaatgcccacgttttgtaagaaacagagggggcccccaagtagtggaggggagttattataaatcacagaggggagcgggcgcgaagttataaaaacaacaggtgtgagggagggaaaacaaacgccgttgtgcggaggatatcttttttgggagaaagaaagccaccactcatgtgtggggggagggaggaaacaataattggggaacaacaccctacacgcagaagatgattttacgcgcccccgggcgggcaaataataaaataaacgcgtggggggtttattatgtagtggtgcacccacacagcgtgtgattattgttgtgtgcggtagcataaaagattttgtgctgcacgacggcgatgtgatatatgaagaaaactaattttaccaggggg

SEQ ID NO: 281462 - DNA, 3647 bp, Homo sapiens
  misc_feature (13)..(13): n is a, c, g, or t
agcggctctctcngccccgggtcgctgccgcctccgccgctttcgggcttcgcagcctgaggaaaaaaagagaaaaagataaaaaaaatctgaaaacgcttcaaaatcctgaaaaaaaaaaaggaaaagaaaaaacgaatcctcggagaacccgcggggaagtcactttcgtacgcttccggcctgccccgcgcccgccgccgcagcgcttggcgtccgtcggtctccgtccgtcggtccgggggtgagccgcccgcccggcccgccgtgccctccccccgctcgggccccgagccccgcgccccgcgcctgccccggcgcaccacgtgtccgtgctgcccttcgccgcccgcccggggctcgccgagtcggcgcccacaaagatttggtttccctctgccccggcggttgtaatcttaaaccgccggagcccgaggcctatatttatagagaaacgcgtgtccccgaggccgccgtgggcagcgtccggtcgcctcttaaaggatttttacccttcggaaggggattccccgtttaatttttttcctactttgattttttgaaatttggagcttcgcaccaggaccgcggagaagtgcaaagtcgcggggagggccgtattgtgcggagagccttttgtctgcggtgctgcggccgtgggagccggcccccgcctcccgtttccgtcccgtctccaagcccgccgactccagctcgtcctcgccgcgccggtgccacctgtgagccgcggcgcgggcccgggctccgaaggcgcccctttgtcctgcggcgggcccgataagaagtcctcctggcggggctcggggtggtggggggcggggagatgaacgctgcggccagcagctaccccatggcctccctgtacgtgggcgacctgcattcggacgtcaccgaggccatgctgtacgaaaagttcagccccgcggggcctgtgctgtccatccgggtctgccgcgatatgatcacccgccgctccctgggctatgcctacgtcaacttccagcagccggccgacgctgagcgggctttggacaccatgaactttgatgtgattaagggaaagccaatccgcatcatgtggtctcagagggatccctctttgagaaaatctggtgtgggaaacgtcttcatcaagaacctggacaaatctatagataacaaggcactttatgatactttttctgcttttggaaacatactgtcctgcaaggtggtgtgtgatgagaacggctctaagggttatgcctttgtccacttcgagacccaagaggctgccgacaaggccatcgagaagatgaatggcatgctcctcaatgaccgcaaagtatttgtgggcagattcaagtctcgcaaagagcgggaagctgagcttggagccaaagccaaggaattcaccaatgtttatatcaaaaactttggggaagaggtggatgatgagagtctgaaagagctattcagtcagtttggtaagaccctaagtgtcaaggtgatgagagatcccaatgggaaatccaaaggctttggctttgtgagttacgaaaaacacgaggatgccaataaggctgtggaagagatgaatggaaaagaaataagtggtaaaatcatatttgtaggccgtgcacaaaagaaagtagaacggcaggcagagttaaaacggaaatttgaacagttgaaacaggagagaattagtcgatatcagggggtgaatctctacattaagaacttggatgacactattgatgatgagaaattaaggaaagaattttctccttttggatcaattaccagtgctaaggtaatgctggaggatggaagaagcaaagggtttggcttcgtctgcttctcatctcctgaagaagcaaccaaagcagtcactgagatgaatggacgcattgtgggctccaagccactatatgttgccctggcccagaggaaggaagagagaaaggctcacctgaccaaccagtatatgcaacgagtggctggaatgagagcacttcctgccaatgccatcttaaatcagttccagcctgcagcgggtggctactttgtgccagcagtcccacaggctcagggaaggcctccatattatacacctaaccagttagcacagatgaggcctaatccacgctggcagcaaggtgggagacctcaaggcttccaaggaatgccaagtgctatacgccagtctgggcctcgtccaactcttcgccatctggctccaactggtaatgctccggcctctcgtggcctccctactaccactcagagagtcggtgagcaaactggcctttagaagtgtggcctggggaggagggagtcaggatgactaggctctgtcctgggttggtcagtttgttgggctcgaatttatcgagtcctggttctgtaatcttagctgtgtgcttaggtggccacttcaggagcagagaaacagtatgagttctaggtgtgtcagttgcttttaacattctttgctcatcggtgacctatgtgaaaaaggttagttgtagaagtttgctagctggatgaccacagaggcagcttgttcttttgggtggggtgaggaatacaaggaaacagtgtatacagaatatgtcttgtattccaagatgtggaaagagttgtatgttatcctttggctcatcctcgaaagtagtagtggccccctgtgcaatgtgttgcgtaaacgtgctttgaaatttctccttccgtgggacgtggccagttggacatctgccgccaacactgatgtgcatttgctggtctgttgtagggtctgagtgcccggaccgcttggctatggactttggtggggctggtgccgcccagcaagggctgactgacagctgccagtctggaggcgttcccacagctgtgcagaacttagcgccacgcgctgctgttgctgctgctgctccccgggctgttgccccctacaaatacgcctccagtgtccgcagccctcatcctgccatacagcctctgcaggcaccccagcctgcggtccatgtgcaggggcaggagccactgactgcctccatgctggctgcagcacccccccaggaacagaagcagatgctgggagaacgcttgttcccactcatccaaacaatgcattcaaatctggctgggaagatcacgggaatgctgctggagatagacaactctgagctgctgcacatgttagagtcccccgagtctctccgctccaaggtggatgaagctgtagcagttctacaggctcatcatgccaagaaagaagctgcccagaaggtgggcgctgttgctgctgctacctcttagacaaggaaaaaccgattcaaaagccaaataaccccttatggaattcaactcaaggtttgaagacttcctagcttgtcctatggacctcaacaccaaggattacaaattgcaaatttaataggtcattttgtatcaaaaggtcaattatgaagcacctagaatttttcaattatacgaatatgttctttgggttctgctgtggcccagacagtgttaactttttttttattgtgggttttgattttttcccccagaaattggttttatttgatgtacccaagtcttacgtttcccaataaagaaaaaaaatctccataaaa

SEQ ID NO: 281463 - DNA, 3241 bp, Homo sapiens
  misc_feature (13)..(13): n is a, c, g, or t
agcggctctctcngccccgggtcgctgccgcctccgccgctttcgggcttcgcagcctgaggaaaaaaagagaaaaagataaaaaaaatctgaaaacgcttcaaaatcctgaaaaaaaaaaaggaaaagaaaaaacgaatcctcggagaacccgcggggaagtcactttcgtacgcttccggcctgccccgcgcccgccgccgcagcgcttggcgtccgtcggtctccgtccgtcggtccgggggtgagccgcccgcccggcccgccgtgccctccccccgctcgggccccgagccccgcgccccgcgcctgccccggcgcaccacgtgtccgtgctgcccttcgccgcccgcccggggctcgccgagtcggcgcccacaaagatttggtttccctctgccccggcggttgtaatcttaaaccgccggagcccgaggcctatatttatagagaaacgcgtgtccccgaggccgccgtgggcagcgtccggtcgcctcttaaaggatttttacccttcggaaggggattccccgtttaatttttttcctactttgattttttgaaatttggagcttcgcaccaggaccgcggagaagtgcaaagtcgcggggagggccgtattgtgcggagagccttttgtctgcggtgctgcggccgtgggagccggcccccgcctcccgtttccgtcccgtctccaagcccgccgactccagctcgtcctcgccgcgccggtgccacctgtgagccgcggcgcgggcccgggctccgaaggcgcccctttgtcctgcggcgggcccgataagaagtcctcctggcggggctcggggtggtggggggcggggagatgaacgctgcggccagcagctaccccatggcctccctgtacgtgggcgacctgcattcggacgtcaccgaggccatgctgtacgaaaagttcagccccgcggggcctgtgctgtccatccgggtctgccgcgatatgatcacccgccgctccctgggctatgcctacgtcaacttccagcagccggccgacgctgagcgggctttggacaccatgaactttgatgtgattaagggaaagccaatccgcatcatgtggtctcagagggatccctctttgagaaaatctggtgtgggaaacgtcttcatcaagaacctggacaaatctatagataacaaggcactttatgatactttttctgcttttggaaacatactgtcctgcaaggtggtgtgtgatgagaacggctctaagggttatgcctttgtccacttcgagacccaagaggctgccgacaaggccatcgagaagatgaatggcatgctcctcaatgaccgcaaagtatttgtgggcagattcaagtctcgcaaagagcgggaagctgagcttggagccaaagccaaggaattcaccaatgtttatatcaaaaactttggggaagaggtggatgatgagagtctgaaagagctattcagtcagtttggtaagaccctaagtgtcaaggtgatgagagatcccaatgggaaatccaaaggctttggctttgtgagttacgaaaaacacgaggatgccaataaggctgtggaagagatgaatggaaaagaaataagtggtaaaatcatatttgtaggccgtgcacaaaagaaagtagaacggcaggcagagttaaaacggaaatttgaacagttgaaacaggagagaattagtcgatatcagggggtgaatctctacattaagaacttggatgacactattgatgatgagaaattaaggaaagaattttctccttttggatcaattaccagtgctaaggtaatgctggaggatggaagaagcaaagggtttggcttcgtctgcttctcatctcctgaagaagcaaccaaagcagtcactgagatgaatggacgcattgtgggctccaagccactatatgttgccctggcccagaggaaggaagagagaaaggctcacctgaccaaccagtatatgcaacgagtggctggaatgagagcacttcctgccaatgccatcttaaatcagttccagcctgcagcgggtggctactttgtgccagcagtcccacaggctcagggaaggcctccatattatacacctaaccagttagcacagatgaggcctaatccacgctggcagcaaggtgggagacctcaaggcttccaaggaatgccaagtgctatacgccagtctgggcctcgtccaactcttcgccatctggctccaactggtaatgctccggcctctcgtggcctccctactaccactcagagagtcgggtctgagtgcccggaccgcttggctatggactttggtggggctggtgccgcccagcaagggctgactgacagctgccagtctggaggtggtattggatgcacacagaagggggaaagatgggatttgacgggtctttgcccagactgatgggctttaattgtatttgttctttccctaaggcgttcccacagctgtgcagaacttagcgccacgcgctgctgttgctgctgctgctccccgggctgttgccccctacaaatacgcctccagtgtccgcagccctcatcctgccatacagcctctgcaggcaccccagcctgcggtccatgtgcaggggcaggagccactgactgcctccatgctggctgcagcacccccccaggaacagaagcagatgctgggagaacgcttgttcccactcatccaaacaatgcattcaaatctggctgggaagatcacgggaatgctgctggagatagacaactctgagctgctgcacatgttagagtcccccgagtctctccgctccaaggtggatgaagctgtagcagttctacaggctcatcatgccaagaaagaagctgcccagaaggtgggcgctgttgctgctgctacctcttagacaaggaaaaaccgattcaaaagccaaataaccccttatggaattcaactcaaggtttgaagacttcctagcttgtcctatggacctcaacaccaaggattacaaattgcaaatttaataggtcattttgtatcaaaaggtcaattatgaagcacctagaatttttcaattatacgaatatgttctttgggttctgctgtggcccagacagtgttaactttttttttattgtgggttttgattttttcccccagaaattggttttatttgatgtacccaagtcttacgtttcccaataaagaaaaaaaatctccataaaa

SEQ ID NO: 281464 - DNA, 3193 bp, Homo sapiens
  misc_feature (13)..(13): n is a, c, g, or t
agcggctctctcngccccgggtcgctgccgcctccgccgctttcgggcttcgcagcctgaggaaaaaaagagaaaaagataaaaaaaatctgaaaacgcttcaaaatcctgaaaaaaaaaaaggaaaagaaaaaacgaatcctcggagaacccgcggggaagtcactttcgtacgcttccggcctgccccgcgcccgccgccgcagcgcttggcgtccgtcggtctccgtccgtcggtccgggggtgagccgcccgcccggcccgccgtgccctccccccgctcgggccccgagccccgcgccccgcgcctgccccggcgcaccacgtgtccgtgctgcccttcgccgcccgcccggggctcgccgagtcggcgcccacaaagatttggtttccctctgccccggcggttgtaatcttaaaccgccggagcccgaggcctatatttatagagaaacgcgtgtccccgaggccgccgtgggcagcgtccggtcgcctcttaaaggatttttacccttcggaaggggattccccgtttaatttttttcctactttgattttttgaaatttggagcttcgcaccaggaccgcggagaagtgcaaagtcgcggggagggccgtattgtgcggagagccttttgtctgcggtgctgcggccgtgggagccggcccccgcctcccgtttccgtcccgtctccaagcccgccgactccagctcgtcctcgccgcgccggtgccacctgtgagccgcggcgcgggcccgggctccgaaggcgcccctttgtcctgcggcgggcccgataagaagtcctcctggcggggctcggggtggtggggggcggggagatgaacgctgcggccagcagctaccccatggcctccctgtacgtgggcgacctgcattcggacgtcaccgaggccatgctgtacgaaaagttcagccccgcggggcctgtgctgtccatccgggtctgccgcgatatgatcacccgccgctccctgggctatgcctacgtcaacttccagcagccggccgacgctgagcgggctttggacaccatgaactttgatgtgattaagggaaagccaatccgcatcatgtggtctcagagggatccctctttgagaaaatctggtgtgggaaacgtcttcatcaagaacctggacaaatctatagataacaaggcactttatgatactttttctgcttttggaaacatactgtcctgcaaggtggtgtgtgatgagaacggctctaagggttatgcctttgtccacttcgagacccaagaggctgccgacaaggccatcgagaagatgaatggcatgctcctcaatgaccgcaaagtatttgtgggcagattcaagtctcgcaaagagcgggaagctgagcttggagccaaagccaaggaattcaccaatgtttatatcaaaaactttggggaagaggtggatgatgagagtctgaaagagctattcagtcagtttggtaagaccctaagtgtcaaggtgatgagagatcccaatgggaaatccaaaggctttggctttgtgagttacgaaaaacacgaggatgccaataaggctgtggaagagatgaatggaaaagaaataagtggtaaaatcatatttgtaggccgtgcacaaaagaaagtagaacggcaggcagagttaaaacggaaatttgaacagttgaaacaggagagaattagtcgatatcagggggtgaatctctacattaagaacttggatgacactattgatgatgagaaattaaggaaagaattttctccttttggatcaattaccagtgctaaggtaatgctggaggatggaagaagcaaagggtttggcttcgtctgcttctcatctcctgaagaagcaaccaaagcagtcactgagatgaatggacgcattgtgggctccaagccactatatgttgccctggcccagaggaaggaagagagaaaggctcacctgaccaaccagtatatgcaacgagtggctggaatgagagcacttcctgccaatgccatcttaaatcagttccagcctgcagcgggtggctactttgtgccagcagtcccacaggctcagggaaggcctccatattatacacctaaccagttagcacagatgaggcctaatccacgctggcagcaaggtgggagacctcaaggcttccaaggaatgccaagtgctatacgccagtctgggcctcgtccaactcttcgccatctggctccaactgggtctgagtgcccggaccgcttggctatggactttggtggggctggtgccgcccagcaagggctgactgacagctgccagtctggaggtggtattggatgcacacagaagggggaaagatgggatttgacgggtctttgcccagactgatgggctttaattgtatttgttctttccctaaggcgttcccacagctgtgcagaacttagcgccacgcgctgctgttgctgctgctgctccccgggctgttgccccctacaaatacgcctccagtgtccgcagccctcatcctgccatacagcctctgcaggcaccccagcctgcggtccatgtgcaggggcaggagccactgactgcctccatgctggctgcagcacccccccaggaacagaagcagatgctgggagaacgcttgttcccactcatccaaacaatgcattcaaatctggctgggaagatcacgggaatgctgctggagatagacaactctgagctgctgcacatgttagagtcccccgagtctctccgctccaaggtggatgaagctgtagcagttctacaggctcatcatgccaagaaagaagctgcccagaaggtgggcgctgttgctgctgctacctcttagacaaggaaaaaccgattcaaaagccaaataaccccttatggaattcaactcaaggtttgaagacttcctagcttgtcctatggacctcaacaccaaggattacaaattgcaaatttaataggtcattttgtatcaaaaggtcaattatgaagcacctagaatttttcaattatacgaatatgttctttgggttctgctgtggcccagacagtgttaactttttttttattgtgggttttgattttttcccccagaaattggttttatttgatgtacccaagtcttacgtttcccaataaagaaaaaaaatctccataaaa

SEQ ID NO: 281465 - DNA, 3284 bp, Homo sapiens
  misc_feature (13)..(13): n is a, c, g, or t
agcggctctctcngccccgggtcgctgccgcctccgccgctttcgggcttcgcagcctgaggaaaaaaagagaaaaagataaaaaaaatctgaaaacgcttcaaaatcctgaaaaaaaaaaaggaaaagaaaaaacgaatcctcggagaacccgcggggaagtcactttcgtacgcttccggcctgccccgcgcccgccgccgcagcgcttggcgtccgtcggtctccgtccgtcggtccgggggtgagccgcccgcccggcccgccgtgccctccccccgctcgggccccgagccccgcgccccgcgcctgccccggcgcaccacgtgtccgtgctgcccttcgccgcccgcccggggctcgccgagtcggcgcccacaaagatttggtttccctctgccccggcggttgtaatcttaaaccgccggagcccgaggcctatatttatagagaaacgcgtgtccccgaggccgccgtgggcagcgtccggtcgcctcttaaaggatttttacccttcggaaggggattccccgtttaatttttttcctactttgattttttgaaatttggagcttcgcaccaggaccgcggagaagtgcaaagtcgcggggagggccgtattgtgcggagagccttttgtctgcggtgctgcggccgtgggagccggcccccgcctcccgtttccgtcccgtctccaagcccgccgactccagctcgtcctcgccgcgccggtgccacctgtgagccgcggcgcgggcccgggctccgaaggcgcccctttgtcctgcggcgggcccgataagaagtcctcctggcggggctcggggtggtggggggcggggagatgaacgctgcggccagcagctaccccatggcctccctgtacgtgggcgacctgcattcggacgtcaccgaggccatgctgtacgaaaagttcagccccgcggggcctgtgctgtccatccgggtctgccgcgatatgatcacccgccgctccctgggctatgcctacgtcaacttccagcagccggccgacgctgagcgggctttggacaccatgaactttgatgtgattaagggaaagccaatccgcatcatgtggtctcagagggatccctctttgagaaaatctggtgtgggaaacgtcttcatcaagaacctggacaaatctatagataacaaggcactttatgatactttttctgcttttggaaacatactgtcctgcaaggtggtgtgtgatgagaacggctctaagggttatgcctttgtccacttcgagacccaagaggctgccgacaaggccatcgagaagatgaatggcatgctcctcaatgaccgcaaagtgtgagtgtcccagtccggagcaacaaccatcgcatgagccagccgtggccccacctcgctattaactggcacacacaaggcggctactggttctcggcccaagtgtggcctgctcctacctctccactccagggctgatttgtgggcagattcaagtctcgcaaagagcgggaagctgagcttggagccaaagccaaggaattcaccaatgtttatatcaaaaactttggggaagaggtggatgatgagagtctgaaagagctattcagtcagtttggtaagaccctaagtgtcaaggtgatgagagatcccaatgggaaatccaaaggctttggctttgtgagttacgaaaaacacgaggatgccaataaggctgtggaagagatgaatggaaaagaaataagtggtaaaatcatatttgtaggccgtgcacaaaagaaagtagaacggcaggcagagttaaaacggaaatttgaacagttgaaacaggagagaattagtcgatatcagggggtgaatctctacattaagaacttggatgacactattgatgatgagaaattaaggaaagaattttctccttttggatcaattaccagtgctaaggtaatgctggaggatggaagaagcaaagggtttggcttcgtctgcttctcatctcctgaagaagcaaccaaagcagtcactgagatgaatggacgcattgtgggctccaagccactatatgttgccctggcccagaggaaggaagagagaaaggctcacctgaccaaccagtatatgcaacgagtggctggaatgagagcacttcctgccaatgccatcttaaatcagttccagcctgcagcgggtggctactttgtgccagcagtcccacaggctcagggaaggcctccatattatacacctaaccagttagcacagatgaggcctaatccacgctggcagcaaggtgggagacctcaaggcttccaaggaatgccaagtgctatacgccagtctgggcctcgtccaactcttcgccatctggctccaactggtaatgctccggcctctcgtggcctccctactaccactcagagagtcgggtctgagtgcccggaccgcttggctatggactttggtggggctggtgccgcccagcaagggctgactgacagctgccagtctggaggcgttcccacagctgtgcagaacttagcgccacgcgctgctgttgctgctgctgctccccgggctgttgccccctacaaatacgcctccagtgtccgcagccctcatcctgccatacagcctctgcaggcaccccagcctgcggtccatgtgcaggggcaggagccactgactgcctccatgctggctgcagcacccccccaggaacagaagcagatgctgggagaacgcttgttcccactcatccaaacaatgcattcaaatctggctgggaagatcacgggaatgctgctggagatagacaactctgagctgctgcacatgttagagtcccccgagtctctccgctccaaggtggatgaagctgtagcagttctacaggctcatcatgccaagaaagaagctgcccagaaggtgggcgctgttgctgctgctacctcttagacaaggaaaaaccgattcaaaagccaaataaccccttatggaattcaactcaaggtttgaagacttcctagcttgtcctatggacctcaacaccaaggattacaaattgcaaatttaataggtcattttgtatcaaaaggtcaattatgaagcacctagaatttttcaattatacgaatatgttctttgggttctgctgtggcccagacagtgttaactttttttttattgtgggttttgattttttcccccagaaattggttttatttgatgtacccaagtcttacgtttcccaataaagaaaaaaaatctccataaaa

SEQ ID NO: 281466 - DNA, 3143 bp, Homo sapiens
  misc_feature (13)..(13): n is a, c, g, or t
agcggctctctcngccccgggtcgctgccgcctccgccgctttcgggcttcgcagcctgaggaaaaaaagagaaaaagataaaaaaaatctgaaaacgcttcaaaatcctgaaaaaaaaaaaggaaaagaaaaaacgaatcctcggagaacccgcggggaagtcactttcgtacgcttccggcctgccccgcgcccgccgccgcagcgcttggcgtccgtcggtctccgtccgtcggtccgggggtgagccgcccgcccggcccgccgtgccctccccccgctcgggccccgagccccgcgccccgcgcctgccccggcgcaccacgtgtccgtgctgcccttcgccgcccgcccggggctcgccgagtcggcgcccacaaagatttggtttccctctgccccggcggttgtaatcttaaaccgccggagcccgaggcctatatttatagagaaacgcgtgtccccgaggccgccgtgggcagcgtccggtcgcctcttaaaggatttttacccttcggaaggggattccccgtttaatttttttcctactttgattttttgaaatttggagcttcgcaccaggaccgcggagaagtgcaaagtcgcggggagggccgtattgtgcggagagccttttgtctgcggtgctgcggccgtgggagccggcccccgcctcccgtttccgtcccgtctccaagcccgccgactccagctcgtcctcgccgcgccggtgccacctgtgagccgcggcgcgggcccgggctccgaaggcgcccctttgtcctgcggcgggcccgataagaagtcctcctggcggggctcggggtggtggggggcggggagatgaacgctgcggccagcagctaccccatggcctccctgtacgtgggcgacctgcattcggacgtcaccgaggccatgctgtacgaaaagttcagccccgcggggcctgtgctgtccatccgggtctgccgcgatatgatcacccgccgctccctgggctatgcctacgtcaacttccagcagccggccgacgctgagcgggctttggacaccatgaactttgatgtgattaagggaaagccaatccgcatcatgtggtctcagagggatccctctttgagaaaatctggtgtgggaaacgtcttcatcaagaacctggacaaatctatagataacaaggcactttatgatactttttctgcttttggaaacatactgtcctgcaaggtggtgtgtgatgagaacggctctaagggttatgcctttgtccacttcgagacccaagaggctgccgacaaggccatcgagaagatgaatggcatgctcctcaatgaccgcaaagtatttgtgggcagattcaagtctcgcaaagagcgggaagctgagcttggagccaaagccaaggaattcaccaatgtttatatcaaaaactttggggaagaggtggatgatgagagtctgaaagagctattcagtcagtttggtaagaccctaagtgtcaaggtgatgagagatcccaatgggaaatccaaaggctttggctttgtgagttacgaaaaacacgaggatgccaataaggctgtggaagagatgaatggaaaagaaataagtggtaaaatcatatttgtaggccgtgcacaaaagaaagtagaacggcaggcagagttaaaacggaaatttgaacagttgaaacaggagagaattagtcgatatcagggggtgaatctctacattaagaacttggatgacactattgatgatgagaaattaaggaaagaattttctccttttggatcaattaccagtgctaaggtaatgctggaggatggaagaagcaaagggtttggcttcgtctgcttctcatctcctgaagaagcaaccaaagcagtcactgagatgaatggacgcattgtgggctccaagccactatatgttgccctggcccagaggaaggaagagagaaaggctcacctgaccaaccagtatatgcaacgagtggctggaatgagagcacttcctgccaatgccatcttaaatcagttccagcctgcagcgggtggctactttgtgccagcagtcccacaggctcagggaaggcctccatattatacacctaaccagttagcacagatgaggcctaatccacgctggcagcaaggtgggagacctcaaggcttccaaggaatgccaagtgctatacgccagtctgggcctcgtccaactcttcgccatctggctccaactggtaatgctccggcctctcgtggcctccctactaccactcagagagtcgggtctgagtgcccggaccgcttggctatggactttggtggggctggtgccgcccagcaagggctgactgacagctgccagtctggaggcgttcccacagctgtgcagaacttagcgccacgcgctgctgttgctgctgctgctccccgggctgttgccccctacaaatacgcctccagtgtccgcagccctcatcctgccatacagcctctgcaggcaccccagcctgcggtccatgtgcaggggcaggagccactgactgcctccatgctggctgcagcacccccccaggaacagaagcagatgctgggagaacgcttgttcccactcatccaaacaatgcattcaaatctggctgggaagatcacgggaatgctgctggagatagacaactctgagctgctgcacatgttagagtcccccgagtctctccgctccaaggtggatgaagctgtagcagttctacaggctcatcatgccaagaaagaagctgcccagaaggtgggcgctgttgctgctgctacctcttagacaaggaaaaaccgattcaaaagccaaataaccccttatggaattcaactcaaggtttgaagacttcctagcttgtcctatggacctcaacaccaaggattacaaattgcaaatttaataggtcattttgtatcaaaaggtcaattatgaagcacctagaatttttcaattatacgaatatgttctttgggttctgctgtggcccagacagtgttaactttttttttattgtgggttttgattttttcccccagaaattggttttatttgatgtacccaagtcttacgttcaagtgtcgaatcctcggagcacccg

SEQ ID NO: 281467 - DNA, 3310 bp, Homo sapiens
  misc_feature (13)..(13): n is a, c, g, or t
agcggctctctcngccccgggtcgctgccgcctccgccgctttcgggcttcgcagcctgaggaaaaaaagagaaaaagataaaaaaaatctgaaaacgcttcaaaatcctgaaaaaaaaaaaggaaaagaaaaaacgaatcctcggagaacccgcggggaagtcactttcgtacgcttccggcctgccccgcgcccgccgccgcagcgcttggcgtccgtcggtctccgtccgtcggtccgggggtgagccgcccgcccggcccgccgtgccctccccccgctcgggccccgagccccgcgccccgcgcctgccccggcgcaccacgtgtccgtgctgcccttcgccgcccgcccggggctcgccgagtcggcgcccacaaagatttggtttccctctgccccggcggttgtaatcttaaaccgccggagcccgaggcctatatttatagagaaacgcgtgtccccgaggccgccgtgggcagcgtccggtcgcctcttaaaggatttttacccttcggaaggggattccccgtttaatttttttcctactttgattttttgaaatttggagcttcgcaccaggaccgcggagaagtgcaaagtcgcggggagggccgtattgtgcggagagccttttgtctgcggtgctgcggccgtgggagccggcccccgcctcccgtttccgtcccgtctccaagcccgccgactccagctcgtcctcgccgcgccggtgccacctgtgagccgcggcgcgggcccgggctccgaaggcgcccctttgtcctgcggcgggcccgataagaagtcctcctggcggggctcggggtggtggggggcggggagatgaacgctgcggccagcagctaccccatggcctccctgtacgtgggcgacctgcattcggacgtcaccgaggccatgctgtacgaaaagttcagccccgcggggcctgtgctgtccatccgggtctgccgcgatatgatcacccgccgctccctgggctatgcctacgtcaacttccagcagccggccgacgctgagcgggctttggacaccatgaactttgatgtgattaagggaaagccaatccgcatcatgtggtctcagagggatccctctttgagaaaatctggtgtgggaaacgtcttcatcaagaacctggacaaatctatagataacaaggcactttatgatactttttctgcttttggaaacatactgtcctgcaaggtggtgtgtgatgagaacggctctaagggttatgcctttgtccacttcgagacccaagaggctgccgacaaggccatcgagaagatgaatggcatgctcctcaatgaccgcaaagtatttgtgggcagattcaagtctcgcaaagagcgggaagctgagcttggagccaaagccaaggaattcaccaatgtttatatcaaaaactttggggaagaggtggatgatgagagtctgaaagagctattcagtcagtttggtaagaccctaagtgtcaaggtgatgagagatcccaatgggaaatccaaaggctttggctttgtgagttacgaaaaacacgaggatgccaataaggctgtggaagagatgaatggaaaagaaataagtggtaaaatcatatttgtaggccgtgcacaaaagaaagtagaacggcaggcagagttaaaacggaaatttgaacagttgaaacaggagagaattagtcgatatcagggggtgaatctctacattaagaacttggatgacactattgatgatgagaaattaaggaaagaattttctccttttggatcaattaccagtgctaaggtaatgctggaggatggaagaagcaaagggtttggcttcgtctgcttctcatctcctgaagaagcaaccaaagcagtcactgagatgaatggacgcattgtgggctccaagccactatatgttgccctggcccagaggaaggaagagagaaaggctcacctgaccaaccagtatatgcaacgagtggctggaatgagagcacttcctgccaatgccatcttaaatcagttccagcctgcagcgggtggctactttgtgccagcagtcccacaggctcagggaaggcctccatattatacacctaaccagttagcacagatgaggcctaatccacgctggcagcaaggtgggagacctcaaggcttccaaggaatgccaagtgctatacgccagtctgggcctcgtccaactcttcgccatctggctccaactggtaatgctccggcctctcgtggcctccctactaccactcagagagtcgggtctgagtgcccggaccgcttggctatggactttggtggggctggtgccgcccagcaagggctgactgacagctgccagtctggaggcgttcccacagctgtgcagaacttagcgccacgcgctgctgttgctgctgctgctccccgggctgttgccccctacaaatacgcctccagtgtccgcagccctcatcctgccatacagcctctgcaggcaccccagcctgcggtccatgtgcaggggcaggagccactgactgcctccatgctggctgcagcacccccccaggaacagaagcagatgctgggagaacgcttgttcccactcatccaaacaatgcattcaaatctggctgggaagatcacgggaatgctgctggagatagacaactctgagctgctgcacatgttagagtcccccgagtctctccgctccaaggtggatgaagctgtagcagttctacaggctcatcatgccaagaaagaagctgcccagaaggtgggcgctgttgctgctgctacctcttagacaaggaaaaaccgattcaaaagccaaataaccccttatggaattcaactcaaggtttgaagacttcctagcttgtcctatggacctcaacaccaaggattacaaattgcaaatttaataggtcattttgtatcaaaaggtcaattatgaagcacctagaatttttcaattatacgaatatgttctttgggtccgtggggcagacaggtaacttaataattggggaagataaccccagaatggctaattgatgtcccaggtcttagtcccattacgaaacatttcctaatcaaagaaaaaaggggaccgcaaaataccacgagccaactacgcgcccacatttgagcagggactagagaggataaaagcagcagccgcataacacgaggaaatacgtgactggacgcaattctgagtagtcaacacacacaccagatattagtacgcatcgcaattaacaaccaacacactagtacttgtaca

SEQ ID NO: 281468 - DNA, 2944 bp, Homo sapiens
  misc_feature (13)..(13): n is a, c, g, or t
agcggctctctcngccccgggtcgctgccgcctccgccgctttcgggcttcgcagcctgaggaaaaaaagagaaaaagataaaaaaaatctgaaaacgcttcaaaatcctgaaaaaaaaaaaggaaaagaaaaaacgaatcctcggagaacccgcggggaagtcactttcgtacgcttccggcctgccccgcgcccgccgccgcagcgcttggcgtccgtcggtctccgtccgtcggtccgggggtgagccgcccgcccggcccgccgtgccctccccccgctcgggccccgagccccgcgccccgcgcctgccccggcgcaccacgtgtccgtgctgcccttcgccgcccgcccggggctcgccgagtcggcgcccacaaagatttggtttccctctgccccggcggttgtaatcttaaaccgccggagcccgaggcctatatttatagagaaacgcgtgtccccgaggccgccgtgggcagcgtccggtcgcctcttaaaggatttttacccttcggaaggggattccccgtttaatttttttcctactttgattttttgaaatttggagcttcgcaccaggaccgcggagaagtgcaaagtcgcggggagggccgtattgtgcggagagccttttgtctgcggtgctgcggccgtgggagccggcccccgcctcccgtttccgtcccgtctccaagcccgccgactccagctcgtcctcgccgcgccggtgccacctgtgagccgcggcgcgggcccgggctccgaaggcgcccctttgtcctgcggcgggcccgataagaagtcctcctggcggggctcggggtggtggggggcggggagatgaacgctgcggccagcagctaccccatggcctccctgtacgtgggcgacctgcattcggacgtcaccgaggccatgctgtacgaaaagttcagccccgcggggcctgtgctgtccatccgggtctgccgcgatatgatcacccgccgctccctgggctatgcctacgtcaacttccagcagccggccgacgctgagcgggctttggacaccatgaactttgatgtgattaagggaaagccaatccgcatcatgtggtctcagagggatccctctttgagaaaatctggtgtgggaaacgtcttcatcaagaacctggacaaatctatagataacaaggcactttatgatactttttctgcttttggaaacatactgtcctgcaaggtggtgtgtgatgagaacggctctaagggttatgcctttgtccacttcgagacccaagaggctgccgacaaggccatcgagaagatgaatggcatgctcctcaatgaccgcaaagtatttgtgggcagattcaagtctcgcaaagagcgggaagctgagcttggagccaaagccaaggaattcaccaatgtttatatcaaaaactttggggaagaggtggatgatgagagtctgaaagagctattcagtcagtttggtaagaccctaagtgtcaaggtgatgagagatcccaatgggaaatccaaaggctttggctttgtgagttacgaaaaacacgaggatgccaataaggctgtggaagagatgaatggaaaagaaataagtggtaaaatcatatttgtaggccgtgcacaaaagaaagtagaacggcaggcagagttaaaacggaaatttgaacagttgaaacaggagagaattagtcgatatcagggggtgaatctctacattaagaacttggatgacactattgatgatgagaaattaaggaaagaattttctccttttggatcaattaccagtgctaaggtaatgctggaggatggaagaagcaaagggtttggcttcgtctgcttctcatctcctgaagaagcaaccaaagcagtcactgagatgaatggacgcattgtgggctccaagccactatatgttgccctggcccagaggaaggaagagagaaaggctcacctgaccaaccagtatatgcaacgagtggctggaatgagagcacttcctgccaatgccatcttaaatcagttccagcctgcagcgggtggctactttgtgccagcagtcccacaggctcagggaaggcctccatattatacacctaaccagttagcacagatgaggcctaatccacgctggcagcaaggtgggagacctcaaggcttccaaggaatgccaagtgctatacgccagtctgggcctcgtccaactcttcgccatctggctccaactgggtctgagtgcccggaccgcttggctatggactttggtggggctggtgccgcccagcaagggctgactgacagctgccagtctggaggcgttcccacagctgtgcagaacttagcgccacgcgctgctgttgctgctgctgctccccgggctgttgccccctacaaatacgcctccagtgtccgcagccctcatcctgccatacagcctctgcaggcaccccagcctgcggtccatgtgcaggggcaggagccactgactgcctccatgctggctgcagcacccccccaggaacagaagcagatgctgggagaacgcttgttcccactcatccaaacaatgcattcaaatctggctgggaagatcacgggaatgctgctggagatagacaactctgagctgctgcacatgttagagtcccccgagtctctccgctccaaggtggatgaagctgtagcagttctacaggctcatcatgccaagaaagaagctgcccagaaggtgggcgctgttgctgctgctacctcttagacaaggaaaaaccgattcaaaagccaaataaccccttatggaattcaactcaaggtttgaagacttcctagcttgtcctatggacctcaacaccaaggattacaaattgcaaatttaataggtcattttgtatcaaaaggtggtctcacggggggatacctctag

SEQ ID NO: 281469 - DNA, 3461 bp, Homo sapiens
  misc_feature (13)..(13): n is a, c, g, or t
agcggctctctcngccccgggtcgctgccgcctccgccgctttcgggcttcgcagcctgaggaaaaaaagagaaaaagataaaaaaaatctgaaaacgcttcaaaatcctgaaaaaaaaaaaggaaaagaaaaaacgaatcctcggagaacccgcggggaagtcactttcgtacgcttccggcctgccccgcgcccgccgccgcagcgcttggcgtccgtcggtctccgtccgtcggtccgggggtgagccgcccgcccggcccgccgtgccctccccccgctcgggccccgagccccgcgccccgcgcctgccccggcgcaccacgtgtccgtgctgcccttcgccgcccgcccggggctcgccgagtcggcgcccacaaagatttggtttccctctgccccggcggttgtaatcttaaaccgccggagcccgaggcctatatttatagagaaacgcgtgtccccgaggccgccgtgggcagcgtccggtcgcctcttaaaggatttttacccttcggaaggggattccccgtttaatttttttcctactttgattttttgaaatttggagcttcgcaccaggaccgcggagaagtgcaaagtcgcggggagggccgtattgtgcggagagccttttgtctgcggtgctgcggccgtgggagccggcccccgcctcccgtttccgtcccgtctccaagcccgccgactccagctcgtcctcgccgcgccggtgccacctgtgagccgcggcgcgggcccgggctccgaaggcgcccctttgtcctgcggcgggcccgataagaagtcctcctggcggggctcggggtggtggggggcggggagatgaacgctgcggccagcagctaccccatggcctccctgtacgtgggcgacctgcattcggacgtcaccgaggccatgctgtacgaaaagttcagccccgcggggcctgtgctgtccatccgggtctgccgcgatatgatcacccgccgctccctgggctatgcctacgtcaacttccagcagccggccgacgctgagcgggctttggacaccatgaactttgatgtgattaagggaaagccaatccgcatcatgtggtctcagagggatccctctttgagaaaatctggtgtgggaaacgtcttcatcaagaacctggacaaatctatagataacaaggcactttatgatactttttctgcttttggaaacatactgtcctgcaaggtggtgtgtgatgagaacggctctaagggttatgcctttgtccacttcgagacccaagaggctgccgacaaggccatcgagaagatgaatggcatgctcctcaatgaccgcaaagtatttgtgggcagattcaagtctcgcaaagagcgggaagctgagcttggagccaaagccaaggaattcaccaatgtttatatcaaaaactttggggaagaggtggatgatgagagtctgaaagagctattcagtcagtttggtaagaccctaagtgtcaaggtgatgagagatcccaatgggaaatccaaaggctttggctttgtgagttacgaaaaacacgaggatgccaataaggctgtggaagagatgaatggaaaagaaataagtggtaaaatcatatttgtaggccgtgcacaaaagaaagtagaacggcaggcagagttaaaacggaaatttgaacagttgaaacaggagagaattagtcgatatcagggggtgaatctctacattaagaacttggatgacactattgatgatgagaaattaaggaaagaattttctccttttggatcaattaccagtgctaaggtaatgctggaggatggaagaagcaaagggtttggcttcgtctgcttctcatctcctgaagaagcaaccaaagcagtcactgagatgaatggacgcattgtgggctccaagccactatatgttgccctggcccagaggaaggaagagagaaaggctcacctgaccaaccagtatatgcaacgagtggctggaatgagagcacttcctgccaatgccatcttaaatcagttccagcctgcagcgggtggctactttgtgccagcagtcccacaggctcagggaaggcctccatattatacacctaaccagttagcacagatgaggcctaatccacgctggcagcaaggtgggagacctcaaggcttccaaggaatgccaagtgctatacgccagtctgggcctcgtccaactcttcgccatctggctccaactgggtctgagtgcccggaccgcttggctatggactttggtggggctggtgccgcccagcaagggctgactgacagctgccagtctggaggcgttcccacagctgtgcagaacttagcgccacgcgctgctgttgctgctgctgctccccgggctgttgccccctacaaatacgcctccagtgtccgcagccctcatcctgccatacagcctctgcaggcaccccagcctgcggtccatgtgcaggggcaggagccactgactgcctccatgctggctgcagcacccccccaggaacagaagcagatgctgggagaacgcttgttcccactcatccaaacaatgcattcaaatctggctgggaagatcacgggaatgctgctggagatagacaactctgagctgctgcacatgttagagtcccccgagtctctccgctccaaggtggatgaagctgtagcagttctacaggctcatcatgccaagaaagaagctgcccagaaggtgggcgctgttgctgctgctacctcttagacaaggaaaaaccgtatgtgtggctattttcatttttgttcctatgagcattgttcctatgagcattgtctttgtggtttgacctgaggttgtatatatgctcactgcttagctctgggaatacaataagtacagttagttacacggagtgtgttgcaggtgacttcttatcatgaggactgtggactttgtctgcaggagcttgagtgaataataaaactagtactggttgatggttgtaggtgtctccagatagggaaagaagagacagtaaaataagctaaggaaaaagcacatggtaaggaccagagctggtgtgttgggagggttgacttggcatagtcatgaccctcttgtcaagggcctcaggagccttgtcatctagtggtaaagaccagagatgctgctaaatgttgtacagtacacaggaggacagacccaacagaatgtccaaagtgtcaatagcactgaggttgagaaactctcttctagaataccttcctttatccactatatgttaatgaatctaaattatttgattatgcatttatttgtgttggtgcttttctttacagggattcaaaagccaaataaccccttatggaattcaactcaaggtttgaagacttcctagcttgtcctatgggctctacacagctgaagaataagtccggtgagtcac

SEQ ID NO: 281470 - DNA, 2784 bp, Homo sapiens
  misc_feature (13)..(13): n is a, c, g, or t
agcggctctctcngccccgggtcgctgccgcctccgccgctttcgggcttcgcagcctgaggaaaaaaagagaaaaagataaaaaaaatctgaaaacgcttcaaaatcctgaaaaaaaaaaaggaaaagaaaaaacgaatcctcggagaacccgcggggaagtcactttcgtacgcttccggcctgccccgcgcccgccgccgcagcgcttggcgtccgtcggtctccgtccgtcggtccgggggtgagccgcccgcccggcccgccgtgccctccccccgctcgggccccgagccccgcgccccgcgcctgccccggcgcaccacgtgtccgtgctgcccttcgccgcccgcccggggctcgccgagtcggcgcccacaaagatttggtttccctctgccccggcggttgtaatcttaaaccgccggagcccgaggcctatatttatagagaaacgcgtgtccccgaggccgccgtgggcagcgtccggtcgcctcttaaaggatttttacccttcggaaggggattccccgtttaatttttttcctactttgattttttgaaatttggagcttcgcaccaggaccgcggagaagtgcaaagtcgcggggagggccgtattgtgcggagagccttttgtctgcggtgctgcggccgtgggagccggcccccgcctcccgtttccgtcccgtctccaagcccgccgactccagctcgtcctcgccgcgccggtgccacctgtgagccgcggcgcgggcccgggctccgaaggcgcccctttgtcctgcggcgggcccgataagaagtcctcctggcggggctcggggtggtggggggcggggagatgaacgctgcggccagcagctaccccatggcctccctgtacgtgggcgacctgcattcggacgtcaccgaggccatgctgtacgaaaagttcagccccgcggggcctgtgctgtccatccgggtctgccgcgatatgatcacccgccgctccctgggctatgcctacgtcaacttccagcagccggccgacgctgagcgggctttggacaccatgaactttgatgtgattaagggaaagccaatccgcatcatgtggtctcagagggatccctctttgagaaaatctggtgtgggaaacgtcttcatcaagaacctggacaaatctatagataacaaggcactttatgatactttttctgcttttggaaacatactgtcctgcaaggtggtgtgtgatgagaacggctctaagggttatgcctttgtccacttcgagacccaagaggctgccgacaaggccatcgagaagatgaatggcatgctcctcaatgaccgcaaagtatttgtgggcagattcaagtctcgcaaagagcgggaagctgagcttggagccaaagccaaggaattcaccaatgtttatatcaaaaactttggggaagaggtggatgatgagagtctgaaagagctattcagtcagtttggtaagaccctaagtgtcaaggtgatgagagatcccaatgggaaatccaaaggctttggctttgtgagttacgaaaaacacgaggatgccaataaggctgtggaagagatgaatggaaaagaaataagtggtaaaatcatatttgtaggccgtgcacaaaagaaagtagaacggcaggcagagttaaaacggaaatttgaacagttgaaacaggagagaattagtcgatatcagggggtgaatctctacattaagaacttggatgacactattgatgatgagaaattaaggaaagaattttctccttttggatcaattaccagtgctaaggtaatgctggaggatggaagaagcaaagggtttggcttcgtctgcttctcatctcctgaagaagcaaccaaagcagtcactgagatgaatggacgcattgtgggctccaagccactatatgttgccctggcccagaggaaggaagagagaaaggctcacctgaccaaccagtatatgcaacgagtggctggaatgagagcacttcctgccaatgccatcttaaatcagttccagcctgcagcgggtggctactttgtgccagcagtcccacaggctcagggaaggcctccatattatacacctaaccagttagcacagatgaggcctaatccacgctggcagcaaggtgggagacctcaaggcttccaaggaatgccaagtgctatacgccagtctgggcctcgtccaactcttcgccatctggctccaactgggtctgagtgcccggaccgcttggctatggactttggtggggctggtgccgcccagcaagggctgactgacagctgccagtctggaggcgttcccacagctgtgcagaacttagcgccacgcgctgctgttgctgctgctgctccccgggctgttgccccctacaaatacgcctccagtgtccgcagccctcatcctgccatacagcctctgcaggcaccccagcctgcggtccatgtgcaggggcaggagccactgactgcctccatgctggctgcagcacccccccaggaacagaagcagatgctgggagaacgcttgttcccactcatccaaacaatgcattcaaatctggctgggaagatcacgggaatgctgctggagatagacaactctgagctgctgcacatgttagagtcccccgagtctctccgctccaaggtggatgaagctgtagcagttctacaggctcatcatgccaagaaagaagctgcccagcaccacgaatcgcacagcacgggatcctctagatcacc

SEQ ID NO: 281471 - DNA, 2293 bp, Homo sapiens
  misc_feature (13)..(13): n is a, c, g, or t
agcggctctctcngccccgggtcgctgccgcctccgccgctttcgggcttcgcagcctgaggaaaaaaagagaaaaagataaaaaaaatctgaaaacgcttcaaaatcctgaaaaaaaaaaaggaaaagaaaaaacgaatcctcggagaacccgcggggaagtcactttcgtacgcttccggcctgccccgcgcccgccgccgcagcgcttggcgtccgtcggtctccgtccgtcggtccgggggtgagccgcccgcccggcccgccgtgccctccccccgctcgggccccgagccccgcgccccgcgcctgccccggcgcaccacgtgtccgtgctgcccttcgccgcccgcccggggctcgccgagtcggcgcccacaaagatttggtttccctctgccccggcggttgtaatcttaaaccgccggagcccgaggcctatatttatagagaaacgcgtgtccccgaggccgccgtgggcagcgtccggtcgcctcttaaaggatttttacccttcggaaggggattccccgtttaatttttttcctactttgattttttgaaatttggagcttcgcaccaggaccgcggagaagtgcaaagtcgcggggagggccgtattgtgcggagagccttttgtctgcggtgctgcggccgtgggagccggcccccgcctcccgtttccgtcccgtctccaagcccgccgactccagctcgtcctcgccgcgccggtgccacctgtgagccgcggcgcgggcccgggctccgaaggcgcccctttgtcctgcggcgggcccgataagaagtcctcctggcggggctcggggtggtggggggcggggagatgaacgctgcggccagcagctaccccatggcctccctgtacgtgggcgacctgcattcggacgtcaccgaggccatgctgtacgaaaagttcagccccgcggggcctgtgctgtccatccgggtctgccgcgatatgatcacccgccgctccctgggctatgcctacgtcaacttccagcagccggccgacgctgagcgggctttggacaccatgaactttgatgtgattaagggaaagccaatccgcatcatgtggtctcagagggatccctctttgagaaaatctggtgtgggaaacgtcttcatcaagaacctggacaaatctatagataacaaggcactttatgatactttttctgcttttggaaacatactgtcctgcaaggtggtgtgtgatgagaacggctctaagggttatgcctttgtccacttcgagacccaagaggctgccgacaaggccatcgagaagatgaatggcatgctcctcaatgaccgcaaagtatttgtgggcagattcaagtctcgcaaagagcgggaagctgagcttggagccaaagccaaggaattcaccaatgtttatatcaaaaactttggggaagaggtggatgatgagagtctgaaagagctattcagtcagtttggtaagaccctaagtgtcaaggtgatgagagatcccaatgggaaatccaaaggctttggctttgtgagttacgaaaaacacgaggatgccaataaggctgtggaagagatgaatggaaaagaaataagtggtaaaatcatatttgtaggccgtgcacaaaagaaagtagaacggcaggcagagttaaaacggaaatttgaacagttgaaacaggagagaattagtcgatatcagggggtgaatctctacattaagaacttggatgacactattgatgatgagaaattaaggaaagaattttctccttttggatcaattaccagtgctaaggtaatgctggaggatggaagaagcaaagggtttggcttcgtctgcttctcatctcctgaagaagcaaccaaagcagtcactgagatgaatggacgcattgtgggctccaagccactatatgttgccctggcccagaggaaggaagagagaaaggctcacctgaccaaccagtatatgcaacgagtggctggaatgagagcacttcctgccaatgccatcttaaatcagttccagcctgcagcgggtggctactttgtgccagcagtcccacaggctcagggaaggcctccatattatacacctaaccagttagcacagatgaggcctaatccacgctggcagcaaggtgggagacctcaagtccaacgaatgccaaggatatacgccagtcggggcccgtcaatccttgcaactggtccaacaggtaaggtcggctctctggctcctattacactcgccggccgatgcggccgtggc

SEQ ID NO: 281472 - DNA, 1716 bp, Homo sapiens
  misc_feature (13)..(13): n is a, c, g, or t
agcggctctctcngccccgggtcgctgccgcctccgccgctttcgggcttcgcagcctgaggaaaaaaagagaaaaagataaaaaaaatctgaaaacgcttcaaaatcctgaaaaaaaaaaaggaaaagaaaaaacgaatcctcggagaacccgcggggaagtcactttcgtacgcttccggcctgccccgcgcccgccgccgcagcgcttggcgtccgtcggtctccgtccgtcggtccgggggtgagccgcccgcccggcccgccgtgccctccccccgctcgggccccgagccccgcgccccgcgcctgccccggcgcaccacgtgtccgtgctgcccttcgccgcccgcccggggctcgccgagtcggcgcccacaaagatttggtttccctctgccccggcggttgtaatcttaaaccgccggagcccgaggcctatatttatagagaaacgcgtgtccccgaggccgccgtgggcagcgtccggtcgcctcttaaaggatttttacccttcggaaggggattccccgtttaatttttttcctactttgattttttgaaatttggagcttcgcaccaggaccgcggagaagtgcaaagtcgcggggagggccgtattgtgcggagagccttttgtctgcggtgctgcggccgtgggagccggcccccgcctcccgtttccgtcccgtctccaagcccgccgactccagctcgtcctcgccgcgccggtgccacctgtgagccgcggcgcgggcccgggctccgaaggcgcccctttgtcctgcggcgggcccgataagaagtcctcctggcggggctcggggtggtggggggcggggagatgaacgctgcggccagcagctaccccatggcctccctgtacgtgggcgacctgcattcggacgtcaccgaggccatgctgtacgaaaagttcagccccgcggggcctgtgctgtccatccgggtctgccgcgatatgatcacccgccgctccctgggctatgcctacgtcaacttccagcagccggccgacgctgagcgggctttggacaccatgaactttgatgtgattaagggaaagccaatccgcatcatgtggtctcagagggatccctctttgagaaaatctggtgtgggaaacgtcttcatcaagaacctggacaaatctatagataacaaggcactttatgatactttttctgcttttggaaacatactgtcctgcaaggtggtgtgtgatgagaacggctctaagggttatgcctttgtccacttcgagacccaagaggctgccgacaaggccatcgagaagatgaatggcatgctcctcaatgaccgcaaagtatttgtgggcagattcaagtctcgcaaagagcgggaagctgagcttggagccaaagccaaggaattcaccaatgtttatatcaaaaactttggggaagaggtggatgatgagagtctgaaagagctattcagtcagtttggtaagaccctaagtgtcaaggtgatgagagatcccaatgggaaatccaaaggctttggctttgtgagttacgaaaaacacgaggatgccaataaggctgtggaagagatgaatggaaaagaaataagtggtaaaatcatatttgtaggccgtgcacaaaagaaagtagaacggcaggcagagttaaaacggaaattgaagtttctcatccttggcatttctcatcttgg

SEQ ID NO: 281473 - DNA, 1541 bp, Homo sapiens
  misc_feature (13)..(13): n is a, c, g, or t
agcggctctctcngccccgggtcgctgccgcctccgccgctttcgggcttcgcagcctgaggaaaaaaagagaaaaagataaaaaaaatctgaaaacgcttcaaaatcctgaaaaaaaaaaaggaaaagaaaaaacgaatcctcggagaacccgcggggaagtcactttcgtacgcttccggcctgccccgcgcccgccgccgcagcgcttggcgtccgtcggtctccgtccgtcggtccgggggtgagccgcccgcccggcccgccgtgccctccccccgctcgggccccgagccccgcgccccgcgcctgccccggcgcaccacgtgtccgtgctgcccttcgccgcccgcccggggctcgccgagtcggcgcccacaaagatttggtttccctctgccccggcggttgtaatcttaaaccgccggagcccgaggcctatatttatagagaaacgcgtgtccccgaggccgccgtgggcagcgtccggtcgcctcttaaaggatttttacccttcggaaggggattccccgtttaatttttttcctactttgattttttgaaatttggagcttcgcaccaggaccgcggagaagtgcaaagtcgcggggagggccgtattgtgcggagagccttttgtctgcggtgctgcggccgtgggagccggcccccgcctcccgtttccgtcccgtctccaagcccgccgactccagctcgtcctcgccgcgccggtgccacctgtgagccgcggcgcgggcccgggctccgaaggcgcccctttgtcctgcggcgggcccgataagaagtcctcctggcggggctcggggtggtggggggcggggagatgaacgctgcggccagcagctaccccatggcctccctgtacgtgggcgacctgcattcggacgtcaccgaggccatgctgtacgaaaagttcagccccgcggggcctgtgctgtccatccgggtctgccgcgatatgatcacccgccgctccctgggctatgcctacgtcaacttccagcagccggccgacgctgagcgggctttggacaccatgaactttgatgtgattaagggaaagccaatccgcatcatgtggtctcagagggatccctctttgagaaaatctggtgtgggaaacgtcttcatcaagaacctggacaaatctatagataacaaggcactttatgatactttttctgcttttggaaacatactgtcctgcaaggtggtgtgtgatgagaacggctctaagggttatgcctttgtccacttcgagacccaagaggctgccgacaaggccatcgagaagatgaatggcatgctcctcaatgaccgcaaagtgtgagtgtcccagtccggagcaacaaccatcgcatgagccagccgtggccccacctcgctattaactggcacacacaaggcggctactggttctcggcccaagtgtggcctgctcctacctctccactccagggctgatttgtgggcagattcaagtctcgcaaagagcggattcgccatcggtaccgagctga

SEQ ID NO: 281474 - DNA, 1567 bp, Homo sapiens
ctttccggcaggctactgggctccgcccacacacctcccggcctggttcctaaacgccagctcggagcaatccccttgggctggagccaaatccctgctgtgattttaaggaagaccggcagggtggcaaccaactatatctgaggaccagagccattttggggcaccagagcttgtgacctctccatctccacccagctgggtccaggggccactctcagcactcacctcagcagctgacatcataaagcagacttgggaacctggaagcactctggagaacctttccctgagacatggagctttggggccgaatgctgtgggccctcctgtctggcccagggaggaggggaagtacccggggctgggccttcagctcatggcaaccccaaccacctctggctgggttatccagtgccatagaactggtcagccactggactggggtctttgagaagaggggtatccctgaggcccgggaatccagtgagtacatcgtggctcatgtccttggagccaaaacatttcagagcctgaggccggcactttggacccagcccttgacctctcagcaactacagtgtatccgggagctgagtagccgtcgattgcagaggatgccggtgcagtacatccttggagagtgggacttccaggggctcagcctaaggatggtgcccccagtgtttattccgcggccagaaacagaggaactggttgagtgggtgctggaagaggtggcccagaggtcccatgctgtgggatccccaggcagccccctcattctggaggtgggctgcggatcaggagccatctccctcagcctgctgagccagctcccccagagccgagtcattgctgtggataagcgggaagctgctatctctctgacccatgagaatgctcagaggcttcggttgcaggacaggatttggatcatccacctcgacatgacctcagaaaggagctggacacacctgccctggggccccatggacctgattgtcagcaaccctccctacgtcttccaccaggacatggagcagctggcccctgagatccgcagctatgaagaccccgcggccctggatggtggggaggagggcatggacatcattacccacattctggccttggcaccccggctcctgaaagactctggtagtatcttcttagaagtggacccaaggcacccggagcttgtcagcagctggcttcagagccggcctgacctgtaccttaatcttgtggctgtgcgcagggacttctgtgggaggccccggttcctgcatatccggaggtctgggccatagcatggctgccctgtggatgccttgtcagtgccgccagcctgaccagaggggaggtggatggcactttccagagcccaggttcttatggcatttcccagggttctgtgatttccccatgctctgcatttctaggatatttctaggacacctggattggctccatcacatcagagtggctgagggcagttgctctgtgttggtgaaattgctgtgggggtatcgggggatatggccagtaaagtattgagagacta

SEQ ID NO: 281475 - DNA, 9868 bp, Homo sapiens
  misc_feature (4570)..(4574): n is a, c, g, or t
  misc_feature (9456)..(9456): n is a, c, g, or t
cacccacttgctgcccaccatccccagctccctgagccagtctttcctgagacctggggtcccaggagtcctgaccctctggggggcttctctgcccacatccaaagggatgcctttgagaaggagctacactgccctttccttgtctcatgcctggctactcaggtgtcccactccactgctggttagaaaaattttggccattggctccatcacatcagagtggctgagggcagttgctctgtgttggtgaaattgctgtgggggtatcgggggatatggccagtaaagtattgagagactaacaaatggtgacctaatgttttgtccatgacttgcaggtcccctgacccccttactcccaggtagcactggggcaagggtttccttctgccccagcagggctggcccgtcagtcccctgcttggtagtggtgtgggggtgcagtgtggaggaaggcacgtgagtcctcactcctggccttggataccatgggtcctggcataagcagctcactcccagtgattgattagtcctccactgccctgggtgcatgcgtacacaattccctggccaagcctggctcgagcacaggaagctcatctgcgttttggctcaaggatgactgcctgctttctggaggggagggtctggaggtctttgctgcacagttcctgggtcgcacatccacgttcatttaactgaaggcttgagccagtgaggggtgtttcctttttatccccatagcttttagctaaaacatccctcccgagttgaccccctggggtttcaaataacccatgtgtccctggttggggctggggagagtgagaagctgagatactgggcacagggttgtggcctccaccccagctctggtctgtgcagactcatggccaccaggaggcctgcagatccagccttcctgtcaacagcgacaggaaatctctaggttggtgagtgctggtgatgtgagcctacatcagggtgggtcctaagaaacatggcaaaccaggctgtctcattccactaactgccccctgccaccctggcacttcccagggcctggcagtatggtctgatgggcagtatggtccaataggcagcatcctctgctgcagctgggagagctgagttccagggctgtgtcctgcagtgggaccttgggcaactcctttccctatgagaagctggctcttctgagtccagggccaacgccaactggcaacctctttactcttagtcaagtggaatgtgcatgctggcatctgaatgtccattcgccaggcatggagagcaagagaaggtatgtactgcctgaggtcacatgacagtgaccaagtggagacagtaagttagatccctccctttggggagcctatattgctggagtcatacccagcctaagtgttgccctgcactatggctggaggacatttggtagaggtcacactgcagctcccagtgccccagtgtcctgccctgtgcccagccccagctgcatggactctgagctgcccctggcttcctttaaggaggctgctccagaaggaacctgggtggggagggcgaagggggtgcacaaccagggcaaggctccccacttccttagtcccccatgctcacagacctttgcctgctaaggtcctcaccagtattgccctttctgtctttctccttgtgccctttggctcttgctgtcttcagcagcatctcagggtagctgccctgacctcggagcagtctgtcgcccccctacacctcagccagtcctggcttccctgatggtctctccctcctggcctcaggcccattcctgaggaagggccttggcgagcttgtggatgttgcaccagaagagagtgcagtgttggagagtgacactgtcggggcagctggggccacaagcaggagccggcctcgggcacaactttctgcccagaaaaatgtgcagcttgactctgctgaggaaaaggtccaagccaagaggactggcaggcggggcctcaagcctgcagccactggcttgattgggccctggacgttgagcccagatgttggagccacaccagcctggatttcaatcccagaatctgcccctcaccaggatgtgaccttgggcagatgacttcacctcactcagccttggcttctaaggctgagaaatgggacttaatgcttttttattttataggatgcatgtgaggagcccatggaatgtgcctggcttggcacattgtggcatttttccttgccttcctcggagggcagacacagggaggaaggacccagtgccctcaggcgtccatctgatgcatgggaccaacataaggcaggcagggatacaaggcagtctggaaagaagggaaggcaggagtttcagtcttgggctcttgactcctcgctgttgtctagagatggagccagcaggctggtagcctggcagcctacatctcccctcagcctctcctcactatggccccagtgccttgaggcccaggccagggcagccagtggctctagctcagggaaagccaggcccacctgccctatcccctcccttgctcctgaggccaaagccagagactcgaacagcctccccaccaccaccagcatatgtcaaggagcacttgcaggcagaatgggaggaggacatggagctgatggagtccaggctgtgcaagcccctgaggtcttgagagatgtgcccactgcccgtgcagcctccttcagccagagcccagagcatagacaggagtgtaggagtccctgtttgatgtactctgggagagtaattctatctcctcttctgatagttggggaaactgaggccttgtctcacagttggatgcttttcccagttgtcagtgggtttctccatgggtctcatacagctgccttattgaaataggccccgaaccccctaaatgcaaaaaatactcttttttgctcctttacccccacctggaccctgggctattggctgctcccaatccttgccccaaacacttagctggctccccatgacttaagtgtgttctcttgtgtcctatggaatccagttctgaagaggtgggggaggacaactgtgggaaaagccctgggggcccctcccaaggccccatcagtgctctgagtaggctgtcatcagaacaaaagggctccactgctgacaaggtttgagaactgctggcttgaggtgagaacccctttaacctctgcgggacagcatgtctttccctatccaccttcgattcttttctcttttttttcttcattggctccttcttagtggattctcttctctactgccctgggcttcagcctttgtgcagtactctcgatgccctgaacacacaccttccctttgcccaggcggtgcaaacaatccacttcttcaagctccaacacaaatgctgcctcctttaggatgcctgctctgtgctctccctgcctcccctagcccatacctctgctggcaccttctgtaccatgccttcagaaaccttcttatccccctcatctctggggccccctgtggatctggcatacccaagttcagtaaatgtctatcagtaagctgatggtacatgcattttctagaatagagctgggacttcccatgtggcccacatctgacctggcagcccatgtattccggtcattagggatgggaagccatgaggacctggccttctgcccgacccaggcagccattcaagttgagcaatggccacttcgaagactcaagtgcacctgatccctgcgcaacagccacaccaggagaacaggctgtccttggcggcagtaggagcaggcgccaggtttcctggagctcttggcttcagccagcccccagccagagtcctggctaggacagtgacctgatctcctcctcatgaccttctgccctggacaagccccctgaactggatttgggactgtcaaagcaactctacccctgctctggtaggctgaacagtgaccccccaaaatggcagtgtcttaatcacctaaaccttaacatgtgactatattaccttcacatagcaaaatggactttgcagatgtgattaaggatcttgagatggaaggagtatcctggatttttcaggtaaactgagtataatcacaagggcctctgtaaaggaggcaggagtgtcagagtgacggaagaaaatgtatgtaacaatggaagcagaggtcagagtgatgcaattgctggaggaagagccatgagccgaggaatgcagacagcctcttctcctctggggcctcaagaagaatgcagtcctgccaataccttgattttaagccctgtgaaactgatttcagattgctgacctccagaacagtaagatcataaatttgtgttgttttcacatgtgtgaaaacacatgtgtgataatttgttacagcagccacgggaaacgaatatagattgtggtgcccaaattagagtgctgctgtaacacacgcctactgattgaagtggctttggaattgcaacgtggaaatgggcagaggctggaagaattttgagagtcatgataaattgccttaaccaccnnnnntctgataggtgatgtggccaggggaactcttcctcaaccttcagacctaaactgcccaggccccccctttttttactcatatttggagagaggtggccctttcccagagtgagaagactgaaagactgaccagcatgggtcccagaagggagtgggtgaggaatgggactgggatgtggggagaaagtgcaaggctggcctccatggcccatctccagagactgggtccagagaggacctcagagactgggaccaagcctgttcctgctctcctgtggagttatgtgactggcccaggaccccttgggtgtgtgaggatgagcaggggccctgtactctctgggttgcaggtactgcatctgtgaaatgagcacagcagcccctgactttgagctaatgggcctggcccctccatgtaagccataggcctgagcagagctgtgtcaccattctgttcctatggtggagtggggctatccctggggttctcaacctcctggttcctaaaactgaattggccaactggtgccctcagccctgtccctgtccaagctgggactaggacctccctttccaggggtactaaaggactctggagacaccatcccacccagccaaggcttggggctcctgaagccagtcctaacccaggagccacatggagagctactgggaggccagacatgggcctcatgctgggtttcagagctgagaagctgggggacagagagcatggacacctgggttcaagggtcagcttggccccaaatcacctggatacgctttggatgaagccaggagggcctgtttatactggaaggggtggatcatggcaagacttatattcaatccctgatcttttttcccagagagggatggggcttacttgaagtaacacagcacttgactcctgactcccagtatgatgctctcatctcctattgcttccaaaggcctggggttagttaattaagttaattaggtggtgctcatatggctgtccatgtagctactaaacccagggattctggcccataaagccctctgggccaggtttatgggcaggtaagagtcacattaggccaactgtagccctgggtgtgcagacagatctgagtcccatctgaagctctggtagctgtgggaggagagcaggatttcccccgcttgcggaatgagtgggtgccttcccctctgaggtaattggctgtacagcccccagcctctgccccccagggccctcctgaggtgtctggaaggacctttgggatctttggcctcataaccagaaatcagaagcttcaaattctagaggccccttttcttccaaagactacctctcacacatacagcagtcctgcaggaaaatggtcaggaaaggccaattttacagctcacaaagtgggaaaggcagggaagcctacctcagcttcatggaaagccctgaactgggctgacctccacctgccccagctatgcctaaagggggagggtgagacagcttagagtagccatgccccgtggcaggcaggcctggctaagtggcccccttcccaggggctggggtcttccccaaacactctacctctcagagcagaggatgtcaccttattgctccctcttgtactaggtctgcggccctcttctggggcatgtggctggggaaatggtgggatcagatatcccctactgagcccagggagcagattgttggtgcctgaagcgctcacagagatccctgtgctacagatgaggaaactgaggcttagcaggacaggagcagggctggggcacgagccaggtctcttctctggctcacagctgccagtccttcctttgccacctgaagaccccccaccccacctggctttccaggaacaggcctgcctgcctggagaggcgtccaagtccctctgctgttcctggaagtcagtgtgaggctgagctacgtgaccaagcaaagcaaactaggactacaggtgtgaacaaccctgcctggctaatttttaatttttttttttttttagaaacggggtcttgctatgttgccagggctggcacatggggtttttagttgtccccacattacaaagttgaggacaccaaggctcagcagggtgcagttgcaggtcaggttgcatagctggacaggaagggaggatgaggctgccattggtgtccatttgactatcagagacgctgaggccagcataactaggtcctgggctgtcccctgcagagcttagcgcagaagttacctgggcttgtggacccttggagcaggagcaagggtttccagggctgtccctagagggctttctagaagacctgcagctgctcctgggtgcatctcctgaggtatagggccagggcctcagtctctcaagacctactttgtgtcaggcaccagggagatgataccaagtggagggtcctatagaatatggtgcatcctgcgccaagtacttccaggattatcttactcaaccttcatgacatcctcagagatggaggctgtgaaccctctcgttatactgacgaagaaacaaactggggctaagaaacttgctcataggctggctgagctgtgattctggcataggctgagtgacctggagctggaggccttagtcatcacaccaggcttgaggaggggcggataggacaggaatataccaggcagtagggacagtctggacaaaagcctggagttctgcagacatgcgggtagggatatgtaggggtgaggtggtgccgagaggtccccttggctgagctctgaatgcatttctggggaccaggggcctaaagagctttttgagctgagttacagggttagagaagcattgaggctgctctttctggctgccaggaaaaaggggctggggcaggaggctgcaacttgtccagggtctggaggtggctggggtctgtagcagtggcatcagatattctggaacagaactgactcacaaccattgctgagggtttggatgtgagatggccaggaccacagtgggcccagggatctgattgggacctgggggaaatggggccaccctgagttggagactggggtgctggggggaacagtcggggagcttgacagtgtaggatgccttcagaatatccgagaagcagcattggggtgtctggagatgcaaatgtgaccatgtggggacacagtccaaaggcaacccttgaggtagagttgtgaagaccactctcctagacctgagtgctggcgacaacagtaccgggcatctgcagtgtgtaaactagtgccaggtgctgcacacacgtggtcataaatccatctgttggcacatcagggatcccttccttggcccactgtatggatgaagggactgaggcttaacatgcccaaggtcacacagccagcagctggccatgctggagtttgaacctagtcctctgacatcccagtcaggagaggcgtgagcaggctgccgaggccaaatgcagcccagggcctcaaccccccagaggggcctcaggagccagttaggtgccccacagccaacgtgggctccagggtgaaggggaaagtgatgaatcaaacagaaagcagcagacgcagactgagctctctccctgtcggcccgggtgccagattttcacgcccacagcaaaggggccaggcagagcgctaggtgtggggcaggagagggcagcgaaagtggctgccactgaacccagactctgatgtactccggatatgggtggcgtggactgacagacacccagcccagttccagactgaaagttgagtctgtctcagcatgtgaggatatgaagtttgccttgtcatggggagcatttcaggtccctaggcctgtgaggttctgggatgaggcaccagatggatgtgtctaaaaacccttgttgaaggcactccacagctcaataactgaccattgctcactactctcttggcccgcactgaaagccactgtttcttcatcatttcactcagcccgcctgtctcagccccccagaactttggagctcattctttcaaagtacatttcatgtgcaactgaaatacatatttttaaaaagataaaatgagcatctagttagcaaaaatgtattttgcaagtgcaaattctttcttagcatacagtccatcagggcgaagagcaatgaacacaaatgtttgaactgggggctgggatggtagttgtagtcttatgttggtctcaatgtccattttctttcagtgtttgattttggtagcacaggacaaagtgaccgctgattctcacagataattgtttacaaatgctagcactgtgtctgaagcccaccttgcagtctctttgattgacagggacagcaagagaagccttatctcaagctcagcacaaaccctgttctctgagcacataggaaggattctaatgtgtcataatttggtgctgtgcccatttgagtctgtgtgtggtttttaaaattgggtttttttttttttcaataattaaaaatatgagctgggcatggtggcacatgcctgtggtcccacctactcgggaggctgaggcaggaggattacttgagcacaagagtttaagacagcagtgagctataatagcgccactgcactccagcctggacatcagagtcagaccctgtctctaaaaaaataattttaggccgggcgcggtggctcacgcctgtaatcccagcactctgggaggctgaggcaggcagatcacctgaggtcaggagttcgaggccagcttggccaacatggtgaaaatccgtctgtactaaaaatacaaaaattagccgggtgtggtggctcacgcctgtaatcccagctacttgagaggctgaggcaggagaatcgcttgaaacngagaggcagatgttgcagtgagccaagatcacgccattgtactcccacccaggcaacaagagcaaaactctgtctcaaaaataataataataggccaggcgcagtagctcacgtttgtaatcccagcactttgggaggccaaggatcacaaggttaggagttcaagaccagcctggccaacacagtgaaaccccgtctactaaaaatacaaaaattagctgggtgtggtggtggacacctgtaatcccagctactcgggaggctgaagcaggagaattgcttgaacccgggaggcagagattgcagtgagccaagatcatgccactgcactccagcctgggcgacagagctagactccatctcaaaaaaaaaaatttaaaaataataattttaaaaaaatgttttaaaaatg

SEQ ID NO: 281476 - DNA, 11432 bp, Homo sapiens
  misc_feature (6134)..(6138): n is a, c, g, or t
  misc_feature (11020)..(11020): n is a, c, g, or t
ctttccggcaggctactgggctccgcccacacacctcccggcctggttcctaaacgccagctcggagcaatccccttgggctggagccaaatccctgctgtgattttaaggaagaccggcaggtccgggcccccaagggtcaaccccacacacatccccgcactttcctgtatgcaggcctgcgagcgtagagggagtggaattcacagcctccccacccatccgcaggggtctcctgggaggaacccaccagcgataggaacactgaagctgggctacggcgtccgcccgagccttttcttaaaggcgccgaccccggaagcggggcgtccgagggagcgcgcgacgggccacgcacgtccgggcgtccagttcggggcagcttctccggctggtgggtgggtggggcagcctttcaggcagggtggcaaccaactatatctgaggaccagagccattttggggcaccagagcttgtgacctctccatctccacccagctgggtccaggggccactctcagcactcacctcagcagctgacatcataaagcagacttgggaacctggaagcactctggagaacctttccctgagacatggagctttggggccgaatgctgtgggccctcctgtctggcccagggaggaggggaagtacccggggctgggccttcagctcatggcaaccccaaccacctctggctgggttatccagtgccatagaactggtcagccactggactggggtctttgagaagaggggtatccctgaggcccgggaatccagtgagtacatcgtggctcatgtccttggagccaaaacatttcagagcctgaggccggcactttggacccagcccttgacctctcagcaactacagtgtatccgggagctgagtagccgtcgattgcagaggatgccggtgcagtacatccttggagagtgggacttccaggggctcagcctaaggatggtgcccccagtgtttattccgcggccagaaacagaggaactggttgagtgggtgctggaagaggtggcccagaggtcccatgctgtgggatccccaggcagccccctcattctggaggtgggctgcggatcaggagccatctccctcagcctgctgagccagctcccccagagccgagtcattgctgtggataagcgggaagctgctatctctctgacccatgagaatgctcagaggcttcggttgcaggacaggatttggatcatccacctcgacatgacctcagaaaggagctggacacacctgccctggggccccatggacctgattgtcagcaaccctccctacgtcttccaccaggacatggagcagctggcccctgagatccgcagctatgaagaccccgcggccctggatggtggggaggagggcatggacatcattacccacattctggccttggcaccccggctcctgaaagactctggtagtatcttcttagaagtggacccaaggcacccggagcttgtcagcagctggcttcagagccggcctgacctgtaccttaatcttgtggctgtgcgcagggacttctgtgggaggccccggttcctgcatatccggaggtctgggccatagcatggctgccctgtggatgccttgtcagtgccgccagcctgaccagaggggaggtggatggcactttccagagcccaggttcttatggcatttcccagggttctgtgatttccccatgctctgcatttctaggatatttctaggacacctggattggctccatcacatcagagtggctgagggcagttgctctgtgttggtgaaattgctgtgggggtatcgggggatatggccagtaaagtattgagagactaacaaatggtgacctaatgttttgtccatgacttgcaggtcccctgacccccttactcccaggtagcactggggcaagggtttccttctgccccagcagggctggcccgtcagtcccctgcttggtagtggtgtgggggtgcagtgtggaggaaggcacgtgagtcctcactcctggccttggataccatgggtcctggcataagcagctcactcccagtgattgattagtcctccactgccctgggtgcatgcgtacacaattccctggccaagcctggctcgagcacaggaagctcatctgcgttttggctcaaggatgactgcctgctttctggaggggagggtctggaggtctttgctgcacagttcctgggtcgcacatccacgttcatttaactgaaggcttgagccagtgaggggtgtttcctttttatccccatagcttttagctaaaacatccctcccgagttgaccccctggggtttcaaataacccatgtgtccctggttggggctggggagagtgagaagctgagatactgggcacagggttgtggcctccaccccagctctggtctgtgcagactcatggccaccaggaggcctgcagatccagccttcctgtcaacagcgacaggaaatctctaggttggtgagtgctggtgatgtgagcctacatcagggtgggtcctaagaaacatggcaaaccaggctgtctcattccactaactgccccctgccaccctggcacttcccagggcctggcagtatggtctgatgggcagtatggtccaataggcagcatcctctgctgcagctgggagagctgagttccagggctgtgtcctgcagtgggaccttgggcaactcctttccctatgagaagctggctcttctgagtccagggccaacgccaactggcaacctctttactcttagtcaagtggaatgtgcatgctggcatctgaatgtccattcgccaggcatggagagcaagagaaggtatgtactgcctgaggtcacatgacagtgaccaagtggagacagtaagttagatccctccctttggggagcctatattgctggagtcatacccagcctaagtgttgccctgcactatggctggaggacatttggtagaggtcacactgcagctcccagtgccccagtgtcctgccctgtgcccagccccagctgcatggactctgagctgcccctggcttcctttaaggaggctgctccagaaggaacctgggtggggagggcgaagggggtgcacaaccagggcaaggctccccacttccttagtcccccatgctcacagacctttgcctgctaaggtcctcaccagtattgccctttctgtctttctccttgtgccctttggctcttgctgtcttcagcagcatctcagggtagctgccctgacctcggagcagtctgtcgcccccctacacctcagccagtcctggcttccctgatggtctctccctcctggcctcaggcccattcctgaggaagggccttggcgagcttgtggatgttgcaccagaagagagtgcagtgttggagagtgacactgtcggggcagctggggccacaagcaggagccggcctcgggcacaactttctgcccagaaaaatgtgcagcttgactctgctgaggaaaaggtccaagccaagaggactggcaggcggggcctcaagcctgcagccactggcttgattgggccctggacgttgagcccagatgttggagccacaccagcctggatttcaatcccagaatctgcccctcaccaggatgtgaccttgggcagatgacttcacctcactcagccttggcttctaaggctgagaaatgggacttaatgcttttttattttataggatgcatgtgaggagcccatggaatgtgcctggcttggcacattgtggcatttttccttgccttcctcggagggcagacacagggaggaaggacccagtgccctcaggcgtccatctgatgcatgggaccaacataaggcaggcagggatacaaggcagtctggaaagaagggaaggcaggagtttcagtcttgggctcttgactcctcgctgttgtctagagatggagccagcaggctggtagcctggcagcctacatctcccctcagcctctcctcactatggccccagtgccttgaggcccaggccagggcagccagtggctctagctcagggaaagccaggcccacctgccctatcccctcccttgctcctgaggccaaagccagagactcgaacagcctccccaccaccaccagcatatgtcaaggagcacttgcaggcagaatgggaggaggacatggagctgatggagtccaggctgtgcaagcccctgaggtcttgagagatgtgcccactgcccgtgcagcctccttcagccagagcccagagcatagacaggagtgtaggagtccctgtttgatgtactctgggagagtaattctatctcctcttctgatagttggggaaactgaggccttgtctcacagttggatgcttttcccagttgtcagtgggtttctccatgggtctcatacagctgccttattgaaataggccccgaaccccctaaatgcaaaaaatactcttttttgctcctttacccccacctggaccctgggctattggctgctcccaatccttgccccaaacacttagctggctccccatgacttaagtgtgttctcttgtgtcctatggaatccagttctgaagaggtgggggaggacaactgtgggaaaagccctgggggcccctcccaaggccccatcagtgctctgagtaggctgtcatcagaacaaaagggctccactgctgacaaggtttgagaactgctggcttgaggtgagaacccctttaacctctgcgggacagcatgtctttccctatccaccttcgattcttttctcttttttttcttcattggctccttcttagtggattctcttctctactgccctgggcttcagcctttgtgcagtactctcgatgccctgaacacacaccttccctttgcccaggcggtgcaaacaatccacttcttcaagctccaacacaaatgctgcctcctttaggatgcctgctctgtgctctccctgcctcccctagcccatacctctgctggcaccttctgtaccatgccttcagaaaccttcttatccccctcatctctggggccccctgtggatctggcatacccaagttcagtaaatgtctatcagtaagctgatggtacatgcattttctagaatagagctgggacttcccatgtggcccacatctgacctggcagcccatgtattccggtcattagggatgggaagccatgaggacctggccttctgcccgacccaggcagccattcaagttgagcaatggccacttcgaagactcaagtgcacctgatccctgcgcaacagccacaccaggagaacaggctgtccttggcggcagtaggagcaggcgccaggtttcctggagctcttggcttcagccagcccccagccagagtcctggctaggacagtgacctgatctcctcctcatgaccttctgccctggacaagccccctgaactggatttgggactgtcaaagcaactctacccctgctctggtaggctgaacagtgaccccccaaaatggcagtgtcttaatcacctaaaccttaacatgtgactatattaccttcacatagcaaaatggactttgcagatgtgattaaggatcttgagatggaaggagtatcctggatttttcaggtaaactgagtataatcacaagggcctctgtaaaggaggcaggagtgtcagagtgacggaagaaaatgtatgtaacaatggaagcagaggtcagagtgatgcaattgctggaggaagagccatgagccgaggaatgcagacagcctcttctcctctggggcctcaagaagaatgcagtcctgccaataccttgattttaagccctgtgaaactgatttcagattgctgacctccagaacagtaagatcataaatttgtgttgttttcacatgtgtgaaaacacatgtgtgataatttgttacagcagccacgggaaacgaatatagattgtggtgcccaaattagagtgctgctgtaacacacgcctactgattgaagtggctttggaattgcaacgtggaaatgggcagaggctggaagaattttgagagtcatgataaattgccttaaccaccnnnnntctgataggtgatgtggccaggggaactcttcctcaaccttcagacctaaactgcccaggccccccctttttttactcatatttggagagaggtggccctttcccagagtgagaagactgaaagactgaccagcatgggtcccagaagggagtgggtgaggaatgggactgggatgtggggagaaagtgcaaggctggcctccatggcccatctccagagactgggtccagagaggacctcagagactgggaccaagcctgttcctgctctcctgtggagttatgtgactggcccaggaccccttgggtgtgtgaggatgagcaggggccctgtactctctgggttgcaggtactgcatctgtgaaatgagcacagcagcccctgactttgagctaatgggcctggcccctccatgtaagccataggcctgagcagagctgtgtcaccattctgttcctatggtggagtggggctatccctggggttctcaacctcctggttcctaaaactgaattggccaactggtgccctcagccctgtccctgtccaagctgggactaggacctccctttccaggggtactaaaggactctggagacaccatcccacccagccaaggcttggggctcctgaagccagtcctaacccaggagccacatggagagctactgggaggccagacatgggcctcatgctgggtttcagagctgagaagctgggggacagagagcatggacacctgggttcaagggtcagcttggccccaaatcacctggatacgctttggatgaagccaggagggcctgtttatactggaaggggtggatcatggcaagacttatattcaatccctgatcttttttcccagagagggatggggcttacttgaagtaacacagcacttgactcctgactcccagtatgatgctctcatctcctattgcttccaaaggcctggggttagttaattaagttaattaggtggtgctcatatggctgtccatgtagctactaaacccagggattctggcccataaagccctctgggccaggtttatgggcaggtaagagtcacattaggccaactgtagccctgggtgtgcagacagatctgagtcccatctgaagctctggtagctgtgggaggagagcaggatttcccccgcttgcggaatgagtgggtgccttcccctctgaggtaattggctgtacagcccccagcctctgccccccagggccctcctgaggtgtctggaaggacctttgggatctttggcctcataaccagaaatcagaagcttcaaattctagaggccccttttcttccaaagactacctctcacacatacagcagtcctgcaggaaaatggtcaggaaaggccaattttacagctcacaaagtgggaaaggcagggaagcctacctcagcttcatggaaagccctgaactgggctgacctccacctgccccagctatgcctaaagggggagggtgagacagcttagagtagccatgccccgtggcaggcaggcctggctaagtggcccccttcccaggggctggggtcttccccaaacactctacctctcagagcagaggatgtcaccttattgctccctcttgtactaggtctgcggccctcttctggggcatgtggctggggaaatggtgggatcagatatcccctactgagcccagggagcagattgttggtgcctgaagcgctcacagagatccctgtgctacagatgaggaaactgaggcttagcaggacaggagcagggctggggcacgagccaggtctcttctctggctcacagctgccagtccttcctttgccacctgaagaccccccaccccacctggctttccaggaacaggcctgcctgcctggagaggcgtccaagtccctctgctgttcctggaagtcagtgtgaggctgagctacgtgaccaagcaaagcaaactaggactacaggtgtgaacaaccctgcctggctaatttttaatttttttttttttttagaaacggggtcttgctatgttgccagggctggcacatggggtttttagttgtccccacattacaaagttgaggacaccaaggctcagcagggtgcagttgcaggtcaggttgcatagctggacaggaagggaggatgaggctgccattggtgtccatttgactatcagagacgctgaggccagcataactaggtcctgggctgtcccctgcagagcttagcgcagaagttacctgggcttgtggacccttggagcaggagcaagggtttccagggctgtccctagagggctttctagaagacctgcagctgctcctgggtgcatctcctgaggtatagggccagggcctcagtctctcaagacctactttgtgtcaggcaccagggagatgataccaagtggagggtcctatagaatatggtgcatcctgcgccaagtacttccaggattatcttactcaaccttcatgacatcctcagagatggaggctgtgaaccctctcgttatactgacgaagaaacaaactggggctaagaaacttgctcataggctggctgagctgtgattctggcataggctgagtgacctggagctggaggccttagtcatcacaccaggcttgaggaggggcggataggacaggaatataccaggcagtagggacagtctggacaaaagcctggagttctgcagacatgcgggtagggatatgtaggggtgaggtggtgccgagaggtccccttggctgagctctgaatgcatttctggggaccaggggcctaaagagctttttgagctgagttacagggttagagaagcattgaggctgctctttctggctgccaggaaaaaggggctggggcaggaggctgcaacttgtccagggtctggaggtggctggggtctgtagcagtggcatcagatattctggaacagaactgactcacaaccattgctgagggtttggatgtgagatggccaggaccacagtgggcccagggatctgattgggacctgggggaaatggggccaccctgagttggagactggggtgctggggggaacagtcggggagcttgacagtgtaggatgccttcagaatatccgagaagcagcattggggtgtctggagatgcaaatgtgaccatgtggggacacagtccaaaggcaacccttgaggtagagttgtgaagaccactctcctagacctgagtgctggcgacaacagtaccgggcatctgcagtgtgtaaactagtgccaggtgctgcacacacgtggtcataaatccatctgttggcacatcagggatcccttccttggcccactgtatggatgaagggactgaggcttaacatgcccaaggtcacacagccagcagctggccatgctggagtttgaacctagtcctctgacatcccagtcaggagaggcgtgagcaggctgccgaggccaaatgcagcccagggcctcaaccccccagaggggcctcaggagccagttaggtgccccacagccaacgtgggctccagggtgaaggggaaagtgatgaatcaaacagaaagcagcagacgcagactgagctctctccctgtcggcccgggtgccagattttcacgcccacagcaaaggggccaggcagagcgctaggtgtggggcaggagagggcagcgaaagtggctgccactgaacccagactctgatgtactccggatatgggtggcgtggactgacagacacccagcccagttccagactgaaagttgagtctgtctcagcatgtgaggatatgaagtttgccttgtcatggggagcatttcaggtccctaggcctgtgaggttctgggatgaggcaccagatggatgtgtctaaaaacccttgttgaaggcactccacagctcaataactgaccattgctcactactctcttggcccgcactgaaagccactgtttcttcatcatttcactcagcccgcctgtctcagccccccagaactttggagctcattctttcaaagtacatttcatgtgcaactgaaatacatatttttaaaaagataaaatgagcatctagttagcaaaaatgtattttgcaagtgcaaattctttcttagcatacagtccatcagggcgaagagcaatgaacacaaatgtttgaactgggggctgggatggtagttgtagtcttatgttggtctcaatgtccattttctttcagtgtttgattttggtagcacaggacaaagtgaccgctgattctcacagataattgtttacaaatgctagcactgtgtctgaagcccaccttgcagtctctttgattgacagggacagcaagagaagccttatctcaagctcagcacaaaccctgttctctgagcacataggaaggattctaatgtgtcataatttggtgctgtgcccatttgagtctgtgtgtggtttttaaaattgggtttttttttttttcaataattaaaaatatgagctgggcatggtggcacatgcctgtggtcccacctactcgggaggctgaggcaggaggattacttgagcacaagagtttaagacagcagtgagctataatagcgccactgcactccagcctggacatcagagtcagaccctgtctctaaaaaaataattttaggccgggcgcggtggctcacgcctgtaatcccagcactctgggaggctgaggcaggcagatcacctgaggtcaggagttcgaggccagcttggccaacatggtgaaaatccgtctgtactaaaaatacaaaaattagccgggtgtggtggctcacgcctgtaatcccagctacttgagaggctgaggcaggagaatcgcttgaaacngagaggcagatgttgcagtgagccaagatcacgccattgtactcccacccaggcaacaagagcaaaactctgtctcaaaaataataataataggccaggcgcagtagctcacgtttgtaatcccagcactttgggaggccaaggatcacaaggttaggagttcaagaccagcctggccaacacagtgaaaccccgtctactaaaaatacaaaaattagctgggtgtggtggtggacacctgtaatcccagctactcgggaggctgaagcaggagaattgcttgaacccgggaggcagagattgcagtgagccaagatcatgccactgcactccagcctgggcgacagagctagactccatctcaaaaaaaaaaatttaaaaataataattttaaaaaaatgttttaaaaatg

SEQ ID NO: 281477 - DNA, 11276 bp, Homo sapiens
  misc_feature (5978)..(5982): n is a, c, g, or t
  misc_feature (10864)..(10864): n is a, c, g, or t
ctttccggcaggctactgggctccgcccacacacctcccggcctggttcctaaacgccagctcggagcaatccccttgggctggagccaaatccctgctgtgattttaaggaagaccggcaggtccgggcccccaagggtcaaccccacacacatccccgcactttcctgtatgcaggcctgcgagcgtagagggagtggaattcacagcctccccacccatccgcaggggtctcctgggaggaacccaccagcgataggaacactgaagctgggctacggcgtccgcccgagccttttcttaaaggcgccgaccccggaagcggggcgtccgagggagcgcgcgacgggccacgcacgtccgggcgtccagttcggggcagcttctccggctggtgggtgggtggggcagcctttcaggcagggtggcaaccaactatatctgaggaccagagccattttggggcaccagagcttgtgacctctccatctccacccagctgggtccaggggccactctcagcactcacctcagcagctgacatcataaagcagacttgggaacctggaagcactctggagaacctttccctgagacatggagctttggggccgaatgctgtgggccctcctgtctggcccagggaggaggggaagtacccggggctgggccttcagctcatggcaaccccaaccacctctggctgggttatccagtgccatagaactggtcagccactggactggggtctttgagaagaggggtatccctgaggcccgggaatccagtgagtacatcgtggctcatgtccttggagccaaaacatttcagagcctgaggccggcactttggacccagcccttgacctctcagcaactacagtgtatccgggagctgagtagccgtcgattgcagaggatgccggtgcagtacatccttggagagtgggacttccaggggctcagcctaaggatggtgcccccagtgtttattccgcggccagaaacagaggaactggttgagtgggtgctggaagaggtggcccagaggtcccatgctgtgggatccccaggcagccccctcattctggaggtgggctgcggatcaggagccatctccctcagcctgctgagccagctcccccagagccgagtcattgctgtggataagcgggaagctgctatctctctgacccatgagaatgctcagagctatgaagaccccgcggccctggatggtggggaggagggcatggacatcattacccacattctggccttggcaccccggctcctgaaagactctggtagtatcttcttagaagtggacccaaggcacccggagcttgtcagcagctggcttcagagccggcctgacctgtaccttaatcttgtggctgtgcgcagggacttctgtgggaggccccggttcctgcatatccggaggtctgggccatagcatggctgccctgtggatgccttgtcagtgccgccagcctgaccagaggggaggtggatggcactttccagagcccaggttcttatggcatttcccagggttctgtgatttccccatgctctgcatttctaggatatttctaggacacctggattggctccatcacatcagagtggctgagggcagttgctctgtgttggtgaaattgctgtgggggtatcgggggatatggccagtaaagtattgagagactaacaaatggtgacctaatgttttgtccatgacttgcaggtcccctgacccccttactcccaggtagcactggggcaagggtttccttctgccccagcagggctggcccgtcagtcccctgcttggtagtggtgtgggggtgcagtgtggaggaaggcacgtgagtcctcactcctggccttggataccatgggtcctggcataagcagctcactcccagtgattgattagtcctccactgccctgggtgcatgcgtacacaattccctggccaagcctggctcgagcacaggaagctcatctgcgttttggctcaaggatgactgcctgctttctggaggggagggtctggaggtctttgctgcacagttcctgggtcgcacatccacgttcatttaactgaaggcttgagccagtgaggggtgtttcctttttatccccatagcttttagctaaaacatccctcccgagttgaccccctggggtttcaaataacccatgtgtccctggttggggctggggagagtgagaagctgagatactgggcacagggttgtggcctccaccccagctctggtctgtgcagactcatggccaccaggaggcctgcagatccagccttcctgtcaacagcgacaggaaatctctaggttggtgagtgctggtgatgtgagcctacatcagggtgggtcctaagaaacatggcaaaccaggctgtctcattccactaactgccccctgccaccctggcacttcccagggcctggcagtatggtctgatgggcagtatggtccaataggcagcatcctctgctgcagctgggagagctgagttccagggctgtgtcctgcagtgggaccttgggcaactcctttccctatgagaagctggctcttctgagtccagggccaacgccaactggcaacctctttactcttagtcaagtggaatgtgcatgctggcatctgaatgtccattcgccaggcatggagagcaagagaaggtatgtactgcctgaggtcacatgacagtgaccaagtggagacagtaagttagatccctccctttggggagcctatattgctggagtcatacccagcctaagtgttgccctgcactatggctggaggacatttggtagaggtcacactgcagctcccagtgccccagtgtcctgccctgtgcccagccccagctgcatggactctgagctgcccctggcttcctttaaggaggctgctccagaaggaacctgggtggggagggcgaagggggtgcacaaccagggcaaggctccccacttccttagtcccccatgctcacagacctttgcctgctaaggtcctcaccagtattgccctttctgtctttctccttgtgccctttggctcttgctgtcttcagcagcatctcagggtagctgccctgacctcggagcagtctgtcgcccccctacacctcagccagtcctggcttccctgatggtctctccctcctggcctcaggcccattcctgaggaagggccttggcgagcttgtggatgttgcaccagaagagagtgcagtgttggagagtgacactgtcggggcagctggggccacaagcaggagccggcctcgggcacaactttctgcccagaaaaatgtgcagcttgactctgctgaggaaaaggtccaagccaagaggactggcaggcggggcctcaagcctgcagccactggcttgattgggccctggacgttgagcccagatgttggagccacaccagcctggatttcaatcccagaatctgcccctcaccaggatgtgaccttgggcagatgacttcacctcactcagccttggcttctaaggctgagaaatgggacttaatgcttttttattttataggatgcatgtgaggagcccatggaatgtgcctggcttggcacattgtggcatttttccttgccttcctcggagggcagacacagggaggaaggacccagtgccctcaggcgtccatctgatgcatgggaccaacataaggcaggcagggatacaaggcagtctggaaagaagggaaggcaggagtttcagtcttgggctcttgactcctcgctgttgtctagagatggagccagcaggctggtagcctggcagcctacatctcccctcagcctctcctcactatggccccagtgccttgaggcccaggccagggcagccagtggctctagctcagggaaagccaggcccacctgccctatcccctcccttgctcctgaggccaaagccagagactcgaacagcctccccaccaccaccagcatatgtcaaggagcacttgcaggcagaatgggaggaggacatggagctgatggagtccaggctgtgcaagcccctgaggtcttgagagatgtgcccactgcccgtgcagcctccttcagccagagcccagagcatagacaggagtgtaggagtccctgtttgatgtactctgggagagtaattctatctcctcttctgatagttggggaaactgaggccttgtctcacagttggatgcttttcccagttgtcagtgggtttctccatgggtctcatacagctgccttattgaaataggccccgaaccccctaaatgcaaaaaatactcttttttgctcctttacccccacctggaccctgggctattggctgctcccaatccttgccccaaacacttagctggctccccatgacttaagtgtgttctcttgtgtcctatggaatccagttctgaagaggtgggggaggacaactgtgggaaaagccctgggggcccctcccaaggccccatcagtgctctgagtaggctgtcatcagaacaaaagggctccactgctgacaaggtttgagaactgctggcttgaggtgagaacccctttaacctctgcgggacagcatgtctttccctatccaccttcgattcttttctcttttttttcttcattggctccttcttagtggattctcttctctactgccctgggcttcagcctttgtgcagtactctcgatgccctgaacacacaccttccctttgcccaggcggtgcaaacaatccacttcttcaagctccaacacaaatgctgcctcctttaggatgcctgctctgtgctctccctgcctcccctagcccatacctctgctggcaccttctgtaccatgccttcagaaaccttcttatccccctcatctctggggccccctgtggatctggcatacccaagttcagtaaatgtctatcagtaagctgatggtacatgcattttctagaatagagctgggacttcccatgtggcccacatctgacctggcagcccatgtattccggtcattagggatgggaagccatgaggacctggccttctgcccgacccaggcagccattcaagttgagcaatggccacttcgaagactcaagtgcacctgatccctgcgcaacagccacaccaggagaacaggctgtccttggcggcagtaggagcaggcgccaggtttcctggagctcttggcttcagccagcccccagccagagtcctggctaggacagtgacctgatctcctcctcatgaccttctgccctggacaagccccctgaactggatttgggactgtcaaagcaactctacccctgctctggtaggctgaacagtgaccccccaaaatggcagtgtcttaatcacctaaaccttaacatgtgactatattaccttcacatagcaaaatggactttgcagatgtgattaaggatcttgagatggaaggagtatcctggatttttcaggtaaactgagtataatcacaagggcctctgtaaaggaggcaggagtgtcagagtgacggaagaaaatgtatgtaacaatggaagcagaggtcagagtgatgcaattgctggaggaagagccatgagccgaggaatgcagacagcctcttctcctctggggcctcaagaagaatgcagtcctgccaataccttgattttaagccctgtgaaactgatttcagattgctgacctccagaacagtaagatcataaatttgtgttgttttcacatgtgtgaaaacacatgtgtgataatttgttacagcagccacgggaaacgaatatagattgtggtgcccaaattagagtgctgctgtaacacacgcctactgattgaagtggctttggaattgcaacgtggaaatgggcagaggctggaagaattttgagagtcatgataaattgccttaaccaccnnnnntctgataggtgatgtggccaggggaactcttcctcaaccttcagacctaaactgcccaggccccccctttttttactcatatttggagagaggtggccctttcccagagtgagaagactgaaagactgaccagcatgggtcccagaagggagtgggtgaggaatgggactgggatgtggggagaaagtgcaaggctggcctccatggcccatctccagagactgggtccagagaggacctcagagactgggaccaagcctgttcctgctctcctgtggagttatgtgactggcccaggaccccttgggtgtgtgaggatgagcaggggccctgtactctctgggttgcaggtactgcatctgtgaaatgagcacagcagcccctgactttgagctaatgggcctggcccctccatgtaagccataggcctgagcagagctgtgtcaccattctgttcctatggtggagtggggctatccctggggttctcaacctcctggttcctaaaactgaattggccaactggtgccctcagccctgtccctgtccaagctgggactaggacctccctttccaggggtactaaaggactctggagacaccatcccacccagccaaggcttggggctcctgaagccagtcctaacccaggagccacatggagagctactgggaggccagacatgggcctcatgctgggtttcagagctgagaagctgggggacagagagcatggacacctgggttcaagggtcagcttggccccaaatcacctggatacgctttggatgaagccaggagggcctgtttatactggaaggggtggatcatggcaagacttatattcaatccctgatcttttttcccagagagggatggggcttacttgaagtaacacagcacttgactcctgactcccagtatgatgctctcatctcctattgcttccaaaggcctggggttagttaattaagttaattaggtggtgctcatatggctgtccatgtagctactaaacccagggattctggcccataaagccctctgggccaggtttatgggcaggtaagagtcacattaggccaactgtagccctgggtgtgcagacagatctgagtcccatctgaagctctggtagctgtgggaggagagcaggatttcccccgcttgcggaatgagtgggtgccttcccctctgaggtaattggctgtacagcccccagcctctgccccccagggccctcctgaggtgtctggaaggacctttgggatctttggcctcataaccagaaatcagaagcttcaaattctagaggccccttttcttccaaagactacctctcacacatacagcagtcctgcaggaaaatggtcaggaaaggccaattttacagctcacaaagtgggaaaggcagggaagcctacctcagcttcatggaaagccctgaactgggctgacctccacctgccccagctatgcctaaagggggagggtgagacagcttagagtagccatgccccgtggcaggcaggcctggctaagtggcccccttcccaggggctggggtcttccccaaacactctacctctcagagcagaggatgtcaccttattgctccctcttgtactaggtctgcggccctcttctggggcatgtggctggggaaatggtgggatcagatatcccctactgagcccagggagcagattgttggtgcctgaagcgctcacagagatccctgtgctacagatgaggaaactgaggcttagcaggacaggagcagggctggggcacgagccaggtctcttctctggctcacagctgccagtccttcctttgccacctgaagaccccccaccccacctggctttccaggaacaggcctgcctgcctggagaggcgtccaagtccctctgctgttcctggaagtcagtgtgaggctgagctacgtgaccaagcaaagcaaactaggactacaggtgtgaacaaccctgcctggctaatttttaatttttttttttttttagaaacggggtcttgctatgttgccagggctggcacatggggtttttagttgtccccacattacaaagttgaggacaccaaggctcagcagggtgcagttgcaggtcaggttgcatagctggacaggaagggaggatgaggctgccattggtgtccatttgactatcagagacgctgaggccagcataactaggtcctgggctgtcccctgcagagcttagcgcagaagttacctgggcttgtggacccttggagcaggagcaagggtttccagggctgtccctagagggctttctagaagacctgcagctgctcctgggtgcatctcctgaggtatagggccagggcctcagtctctcaagacctactttgtgtcaggcaccagggagatgataccaagtggagggtcctatagaatatggtgcatcctgcgccaagtacttccaggattatcttactcaaccttcatgacatcctcagagatggaggctgtgaaccctctcgttatactgacgaagaaacaaactggggctaagaaacttgctcataggctggctgagctgtgattctggcataggctgagtgacctggagctggaggccttagtcatcacaccaggcttgaggaggggcggataggacaggaatataccaggcagtagggacagtctggacaaaagcctggagttctgcagacatgcgggtagggatatgtaggggtgaggtggtgccgagaggtccccttggctgagctctgaatgcatttctggggaccaggggcctaaagagctttttgagctgagttacagggttagagaagcattgaggctgctctttctggctgccaggaaaaaggggctggggcaggaggctgcaacttgtccagggtctggaggtggctggggtctgtagcagtggcatcagatattctggaacagaactgactcacaaccattgctgagggtttggatgtgagatggccaggaccacagtgggcccagggatctgattgggacctgggggaaatggggccaccctgagttggagactggggtgctggggggaacagtcggggagcttgacagtgtaggatgccttcagaatatccgagaagcagcattggggtgtctggagatgcaaatgtgaccatgtggggacacagtccaaaggcaacccttgaggtagagttgtgaagaccactctcctagacctgagtgctggcgacaacagtaccgggcatctgcagtgtgtaaactagtgccaggtgctgcacacacgtggtcataaatccatctgttggcacatcagggatcccttccttggcccactgtatggatgaagggactgaggcttaacatgcccaaggtcacacagccagcagctggccatgctggagtttgaacctagtcctctgacatcccagtcaggagaggcgtgagcaggctgccgaggccaaatgcagcccagggcctcaaccccccagaggggcctcaggagccagttaggtgccccacagccaacgtgggctccagggtgaaggggaaagtgatgaatcaaacagaaagcagcagacgcagactgagctctctccctgtcggcccgggtgccagattttcacgcccacagcaaaggggccaggcagagcgctaggtgtggggcaggagagggcagcgaaagtggctgccactgaacccagactctgatgtactccggatatgggtggcgtggactgacagacacccagcccagttccagactgaaagttgagtctgtctcagcatgtgaggatatgaagtttgccttgtcatggggagcatttcaggtccctaggcctgtgaggttctgggatgaggcaccagatggatgtgtctaaaaacccttgttgaaggcactccacagctcaataactgaccattgctcactactctcttggcccgcactgaaagccactgtttcttcatcatttcactcagcccgcctgtctcagccccccagaactttggagctcattctttcaaagtacatttcatgtgcaactgaaatacatatttttaaaaagataaaatgagcatctagttagcaaaaatgtattttgcaagtgcaaattctttcttagcatacagtccatcagggcgaagagcaatgaacacaaatgtttgaactgggggctgggatggtagttgtagtcttatgttggtctcaatgtccattttctttcagtgtttgattttggtagcacaggacaaagtgaccgctgattctcacagataattgtttacaaatgctagcactgtgtctgaagcccaccttgcagtctctttgattgacagggacagcaagagaagccttatctcaagctcagcacaaaccctgttctctgagcacataggaaggattctaatgtgtcataatttggtgctgtgcccatttgagtctgtgtgtggtttttaaaattgggtttttttttttttcaataattaaaaatatgagctgggcatggtggcacatgcctgtggtcccacctactcgggaggctgaggcaggaggattacttgagcacaagagtttaagacagcagtgagctataatagcgccactgcactccagcctggacatcagagtcagaccctgtctctaaaaaaataattttaggccgggcgcggtggctcacgcctgtaatcccagcactctgggaggctgaggcaggcagatcacctgaggtcaggagttcgaggccagcttggccaacatggtgaaaatccgtctgtactaaaaatacaaaaattagccgggtgtggtggctcacgcctgtaatcccagctacttgagaggctgaggcaggagaatcgcttgaaacngagaggcagatgttgcagtgagccaagatcacgccattgtactcccacccaggcaacaagagcaaaactctgtctcaaaaataataataataggccaggcgcagtagctcacgtttgtaatcccagcactttgggaggccaaggatcacaaggttaggagttcaagaccagcctggccaacacagtgaaaccccgtctactaaaaatacaaaaattagctgggtgtggtggtggacacctgtaatcccagctactcgggaggctgaagcaggagaattgcttgaacccgggaggcagagattgcagtgagccaagatcatgccactgcactccagcctgggcgacagagctagactccatctcaaaaaaaaaaatttaaaaataataattttaaaaaaatgttttaaaaatg

SEQ ID NO: 281478 - DNA, 11583 bp, Homo sapiens
  misc_feature (6285)..(6289): n is a, c, g, or t
  misc_feature (11171)..(11171): n is a, c, g, or t
ctttccggcaggctactgggctccgcccacacacctcccggcctggttcctaaacgccagctcggagcaatccccttgggctggagccaaatccctgctgtgattttaaggaagaccggcaggtccgggcccccaagggtcaaccccacacacatccccgcactttcctgtatgcaggcctgcgagcgtagagggagtggaattcacagcctccccacccatccgcaggggtctcctgggaggaacccaccagcgataggaacactgaagctgggctacggcgtccgcccgagccttttcttaaaggcgccgaccccggaagcggggcgtccgagggagcgcgcgacgggccacgcacgtccgggcgtccagttcggggcagcttctccggctggtgggtgggtggggcagcctttcaggcagggtggcaaccaactatatctgaggaccagagccattttggggcaccagagcttgtgacctctccatctccacccagctgggtccaggggccactctcagcactcacctcagcagctgacatcataaagcagacttgggaacctggaagcactctggagaacctttccctgagacatggagctttggggccgaatgctgtgggccctcctgtctggcccagggaggaggggaagtacccggggctgggccttcagctcatggcaaccccaaccacctctggctgggttatccagtgccatagaactggtcagccactggactggggtctttgagaagaggggtatccctgaggcccgggaatccagtgagtacatcgtggctcatgtccttggagccaaaacatttcagagcctgaggccggcactttggacccagcccttgacctctcagcaactacagtgtatccgggagctgagtagccgtcgattgcagaggatgccggtgcagtacatccttggagagtgggacttccaggggctcagcctaaggatggtgcccccagtgtttattccgcggccagaaacagaggaactggttgagtgggtgctggaagaggtggcccagaggtcccatgctgtgggatccccaggcagccccctcattctggaggtgggctgcggatcaggagccatctccctcagcctgctgagccagctcccccagagccgagtcattgctgtggataagcgggaagctgctatctctctgacccatgagaatgctcagaggcttcggttgcaggacaggatttggatcatccacctcgacatgacctcagaaaggagctggacacacctgccctggggccccatggacctgattgtcagcaaccctccctacgtcttccaccaggacatggagcagctggcccctgagatccgcagctatgaagaccccgcggccctggatggtggggaggagggcatggacatcattacccacattctggccttggcaccccggctcctgaaagactctggtagtatcttcttagaagtggacccaaggcacccggagcttgtcagcagctggcttcagagccggcctgacctgtaccttaatcttgtggctgtgcgcagggacttctgtgggaggtaagatcctagccccctttagccctgtagcatgctggtctttccactggggccatcctcagccctggctgtcaggagagtgtgctgttcccacttcctgttcattccctgaggcccaggtggtaaccagcccctgtccctgtctcctcaggccccggttcctgcatatccggaggtctgggccatagcatggctgccctgtggatgccttgtcagtgccgccagcctgaccagaggggaggtggatggcactttccagagcccaggttcttatggcatttcccagggttctgtgatttccccatgctctgcatttctaggatatttctaggacacctggattggctccatcacatcagagtggctgagggcagttgctctgtgttggtgaaattgctgtgggggtatcgggggatatggccagtaaagtattgagagactaacaaatggtgacctaatgttttgtccatgacttgcaggtcccctgacccccttactcccaggtagcactggggcaagggtttccttctgccccagcagggctggcccgtcagtcccctgcttggtagtggtgtgggggtgcagtgtggaggaaggcacgtgagtcctcactcctggccttggataccatgggtcctggcataagcagctcactcccagtgattgattagtcctccactgccctgggtgcatgcgtacacaattccctggccaagcctggctcgagcacaggaagctcatctgcgttttggctcaaggatgactgcctgctttctggaggggagggtctggaggtctttgctgcacagttcctgggtcgcacatccacgttcatttaactgaaggcttgagccagtgaggggtgtttcctttttatccccatagcttttagctaaaacatccctcccgagttgaccccctggggtttcaaataacccatgtgtccctggttggggctggggagagtgagaagctgagatactgggcacagggttgtggcctccaccccagctctggtctgtgcagactcatggccaccaggaggcctgcagatccagccttcctgtcaacagcgacaggaaatctctaggttggtgagtgctggtgatgtgagcctacatcagggtgggtcctaagaaacatggcaaaccaggctgtctcattccactaactgccccctgccaccctggcacttcccagggcctggcagtatggtctgatgggcagtatggtccaataggcagcatcctctgctgcagctgggagagctgagttccagggctgtgtcctgcagtgggaccttgggcaactcctttccctatgagaagctggctcttctgagtccagggccaacgccaactggcaacctctttactcttagtcaagtggaatgtgcatgctggcatctgaatgtccattcgccaggcatggagagcaagagaaggtatgtactgcctgaggtcacatgacagtgaccaagtggagacagtaagttagatccctccctttggggagcctatattgctggagtcatacccagcctaagtgttgccctgcactatggctggaggacatttggtagaggtcacactgcagctcccagtgccccagtgtcctgccctgtgcccagccccagctgcatggactctgagctgcccctggcttcctttaaggaggctgctccagaaggaacctgggtggggagggcgaagggggtgcacaaccagggcaaggctccccacttccttagtcccccatgctcacagacctttgcctgctaaggtcctcaccagtattgccctttctgtctttctccttgtgccctttggctcttgctgtcttcagcagcatctcagggtagctgccctgacctcggagcagtctgtcgcccccctacacctcagccagtcctggcttccctgatggtctctccctcctggcctcaggcccattcctgaggaagggccttggcgagcttgtggatgttgcaccagaagagagtgcagtgttggagagtgacactgtcggggcagctggggccacaagcaggagccggcctcgggcacaactttctgcccagaaaaatgtgcagcttgactctgctgaggaaaaggtccaagccaagaggactggcaggcggggcctcaagcctgcagccactggcttgattgggccctggacgttgagcccagatgttggagccacaccagcctggatttcaatcccagaatctgcccctcaccaggatgtgaccttgggcagatgacttcacctcactcagccttggcttctaaggctgagaaatgggacttaatgcttttttattttataggatgcatgtgaggagcccatggaatgtgcctggcttggcacattgtggcatttttccttgccttcctcggagggcagacacagggaggaaggacccagtgccctcaggcgtccatctgatgcatgggaccaacataaggcaggcagggatacaaggcagtctggaaagaagggaaggcaggagtttcagtcttgggctcttgactcctcgctgttgtctagagatggagccagcaggctggtagcctggcagcctacatctcccctcagcctctcctcactatggccccagtgccttgaggcccaggccagggcagccagtggctctagctcagggaaagccaggcccacctgccctatcccctcccttgctcctgaggccaaagccagagactcgaacagcctccccaccaccaccagcatatgtcaaggagcacttgcaggcagaatgggaggaggacatggagctgatggagtccaggctgtgcaagcccctgaggtcttgagagatgtgcccactgcccgtgcagcctccttcagccagagcccagagcatagacaggagtgtaggagtccctgtttgatgtactctgggagagtaattctatctcctcttctgatagttggggaaactgaggccttgtctcacagttggatgcttttcccagttgtcagtgggtttctccatgggtctcatacagctgccttattgaaataggccccgaaccccctaaatgcaaaaaatactcttttttgctcctttacccccacctggaccctgggctattggctgctcccaatccttgccccaaacacttagctggctccccatgacttaagtgtgttctcttgtgtcctatggaatccagttctgaagaggtgggggaggacaactgtgggaaaagccctgggggcccctcccaaggccccatcagtgctctgagtaggctgtcatcagaacaaaagggctccactgctgacaaggtttgagaactgctggcttgaggtgagaacccctttaacctctgcgggacagcatgtctttccctatccaccttcgattcttttctcttttttttcttcattggctccttcttagtggattctcttctctactgccctgggcttcagcctttgtgcagtactctcgatgccctgaacacacaccttccctttgcccaggcggtgcaaacaatccacttcttcaagctccaacacaaatgctgcctcctttaggatgcctgctctgtgctctccctgcctcccctagcccatacctctgctggcaccttctgtaccatgccttcagaaaccttcttatccccctcatctctggggccccctgtggatctggcatacccaagttcagtaaatgtctatcagtaagctgatggtacatgcattttctagaatagagctgggacttcccatgtggcccacatctgacctggcagcccatgtattccggtcattagggatgggaagccatgaggacctggccttctgcccgacccaggcagccattcaagttgagcaatggccacttcgaagactcaagtgcacctgatccctgcgcaacagccacaccaggagaacaggctgtccttggcggcagtaggagcaggcgccaggtttcctggagctcttggcttcagccagcccccagccagagtcctggctaggacagtgacctgatctcctcctcatgaccttctgccctggacaagccccctgaactggatttgggactgtcaaagcaactctacccctgctctggtaggctgaacagtgaccccccaaaatggcagtgtcttaatcacctaaaccttaacatgtgactatattaccttcacatagcaaaatggactttgcagatgtgattaaggatcttgagatggaaggagtatcctggatttttcaggtaaactgagtataatcacaagggcctctgtaaaggaggcaggagtgtcagagtgacggaagaaaatgtatgtaacaatggaagcagaggtcagagtgatgcaattgctggaggaagagccatgagccgaggaatgcagacagcctcttctcctctggggcctcaagaagaatgcagtcctgccaataccttgattttaagccctgtgaaactgatttcagattgctgacctccagaacagtaagatcataaatttgtgttgttttcacatgtgtgaaaacacatgtgtgataatttgttacagcagccacgggaaacgaatatagattgtggtgcccaaattagagtgctgctgtaacacacgcctactgattgaagtggctttggaattgcaacgtggaaatgggcagaggctggaagaattttgagagtcatgataaattgccttaaccaccnnnnntctgataggtgatgtggccaggggaactcttcctcaaccttcagacctaaactgcccaggccccccctttttttactcatatttggagagaggtggccctttcccagagtgagaagactgaaagactgaccagcatgggtcccagaagggagtgggtgaggaatgggactgggatgtggggagaaagtgcaaggctggcctccatggcccatctccagagactgggtccagagaggacctcagagactgggaccaagcctgttcctgctctcctgtggagttatgtgactggcccaggaccccttgggtgtgtgaggatgagcaggggccctgtactctctgggttgcaggtactgcatctgtgaaatgagcacagcagcccctgactttgagctaatgggcctggcccctccatgtaagccataggcctgagcagagctgtgtcaccattctgttcctatggtggagtggggctatccctggggttctcaacctcctggttcctaaaactgaattggccaactggtgccctcagccctgtccctgtccaagctgggactaggacctccctttccaggggtactaaaggactctggagacaccatcccacccagccaaggcttggggctcctgaagccagtcctaacccaggagccacatggagagctactgggaggccagacatgggcctcatgctgggtttcagagctgagaagctgggggacagagagcatggacacctgggttcaagggtcagcttggccccaaatcacctggatacgctttggatgaagccaggagggcctgtttatactggaaggggtggatcatggcaagacttatattcaatccctgatcttttttcccagagagggatggggcttacttgaagtaacacagcacttgactcctgactcccagtatgatgctctcatctcctattgcttccaaaggcctggggttagttaattaagttaattaggtggtgctcatatggctgtccatgtagctactaaacccagggattctggcccataaagccctctgggccaggtttatgggcaggtaagagtcacattaggccaactgtagccctgggtgtgcagacagatctgagtcccatctgaagctctggtagctgtgggaggagagcaggatttcccccgcttgcggaatgagtgggtgccttcccctctgaggtaattggctgtacagcccccagcctctgccccccagggccctcctgaggtgtctggaaggacctttgggatctttggcctcataaccagaaatcagaagcttcaaattctagaggccccttttcttccaaagactacctctcacacatacagcagtcctgcaggaaaatggtcaggaaaggccaattttacagctcacaaagtgggaaaggcagggaagcctacctcagcttcatggaaagccctgaactgggctgacctccacctgccccagctatgcctaaagggggagggtgagacagcttagagtagccatgccccgtggcaggcaggcctggctaagtggcccccttcccaggggctggggtcttccccaaacactctacctctcagagcagaggatgtcaccttattgctccctcttgtactaggtctgcggccctcttctggggcatgtggctggggaaatggtgggatcagatatcccctactgagcccagggagcagattgttggtgcctgaagcgctcacagagatccctgtgctacagatgaggaaactgaggcttagcaggacaggagcagggctggggcacgagccaggtctcttctctggctcacagctgccagtccttcctttgccacctgaagaccccccaccccacctggctttccaggaacaggcctgcctgcctggagaggcgtccaagtccctctgctgttcctggaagtcagtgtgaggctgagctacgtgaccaagcaaagcaaactaggactacaggtgtgaacaaccctgcctggctaatttttaatttttttttttttttagaaacggggtcttgctatgttgccagggctggcacatggggtttttagttgtccccacattacaaagttgaggacaccaaggctcagcagggtgcagttgcaggtcaggttgcatagctggacaggaagggaggatgaggctgccattggtgtccatttgactatcagagacgctgaggccagcataactaggtcctgggctgtcccctgcagagcttagcgcagaagttacctgggcttgtggacccttggagcaggagcaagggtttccagggctgtccctagagggctttctagaagacctgcagctgctcctgggtgcatctcctgaggtatagggccagggcctcagtctctcaagacctactttgtgtcaggcaccagggagatgataccaagtggagggtcctatagaatatggtgcatcctgcgccaagtacttccaggattatcttactcaaccttcatgacatcctcagagatggaggctgtgaaccctctcgttatactgacgaagaaacaaactggggctaagaaacttgctcataggctggctgagctgtgattctggcataggctgagtgacctggagctggaggccttagtcatcacaccaggcttgaggaggggcggataggacaggaatataccaggcagtagggacagtctggacaaaagcctggagttctgcagacatgcgggtagggatatgtaggggtgaggtggtgccgagaggtccccttggctgagctctgaatgcatttctggggaccaggggcctaaagagctttttgagctgagttacagggttagagaagcattgaggctgctctttctggctgccaggaaaaaggggctggggcaggaggctgcaacttgtccagggtctggaggtggctggggtctgtagcagtggcatcagatattctggaacagaactgactcacaaccattgctgagggtttggatgtgagatggccaggaccacagtgggcccagggatctgattgggacctgggggaaatggggccaccctgagttggagactggggtgctggggggaacagtcggggagcttgacagtgtaggatgccttcagaatatccgagaagcagcattggggtgtctggagatgcaaatgtgaccatgtggggacacagtccaaaggcaacccttgaggtagagttgtgaagaccactctcctagacctgagtgctggcgacaacagtaccgggcatctgcagtgtgtaaactagtgccaggtgctgcacacacgtggtcataaatccatctgttggcacatcagggatcccttccttggcccactgtatggatgaagggactgaggcttaacatgcccaaggtcacacagccagcagctggccatgctggagtttgaacctagtcctctgacatcccagtcaggagaggcgtgagcaggctgccgaggccaaatgcagcccagggcctcaaccccccagaggggcctcaggagccagttaggtgccccacagccaacgtgggctccagggtgaaggggaaagtgatgaatcaaacagaaagcagcagacgcagactgagctctctccctgtcggcccgggtgccagattttcacgcccacagcaaaggggccaggcagagcgctaggtgtggggcaggagagggcagcgaaagtggctgccactgaacccagactctgatgtactccggatatgggtggcgtggactgacagacacccagcccagttccagactgaaagttgagtctgtctcagcatgtgaggatatgaagtttgccttgtcatggggagcatttcaggtccctaggcctgtgaggttctgggatgaggcaccagatggatgtgtctaaaaacccttgttgaaggcactccacagctcaataactgaccattgctcactactctcttggcccgcactgaaagccactgtttcttcatcatttcactcagcccgcctgtctcagccccccagaactttggagctcattctttcaaagtacatttcatgtgcaactgaaatacatatttttaaaaagataaaatgagcatctagttagcaaaaatgtattttgcaagtgcaaattctttcttagcatacagtccatcagggcgaagagcaatgaacacaaatgtttgaactgggggctgggatggtagttgtagtcttatgttggtctcaatgtccattttctttcagtgtttgattttggtagcacaggacaaagtgaccgctgattctcacagataattgtttacaaatgctagcactgtgtctgaagcccaccttgcagtctctttgattgacagggacagcaagagaagccttatctcaagctcagcacaaaccctgttctctgagcacataggaaggattctaatgtgtcataatttggtgctgtgcccatttgagtctgtgtgtggtttttaaaattgggtttttttttttttcaataattaaaaatatgagctgggcatggtggcacatgcctgtggtcccacctactcgggaggctgaggcaggaggattacttgagcacaagagtttaagacagcagtgagctataatagcgccactgcactccagcctggacatcagagtcagaccctgtctctaaaaaaataattttaggccgggcgcggtggctcacgcctgtaatcccagcactctgggaggctgaggcaggcagatcacctgaggtcaggagttcgaggccagcttggccaacatggtgaaaatccgtctgtactaaaaatacaaaaattagccgggtgtggtggctcacgcctgtaatcccagctacttgagaggctgaggcaggagaatcgcttgaaacngagaggcagatgttgcagtgagccaagatcacgccattgtactcccacccaggcaacaagagcaaaactctgtctcaaaaataataataataggccaggcgcagtagctcacgtttgtaatcccagcactttgggaggccaaggatcacaaggttaggagttcaagaccagcctggccaacacagtgaaaccccgtctactaaaaatacaaaaattagctgggtgtggtggtggacacctgtaatcccagctactcgggaggctgaagcaggagaattgcttgaacccgggaggcagagattgcagtgagccaagatcatgccactgcactccagcctgggcgacagagctagactccatctcaaaaaaaaaaatttaaaaataataattttaaaaaaatgttttaaaaatg

SEQ ID NO: 281479 - DNA, 11233 bp, Homo sapiens
  misc_feature (5935)..(5939): n is a, c, g, or t
  misc_feature (10821)..(10821): n is a, c, g, or t
ctttccggcaggctactgggctccgcccacacacctcccggcctggttcctaaacgccagctcggagcaatccccttgggctggagccaaatccctgctgtgattttaaggaagaccggcaggtccgggcccccaagggtcaaccccacacacatccccgcactttcctgtatgcaggcctgcgagcgtagagggagtggaattcacagcctccccacccatccgcaggggtctcctgggaggaacccaccagcgataggaacactgaagctgggctacggcgtccgcccgagccttttcttaaaggcgccgaccccggaagcggggcgtccgagggagcgcgcgacgggccacgcacgtccgggcgtccagttcggggcagcttctccggctggtgggtgggtggggcagcctttcaggcagggtggcaaccaactatatctgaggaccagagccattttggggcaccagagcttgtgacctctccatctccacccagctgggtccaggggccactctcagcactcacctcagcagctgacatcataaagcagacttgggaacctggaagcactctggagaacctttccctgagacatggagctttggggccgaatgctgtgggccctcctgtctggcccagggaggaggggaagtacccggggctgggccttcagctcatggcaaccccaaccacctctggctgggttatccagtgccatagaactggtcagccactggactggggtctttgagaagaggggtatccctgaggcccgggaatccagtgagtacatcgtggctcatgtccttggagccaaaacatttcagagcctgaggccggcactttggacccagcccttgacctctcagcaactacagtgtatccgggagctgagtagccgtcgattgcagaggatgccggtgcagtacatccttggagagtgggacttccaggggctcagcctaaggatggtgcccccagtgtttattccgcggccagaaacagaggaactggttgagtgggtgctggaagaggtggcccagaggtcccatgctgtgggatccccaggcagccccctcattctggaggtgggctgcggatcaggagccatctccctcagcctgctgagccagctcccccagagccgagtcattgctgtggataagcgggaagctgctatctctctgacccatgagaatgctcagaggcttcggttgcaggacaggatttggatcatccacctcgacatgacctcagaaaggagctggacacacctgccctggggccccatggacctgattgtcacagctggcttcagagccggcctgacctgtaccttaatcttgtggctgtgcgcagggacttctgtgggaggccccggttcctgcatatccggaggtctgggccatagcatggctgccctgtggatgccttgtcagtgccgccagcctgaccagaggggaggtggatggcactttccagagcccaggttcttatggcatttcccagggttctgtgatttccccatgctctgcatttctaggatatttctaggacacctggattggctccatcacatcagagtggctgagggcagttgctctgtgttggtgaaattgctgtgggggtatcgggggatatggccagtaaagtattgagagactaacaaatggtgacctaatgttttgtccatgacttgcaggtcccctgacccccttactcccaggtagcactggggcaagggtttccttctgccccagcagggctggcccgtcagtcccctgcttggtagtggtgtgggggtgcagtgtggaggaaggcacgtgagtcctcactcctggccttggataccatgggtcctggcataagcagctcactcccagtgattgattagtcctccactgccctgggtgcatgcgtacacaattccctggccaagcctggctcgagcacaggaagctcatctgcgttttggctcaaggatgactgcctgctttctggaggggagggtctggaggtctttgctgcacagttcctgggtcgcacatccacgttcatttaactgaaggcttgagccagtgaggggtgtttcctttttatccccatagcttttagctaaaacatccctcccgagttgaccccctggggtttcaaataacccatgtgtccctggttggggctggggagagtgagaagctgagatactgggcacagggttgtggcctccaccccagctctggtctgtgcagactcatggccaccaggaggcctgcagatccagccttcctgtcaacagcgacaggaaatctctaggttggtgagtgctggtgatgtgagcctacatcagggtgggtcctaagaaacatggcaaaccaggctgtctcattccactaactgccccctgccaccctggcacttcccagggcctggcagtatggtctgatgggcagtatggtccaataggcagcatcctctgctgcagctgggagagctgagttccagggctgtgtcctgcagtgggaccttgggcaactcctttccctatgagaagctggctcttctgagtccagggccaacgccaactggcaacctctttactcttagtcaagtggaatgtgcatgctggcatctgaatgtccattcgccaggcatggagagcaagagaaggtatgtactgcctgaggtcacatgacagtgaccaagtggagacagtaagttagatccctccctttggggagcctatattgctggagtcatacccagcctaagtgttgccctgcactatggctggaggacatttggtagaggtcacactgcagctcccagtgccccagtgtcctgccctgtgcccagccccagctgcatggactctgagctgcccctggcttcctttaaggaggctgctccagaaggaacctgggtggggagggcgaagggggtgcacaaccagggcaaggctccccacttccttagtcccccatgctcacagacctttgcctgctaaggtcctcaccagtattgccctttctgtctttctccttgtgccctttggctcttgctgtcttcagcagcatctcagggtagctgccctgacctcggagcagtctgtcgcccccctacacctcagccagtcctggcttccctgatggtctctccctcctggcctcaggcccattcctgaggaagggccttggcgagcttgtggatgttgcaccagaagagagtgcagtgttggagagtgacactgtcggggcagctggggccacaagcaggagccggcctcgggcacaactttctgcccagaaaaatgtgcagcttgactctgctgaggaaaaggtccaagccaagaggactggcaggcggggcctcaagcctgcagccactggcttgattgggccctggacgttgagcccagatgttggagccacaccagcctggatttcaatcccagaatctgcccctcaccaggatgtgaccttgggcagatgacttcacctcactcagccttggcttctaaggctgagaaatgggacttaatgcttttttattttataggatgcatgtgaggagcccatggaatgtgcctggcttggcacattgtggcatttttccttgccttcctcggagggcagacacagggaggaaggacccagtgccctcaggcgtccatctgatgcatgggaccaacataaggcaggcagggatacaaggcagtctggaaagaagggaaggcaggagtttcagtcttgggctcttgactcctcgctgttgtctagagatggagccagcaggctggtagcctggcagcctacatctcccctcagcctctcctcactatggccccagtgccttgaggcccaggccagggcagccagtggctctagctcagggaaagccaggcccacctgccctatcccctcccttgctcctgaggccaaagccagagactcgaacagcctccccaccaccaccagcatatgtcaaggagcacttgcaggcagaatgggaggaggacatggagctgatggagtccaggctgtgcaagcccctgaggtcttgagagatgtgcccactgcccgtgcagcctccttcagccagagcccagagcatagacaggagtgtaggagtccctgtttgatgtactctgggagagtaattctatctcctcttctgatagttggggaaactgaggccttgtctcacagttggatgcttttcccagttgtcagtgggtttctccatgggtctcatacagctgccttattgaaataggccccgaaccccctaaatgcaaaaaatactcttttttgctcctttacccccacctggaccctgggctattggctgctcccaatccttgccccaaacacttagctggctccccatgacttaagtgtgttctcttgtgtcctatggaatccagttctgaagaggtgggggaggacaactgtgggaaaagccctgggggcccctcccaaggccccatcagtgctctgagtaggctgtcatcagaacaaaagggctccactgctgacaaggtttgagaactgctggcttgaggtgagaacccctttaacctctgcgggacagcatgtctttccctatccaccttcgattcttttctcttttttttcttcattggctccttcttagtggattctcttctctactgccctgggcttcagcctttgtgcagtactctcgatgccctgaacacacaccttccctttgcccaggcggtgcaaacaatccacttcttcaagctccaacacaaatgctgcctcctttaggatgcctgctctgtgctctccctgcctcccctagcccatacctctgctggcaccttctgtaccatgccttcagaaaccttcttatccccctcatctctggggccccctgtggatctggcatacccaagttcagtaaatgtctatcagtaagctgatggtacatgcattttctagaatagagctgggacttcccatgtggcccacatctgacctggcagcccatgtattccggtcattagggatgggaagccatgaggacctggccttctgcccgacccaggcagccattcaagttgagcaatggccacttcgaagactcaagtgcacctgatccctgcgcaacagccacaccaggagaacaggctgtccttggcggcagtaggagcaggcgccaggtttcctggagctcttggcttcagccagcccccagccagagtcctggctaggacagtgacctgatctcctcctcatgaccttctgccctggacaagccccctgaactggatttgggactgtcaaagcaactctacccctgctctggtaggctgaacagtgaccccccaaaatggcagtgtcttaatcacctaaaccttaacatgtgactatattaccttcacatagcaaaatggactttgcagatgtgattaaggatcttgagatggaaggagtatcctggatttttcaggtaaactgagtataatcacaagggcctctgtaaaggaggcaggagtgtcagagtgacggaagaaaatgtatgtaacaatggaagcagaggtcagagtgatgcaattgctggaggaagagccatgagccgaggaatgcagacagcctcttctcctctggggcctcaagaagaatgcagtcctgccaataccttgattttaagccctgtgaaactgatttcagattgctgacctccagaacagtaagatcataaatttgtgttgttttcacatgtgtgaaaacacatgtgtgataatttgttacagcagccacgggaaacgaatatagattgtggtgcccaaattagagtgctgctgtaacacacgcctactgattgaagtggctttggaattgcaacgtggaaatgggcagaggctggaagaattttgagagtcatgataaattgccttaaccaccnnnnntctgataggtgatgtggccaggggaactcttcctcaaccttcagacctaaactgcccaggccccccctttttttactcatatttggagagaggtggccctttcccagagtgagaagactgaaagactgaccagcatgggtcccagaagggagtgggtgaggaatgggactgggatgtggggagaaagtgcaaggctggcctccatggcccatctccagagactgggtccagagaggacctcagagactgggaccaagcctgttcctgctctcctgtggagttatgtgactggcccaggaccccttgggtgtgtgaggatgagcaggggccctgtactctctgggttgcaggtactgcatctgtgaaatgagcacagcagcccctgactttgagctaatgggcctggcccctccatgtaagccataggcctgagcagagctgtgtcaccattctgttcctatggtggagtggggctatccctggggttctcaacctcctggttcctaaaactgaattggccaactggtgccctcagccctgtccctgtccaagctgggactaggacctccctttccaggggtactaaaggactctggagacaccatcccacccagccaaggcttggggctcctgaagccagtcctaacccaggagccacatggagagctactgggaggccagacatgggcctcatgctgggtttcagagctgagaagctgggggacagagagcatggacacctgggttcaagggtcagcttggccccaaatcacctggatacgctttggatgaagccaggagggcctgtttatactggaaggggtggatcatggcaagacttatattcaatccctgatcttttttcccagagagggatggggcttacttgaagtaacacagcacttgactcctgactcccagtatgatgctctcatctcctattgcttccaaaggcctggggttagttaattaagttaattaggtggtgctcatatggctgtccatgtagctactaaacccagggattctggcccataaagccctctgggccaggtttatgggcaggtaagagtcacattaggccaactgtagccctgggtgtgcagacagatctgagtcccatctgaagctctggtagctgtgggaggagagcaggatttcccccgcttgcggaatgagtgggtgccttcccctctgaggtaattggctgtacagcccccagcctctgccccccagggccctcctgaggtgtctggaaggacctttgggatctttggcctcataaccagaaatcagaagcttcaaattctagaggccccttttcttccaaagactacctctcacacatacagcagtcctgcaggaaaatggtcaggaaaggccaattttacagctcacaaagtgggaaaggcagggaagcctacctcagcttcatggaaagccctgaactgggctgacctccacctgccccagctatgcctaaagggggagggtgagacagcttagagtagccatgccccgtggcaggcaggcctggctaagtggcccccttcccaggggctggggtcttccccaaacactctacctctcagagcagaggatgtcaccttattgctccctcttgtactaggtctgcggccctcttctggggcatgtggctggggaaatggtgggatcagatatcccctactgagcccagggagcagattgttggtgcctgaagcgctcacagagatccctgtgctacagatgaggaaactgaggcttagcaggacaggagcagggctggggcacgagccaggtctcttctctggctcacagctgccagtccttcctttgccacctgaagaccccccaccccacctggctttccaggaacaggcctgcctgcctggagaggcgtccaagtccctctgctgttcctggaagtcagtgtgaggctgagctacgtgaccaagcaaagcaaactaggactacaggtgtgaacaaccctgcctggctaatttttaatttttttttttttttagaaacggggtcttgctatgttgccagggctggcacatggggtttttagttgtccccacattacaaagttgaggacaccaaggctcagcagggtgcagttgcaggtcaggttgcatagctggacaggaagggaggatgaggctgccattggtgtccatttgactatcagagacgctgaggccagcataactaggtcctgggctgtcccctgcagagcttagcgcagaagttacctgggcttgtggacccttggagcaggagcaagggtttccagggctgtccctagagggctttctagaagacctgcagctgctcctgggtgcatctcctgaggtatagggccagggcctcagtctctcaagacctactttgtgtcaggcaccagggagatgataccaagtggagggtcctatagaatatggtgcatcctgcgccaagtacttccaggattatcttactcaaccttcatgacatcctcagagatggaggctgtgaaccctctcgttatactgacgaagaaacaaactggggctaagaaacttgctcataggctggctgagctgtgattctggcataggctgagtgacctggagctggaggccttagtcatcacaccaggcttgaggaggggcggataggacaggaatataccaggcagtagggacagtctggacaaaagcctggagttctgcagacatgcgggtagggatatgtaggggtgaggtggtgccgagaggtccccttggctgagctctgaatgcatttctggggaccaggggcctaaagagctttttgagctgagttacagggttagagaagcattgaggctgctctttctggctgccaggaaaaaggggctggggcaggaggctgcaacttgtccagggtctggaggtggctggggtctgtagcagtggcatcagatattctggaacagaactgactcacaaccattgctgagggtttggatgtgagatggccaggaccacagtgggcccagggatctgattgggacctgggggaaatggggccaccctgagttggagactggggtgctggggggaacagtcggggagcttgacagtgtaggatgccttcagaatatccgagaagcagcattggggtgtctggagatgcaaatgtgaccatgtggggacacagtccaaaggcaacccttgaggtagagttgtgaagaccactctcctagacctgagtgctggcgacaacagtaccgggcatctgcagtgtgtaaactagtgccaggtgctgcacacacgtggtcataaatccatctgttggcacatcagggatcccttccttggcccactgtatggatgaagggactgaggcttaacatgcccaaggtcacacagccagcagctggccatgctggagtttgaacctagtcctctgacatcccagtcaggagaggcgtgagcaggctgccgaggccaaatgcagcccagggcctcaaccccccagaggggcctcaggagccagttaggtgccccacagccaacgtgggctccagggtgaaggggaaagtgatgaatcaaacagaaagcagcagacgcagactgagctctctccctgtcggcccgggtgccagattttcacgcccacagcaaaggggccaggcagagcgctaggtgtggggcaggagagggcagcgaaagtggctgccactgaacccagactctgatgtactccggatatgggtggcgtggactgacagacacccagcccagttccagactgaaagttgagtctgtctcagcatgtgaggatatgaagtttgccttgtcatggggagcatttcaggtccctaggcctgtgaggttctgggatgaggcaccagatggatgtgtctaaaaacccttgttgaaggcactccacagctcaataactgaccattgctcactactctcttggcccgcactgaaagccactgtttcttcatcatttcactcagcccgcctgtctcagccccccagaactttggagctcattctttcaaagtacatttcatgtgcaactgaaatacatatttttaaaaagataaaatgagcatctagttagcaaaaatgtattttgcaagtgcaaattctttcttagcatacagtccatcagggcgaagagcaatgaacacaaatgtttgaactgggggctgggatggtagttgtagtcttatgttggtctcaatgtccattttctttcagtgtttgattttggtagcacaggacaaagtgaccgctgattctcacagataattgtttacaaatgctagcactgtgtctgaagcccaccttgcagtctctttgattgacagggacagcaagagaagccttatctcaagctcagcacaaaccctgttctctgagcacataggaaggattctaatgtgtcataatttggtgctgtgcccatttgagtctgtgtgtggtttttaaaattgggtttttttttttttcaataattaaaaatatgagctgggcatggtggcacatgcctgtggtcccacctactcgggaggctgaggcaggaggattacttgagcacaagagtttaagacagcagtgagctataatagcgccactgcactccagcctggacatcagagtcagaccctgtctctaaaaaaataattttaggccgggcgcggtggctcacgcctgtaatcccagcactctgggaggctgaggcaggcagatcacctgaggtcaggagttcgaggccagcttggccaacatggtgaaaatccgtctgtactaaaaatacaaaaattagccgggtgtggtggctcacgcctgtaatcccagctacttgagaggctgaggcaggagaatcgcttgaaacngagaggcagatgttgcagtgagccaagatcacgccattgtactcccacccaggcaacaagagcaaaactctgtctcaaaaataataataataggccaggcgcagtagctcacgtttgtaatcccagcactttgggaggccaaggatcacaaggttaggagttcaagaccagcctggccaacacagtgaaaccccgtctactaaaaatacaaaaattagctgggtgtggtggtggacacctgtaatcccagctactcgggaggctgaagcaggagaattgcttgaacccgggaggcagagattgcagtgagccaagatcatgccactgcactccagcctgggcgacagagctagactccatctcaaaaaaaaaaatttaaaaataataattttaaaaaaatgttttaaaaatg

SEQ ID NO: 281480 - DNA, 2019 bp, Homo sapiens
ctttccggcaggctactgggctccgcccacacacctcccggcctggttcctaaacgccagctcggagcaatccccttgggctggagccaaatccctgctgtgattttaaggaagaccggcaggtccgggcccccaagggtcaaccccacacacatccccgcactttcctgtatgcaggcctgcgagcgtagagggagtggaattcacagcctccccacccatccgcaggggtctcctgggaggaacccaccagcgataggaacactgaagctgggctacggcgtccgcccgagccttttcttaaaggcgccgaccccggaagcggggcgtccgagggagcgcgcgacgggccacgcacgtccgggcgtccagttcggggcagcttctccggctggtgggtgggtggggcagcctttcaggcagggtggcaaccaactatatctgaggaccagagccattttggggcaccagagcttgtgacctctccatctccacccagctgggtccaggggccactctcagcactcacctcagcagctgacatcataaagcagacttgggaacctggaagcactctggagaacctttccctgagacatggagctttggggccgaatgctgtgggccctcctgtctggcccagggaggaggggaagtacccggggctgggccttcagctcatggcaaccccaaccacctctggctgggttatccagtgccatagaactggtcagccactggactggggtctttgagaagaggggtatccctgaggcccgggaatccagtgagtacatcgtggctcatgtccttggagccaaaacatttcagagcctgaggccggcactttggacccagcccttgacctctcagcaactacagtgtatccgggagctgagtagccgtcgattgcagaggatgccggtgcagtacatccttggagagtgggacttccaggggctcagcctaaggatggtgcccccagtgtttattccgcggccagaaacagaggaactggttgagtgggtgctggaagaggtggcccagaggtcccatgctgtgggatccccaggcagccccctcattctggaggtgggctgcggatcaggagccatctccctcagcctgctgagccagctcccccagagccgagtcattgctgtggataagcgggaagctgctatctctctgacccatgagaatgctcagaggcttcggttgcaggacaggatttggatcatccacctcgacatgacctcagaaaggagctggacacacctgccctggggccccatggacctgattgtcagcaaccctccctacgtcttccaccaggacatggagcagctggcccctgagatccgcagctatgaagaccccgcggccctggatggtggggaggagggcatggacatcattacccacattctggccttggcaccccggctcctgaaagactctggtagtatcttcttagaagtggacccaaggcacccggagcttgtcagcagctggcttcagagccggcctgacctgtaccttaatcttgtggctgtgcgcagggacttctgtgggaggtaagatcctagccccctttagccctgtagcatgctggtctttccactggggccatcctcagccctggctgtcaggagagtgtgctgttcccacttcctgttcattccctgaggcccaggtggtaaccagcccctgtccctgtctcctcaggccccggttcctgcatatccggaggtctgggccatagcatggctgccctgtggatgccttgtcagtgccgccagcctgaccagaggggaggtggatggcactttccagagcccaggttcttatggcatttcccagggttctgtgatttccccatgctctgcatttctaggatatttctaggacacctggattggctccatcacatcagagtggctgagggcagttgctctgtgttggtgaaattgctgtgggggtatcgggggatatggccagtaaagtattgagagacta

SEQ ID NO: 281481 - DNA, 1538 bp, Homo sapiens
ctttccggcaggctactgggctccgcccacacacctcccggcctggttcctaaacgccagctcggagcaatccccttgggctggagccaaatccctgctgtgattttaaggaagaccggcaggtccgggcccccaagggtcaaccccacacacatccccgcactttcctgtatgcaggcctgcgagcgtagagggagtggaattcacagcctccccacccatccgcaggggtctcctgggaggaacccaccagcgataggaacactgaagctgggctacggcgtccgcccgagccttttcttaaaggcgccgaccccggaagcggggcgtccgagggagcgcgcgacgggccacgcacgtccgggcgtccagttcggggcagcttctccggctggtgggtgggtggggcagcctttcaggcagggtggcaaccaactatatctgaggaccagagccattttggggcaccagagcttgtgacctctccatctccacccagctgggtccaggggccactctcagcactcacctcagcagctgacatcataaagcagacttgggaacctggaagcactctggagaacctttccctgagacatggagctttggggccgaatgctgtgggccctcctgtctggcccagggaggaggggaagtacccggggctgggccttcagctcatggcaaccccaaccacctctggctgggttatccagtgccatagaactggtcagccactggactggggtctttgagaagaggggtatccctgaggcccgggaatccagtgagtacatcgtggctcatgtccttggagccaaaacatttcagagcctgaggccggcactttggacccagcccttgacctctcagcaactacagtgtatccgggagctgagtagccgtcgattgcagaggatgccggtgcagtacatccttggagagtgggacttccaggggctcagcctaaggatggtgcccccagtgtttattccgcggccagaaacagaggaactggttgagtgggtgctggaagaggtggcccagaggtcccatgctgtgggatccccaggcagccccctcattctggaggtgggctgcggatcaggagccatctccctcagcctgctgagccagctcccccagagccgagtcattgctgtggataagcgggaagctgctatctctctgacccatgagaatgctcagaggcttcggttgcaggacaggatttggatcatccacctcgacatgacctcagaaaggagctggacacacctgccctggggccccatggacctgattgtcagcaaccctccctacgtcttccaccaggacatggagcagctggcccctgagatccgcagctatgaagaccccgcggccctggatggtggggaggagggcatggacatcattacccacattctggccttggcaccccggctcctgaaagactctgggtatgaatgggatgggtctcctaggtctgtccccagcaggctcctctgctcctaatgtgtactgggcaggccctg

SEQ ID NO: 281482 - DNA, 242 bp, Homo sapiens
tttgagaagaggggtatccctgaggcccgggaatccagtgagtacatcgtggctcatgtccttggagccaaaacagttaagtttagtgttgtcaagaggacaggaagagggaggagggaggacttggggaagggatatccaggttttctgttcactaagagtgcttagctgagactgatgggatttttctgaaggaacgtcttagcgcctggcacacactgtaacagtttgttggatgaatg

SEQ ID NO: 281483 - DNA, 11131 bp, Homo sapiens
  misc_feature (5833)..(5837): n is a, c, g, or t
  misc_feature (10719)..(10719): n is a, c, g, or t
ctttccggcaggctactgggctccgcccacacacctcccggcctggttcctaaacgccagctcggagcaatccccttgggctggagccaaatccctgctgtgattttaaggaagaccggcagggtggcaaccaactatatctgaggaccagagccattttggggcaccagagcttgtgacctctccatctccacccagctgggtccaggggccactctcagcactcacctcagcagctgacatcataaagcagacttgggaacctggaagcactctggagaacctttccctgagacatggagctttggggccgaatgctgtgggccctcctgtctggcccagggaggaggggaagtacccggggctgggccttcagctcatggcaaccccaaccacctctggctgggttatccagtgccatagaactggtcagccactggactggggtctttgagaagaggggtatccctgaggcccgggaatccagtgagtacatcgtggctcatgtccttggagccaaaacatttcagagcctgaggccggcactttggacccagcccttgacctctcagcaactacagtgtatccgggagctgagtagccgtcgattgcagaggatgccggtgcagtacatccttggagagtgggacttccaggggctcagcctaaggatggtgcccccagtgtttattccgcggccagaaacagaggaactggttgagtgggtgctggaagaggtggcccagaggtcccatgctgtgggatccccaggcagccccctcattctggaggtgggctgcggatcaggagccatctccctcagcctgctgagccagctcccccagagccgagtcattgctgtggataagcgggaagctgctatctctctgacccatgagaatgctcagaggcttcggttgcaggacaggatttggatcatccacctcgacatgacctcagaaaggagctggacacacctgccctggggccccatggacctgattgtcagcaaccctccctacgtcttccaccaggacatggagcagctggcccctgagatccgcagctatgaagaccccgcggccctggatggtggggaggagggcatggacatcattacccacattctggccttggcaccccggctcctgaaagactctggtagtatcttcttagaagtggacccaaggcacccggagcttgtcagcagctggcttcagagccggcctgacctgtaccttaatcttgtggctgtgcgcagggacttctgtgggaggccccggttcctgcatatccggaggtctgggccatagcatggctgccctgtggatgccttgtcagtgccgccagcctgaccagaggggaggtggatggcactttccagagcccaggttcttatggcatttcccagggttctgtgatttccccatgctctgcatttctaggatatttctaggacacctggattggctccatcacatcagagtggctgagggcagttgctctgtgttggtgaaattgctgtgggggtatcgggggatatggccagtaaagtattgagagactaacaaatggtgacctaatgttttgtccatgacttgcaggtcccctgacccccttactcccaggtagcactggggcaagggtttccttctgccccagcagggctggcccgtcagtcccctgcttggtagtggtgtgggggtgcagtgtggaggaaggcacgtgagtcctcactcctggccttggataccatgggtcctggcataagcagctcactcccagtgattgattagtcctccactgccctgggtgcatgcgtacacaattccctggccaagcctggctcgagcacaggaagctcatctgcgttttggctcaaggatgactgcctgctttctggaggggagggtctggaggtctttgctgcacagttcctgggtcgcacatccacgttcatttaactgaaggcttgagccagtgaggggtgtttcctttttatccccatagcttttagctaaaacatccctcccgagttgaccccctggggtttcaaataacccatgtgtccctggttggggctggggagagtgagaagctgagatactgggcacagggttgtggcctccaccccagctctggtctgtgcagactcatggccaccaggaggcctgcagatccagccttcctgtcaacagcgacaggaaatctctaggttggtgagtgctggtgatgtgagcctacatcagggtgggtcctaagaaacatggcaaaccaggctgtctcattccactaactgccccctgccaccctggcacttcccagggcctggcagtatggtctgatgggcagtatggtccaataggcagcatcctctgctgcagctgggagagctgagttccagggctgtgtcctgcagtgggaccttgggcaactcctttccctatgagaagctggctcttctgagtccagggccaacgccaactggcaacctctttactcttagtcaagtggaatgtgcatgctggcatctgaatgtccattcgccaggcatggagagcaagagaaggtatgtactgcctgaggtcacatgacagtgaccaagtggagacagtaagttagatccctccctttggggagcctatattgctggagtcatacccagcctaagtgttgccctgcactatggctggaggacatttggtagaggtcacactgcagctcccagtgccccagtgtcctgccctgtgcccagccccagctgcatggactctgagctgcccctggcttcctttaaggaggctgctccagaaggaacctgggtggggagggcgaagggggtgcacaaccagggcaaggctccccacttccttagtcccccatgctcacagacctttgcctgctaaggtcctcaccagtattgccctttctgtctttctccttgtgccctttggctcttgctgtcttcagcagcatctcagggtagctgccctgacctcggagcagtctgtcgcccccctacacctcagccagtcctggcttccctgatggtctctccctcctggcctcaggcccattcctgaggaagggccttggcgagcttgtggatgttgcaccagaagagagtgcagtgttggagagtgacactgtcggggcagctggggccacaagcaggagccggcctcgggcacaactttctgcccagaaaaatgtgcagcttgactctgctgaggaaaaggtccaagccaagaggactggcaggcggggcctcaagcctgcagccactggcttgattgggccctggacgttgagcccagatgttggagccacaccagcctggatttcaatcccagaatctgcccctcaccaggatgtgaccttgggcagatgacttcacctcactcagccttggcttctaaggctgagaaatgggacttaatgcttttttattttataggatgcatgtgaggagcccatggaatgtgcctggcttggcacattgtggcatttttccttgccttcctcggagggcagacacagggaggaaggacccagtgccctcaggcgtccatctgatgcatgggaccaacataaggcaggcagggatacaaggcagtctggaaagaagggaaggcaggagtttcagtcttgggctcttgactcctcgctgttgtctagagatggagccagcaggctggtagcctggcagcctacatctcccctcagcctctcctcactatggccccagtgccttgaggcccaggccagggcagccagtggctctagctcagggaaagccaggcccacctgccctatcccctcccttgctcctgaggccaaagccagagactcgaacagcctccccaccaccaccagcatatgtcaaggagcacttgcaggcagaatgggaggaggacatggagctgatggagtccaggctgtgcaagcccctgaggtcttgagagatgtgcccactgcccgtgcagcctccttcagccagagcccagagcatagacaggagtgtaggagtccctgtttgatgtactctgggagagtaattctatctcctcttctgatagttggggaaactgaggccttgtctcacagttggatgcttttcccagttgtcagtgggtttctccatgggtctcatacagctgccttattgaaataggccccgaaccccctaaatgcaaaaaatactcttttttgctcctttacccccacctggaccctgggctattggctgctcccaatccttgccccaaacacttagctggctccccatgacttaagtgtgttctcttgtgtcctatggaatccagttctgaagaggtgggggaggacaactgtgggaaaagccctgggggcccctcccaaggccccatcagtgctctgagtaggctgtcatcagaacaaaagggctccactgctgacaaggtttgagaactgctggcttgaggtgagaacccctttaacctctgcgggacagcatgtctttccctatccaccttcgattcttttctcttttttttcttcattggctccttcttagtggattctcttctctactgccctgggcttcagcctttgtgcagtactctcgatgccctgaacacacaccttccctttgcccaggcggtgcaaacaatccacttcttcaagctccaacacaaatgctgcctcctttaggatgcctgctctgtgctctccctgcctcccctagcccatacctctgctggcaccttctgtaccatgccttcagaaaccttcttatccccctcatctctggggccccctgtggatctggcatacccaagttcagtaaatgtctatcagtaagctgatggtacatgcattttctagaatagagctgggacttcccatgtggcccacatctgacctggcagcccatgtattccggtcattagggatgggaagccatgaggacctggccttctgcccgacccaggcagccattcaagttgagcaatggccacttcgaagactcaagtgcacctgatccctgcgcaacagccacaccaggagaacaggctgtccttggcggcagtaggagcaggcgccaggtttcctggagctcttggcttcagccagcccccagccagagtcctggctaggacagtgacctgatctcctcctcatgaccttctgccctggacaagccccctgaactggatttgggactgtcaaagcaactctacccctgctctggtaggctgaacagtgaccccccaaaatggcagtgtcttaatcacctaaaccttaacatgtgactatattaccttcacatagcaaaatggactttgcagatgtgattaaggatcttgagatggaaggagtatcctggatttttcaggtaaactgagtataatcacaagggcctctgtaaaggaggcaggagtgtcagagtgacggaagaaaatgtatgtaacaatggaagcagaggtcagagtgatgcaattgctggaggaagagccatgagccgaggaatgcagacagcctcttctcctctggggcctcaagaagaatgcagtcctgccaataccttgattttaagccctgtgaaactgatttcagattgctgacctccagaacagtaagatcataaatttgtgttgttttcacatgtgtgaaaacacatgtgtgataatttgttacagcagccacgggaaacgaatatagattgtggtgcccaaattagagtgctgctgtaacacacgcctactgattgaagtggctttggaattgcaacgtggaaatgggcagaggctggaagaattttgagagtcatgataaattgccttaaccaccnnnnntctgataggtgatgtggccaggggaactcttcctcaaccttcagacctaaactgcccaggccccccctttttttactcatatttggagagaggtggccctttcccagagtgagaagactgaaagactgaccagcatgggtcccagaagggagtgggtgaggaatgggactgggatgtggggagaaagtgcaaggctggcctccatggcccatctccagagactgggtccagagaggacctcagagactgggaccaagcctgttcctgctctcctgtggagttatgtgactggcccaggaccccttgggtgtgtgaggatgagcaggggccctgtactctctgggttgcaggtactgcatctgtgaaatgagcacagcagcccctgactttgagctaatgggcctggcccctccatgtaagccataggcctgagcagagctgtgtcaccattctgttcctatggtggagtggggctatccctggggttctcaacctcctggttcctaaaactgaattggccaactggtgccctcagccctgtccctgtccaagctgggactaggacctccctttccaggggtactaaaggactctggagacaccatcccacccagccaaggcttggggctcctgaagccagtcctaacccaggagccacatggagagctactgggaggccagacatgggcctcatgctgggtttcagagctgagaagctgggggacagagagcatggacacctgggttcaagggtcagcttggccccaaatcacctggatacgctttggatgaagccaggagggcctgtttatactggaaggggtggatcatggcaagacttatattcaatccctgatcttttttcccagagagggatggggcttacttgaagtaacacagcacttgactcctgactcccagtatgatgctctcatctcctattgcttccaaaggcctggggttagttaattaagttaattaggtggtgctcatatggctgtccatgtagctactaaacccagggattctggcccataaagccctctgggccaggtttatgggcaggtaagagtcacattaggccaactgtagccctgggtgtgcagacagatctgagtcccatctgaagctctggtagctgtgggaggagagcaggatttcccccgcttgcggaatgagtgggtgccttcccctctgaggtaattggctgtacagcccccagcctctgccccccagggccctcctgaggtgtctggaaggacctttgggatctttggcctcataaccagaaatcagaagcttcaaattctagaggccccttttcttccaaagactacctctcacacatacagcagtcctgcaggaaaatggtcaggaaaggccaattttacagctcacaaagtgggaaaggcagggaagcctacctcagcttcatggaaagccctgaactgggctgacctccacctgccccagctatgcctaaagggggagggtgagacagcttagagtagccatgccccgtggcaggcaggcctggctaagtggcccccttcccaggggctggggtcttccccaaacactctacctctcagagcagaggatgtcaccttattgctccctcttgtactaggtctgcggccctcttctggggcatgtggctggggaaatggtgggatcagatatcccctactgagcccagggagcagattgttggtgcctgaagcgctcacagagatccctgtgctacagatgaggaaactgaggcttagcaggacaggagcagggctggggcacgagccaggtctcttctctggctcacagctgccagtccttcctttgccacctgaagaccccccaccccacctggctttccaggaacaggcctgcctgcctggagaggcgtccaagtccctctgctgttcctggaagtcagtgtgaggctgagctacgtgaccaagcaaagcaaactaggactacaggtgtgaacaaccctgcctggctaatttttaatttttttttttttttagaaacggggtcttgctatgttgccagggctggcacatggggtttttagttgtccccacattacaaagttgaggacaccaaggctcagcagggtgcagttgcaggtcaggttgcatagctggacaggaagggaggatgaggctgccattggtgtccatttgactatcagagacgctgaggccagcataactaggtcctgggctgtcccctgcagagcttagcgcagaagttacctgggcttgtggacccttggagcaggagcaagggtttccagggctgtccctagagggctttctagaagacctgcagctgctcctgggtgcatctcctgaggtatagggccagggcctcagtctctcaagacctactttgtgtcaggcaccagggagatgataccaagtggagggtcctatagaatatggtgcatcctgcgccaagtacttccaggattatcttactcaaccttcatgacatcctcagagatggaggctgtgaaccctctcgttatactgacgaagaaacaaactggggctaagaaacttgctcataggctggctgagctgtgattctggcataggctgagtgacctggagctggaggccttagtcatcacaccaggcttgaggaggggcggataggacaggaatataccaggcagtagggacagtctggacaaaagcctggagttctgcagacatgcgggtagggatatgtaggggtgaggtggtgccgagaggtccccttggctgagctctgaatgcatttctggggaccaggggcctaaagagctttttgagctgagttacagggttagagaagcattgaggctgctctttctggctgccaggaaaaaggggctggggcaggaggctgcaacttgtccagggtctggaggtggctggggtctgtagcagtggcatcagatattctggaacagaactgactcacaaccattgctgagggtttggatgtgagatggccaggaccacagtgggcccagggatctgattgggacctgggggaaatggggccaccctgagttggagactggggtgctggggggaacagtcggggagcttgacagtgtaggatgccttcagaatatccgagaagcagcattggggtgtctggagatgcaaatgtgaccatgtggggacacagtccaaaggcaacccttgaggtagagttgtgaagaccactctcctagacctgagtgctggcgacaacagtaccgggcatctgcagtgtgtaaactagtgccaggtgctgcacacacgtggtcataaatccatctgttggcacatcagggatcccttccttggcccactgtatggatgaagggactgaggcttaacatgcccaaggtcacacagccagcagctggccatgctggagtttgaacctagtcctctgacatcccagtcaggagaggcgtgagcaggctgccgaggccaaatgcagcccagggcctcaaccccccagaggggcctcaggagccagttaggtgccccacagccaacgtgggctccagggtgaaggggaaagtgatgaatcaaacagaaagcagcagacgcagactgagctctctccctgtcggcccgggtgccagattttcacgcccacagcaaaggggccaggcagagcgctaggtgtggggcaggagagggcagcgaaagtggctgccactgaacccagactctgatgtactccggatatgggtggcgtggactgacagacacccagcccagttccagactgaaagttgagtctgtctcagcatgtgaggatatgaagtttgccttgtcatggggagcatttcaggtccctaggcctgtgaggttctgggatgaggcaccagatggatgtgtctaaaaacccttgttgaaggcactccacagctcaataactgaccattgctcactactctcttggcccgcactgaaagccactgtttcttcatcatttcactcagcccgcctgtctcagccccccagaactttggagctcattctttcaaagtacatttcatgtgcaactgaaatacatatttttaaaaagataaaatgagcatctagttagcaaaaatgtattttgcaagtgcaaattctttcttagcatacagtccatcagggcgaagagcaatgaacacaaatgtttgaactgggggctgggatggtagttgtagtcttatgttggtctcaatgtccattttctttcagtgtttgattttggtagcacaggacaaagtgaccgctgattctcacagataattgtttacaaatgctagcactgtgtctgaagcccaccttgcagtctctttgattgacagggacagcaagagaagccttatctcaagctcagcacaaaccctgttctctgagcacataggaaggattctaatgtgtcataatttggtgctgtgcccatttgagtctgtgtgtggtttttaaaattgggtttttttttttttcaataattaaaaatatgagctgggcatggtggcacatgcctgtggtcccacctactcgggaggctgaggcaggaggattacttgagcacaagagtttaagacagcagtgagctataatagcgccactgcactccagcctggacatcagagtcagaccctgtctctaaaaaaataattttaggccgggcgcggtggctcacgcctgtaatcccagcactctgggaggctgaggcaggcagatcacctgaggtcaggagttcgaggccagcttggccaacatggtgaaaatccgtctgtactaaaaatacaaaaattagccgggtgtggtggctcacgcctgtaatcccagctacttgagaggctgaggcaggagaatcgcttgaaacngagaggcagatgttgcagtgagccaagatcacgccattgtactcccacccaggcaacaagagcaaaactctgtctcaaaaataataataataggccaggcgcagtagctcacgtttgtaatcccagcactttgggaggccaaggatcacaaggttaggagttcaagaccagcctggccaacacagtgaaaccccgtctactaaaaatacaaaaattagctgggtgtggtggtggacacctgtaatcccagctactcgggaggctgaagcaggagaattgcttgaacccgggaggcagagattgcagtgagccaagatcatgccactgcactccagcctgggcgacagagctagactccatctcaaaaaaaaaaatttaaaaataataattttaaaaaaatgttttaaaaatg

SEQ ID NO: 281484 - DNA, 11403 bp, Homo sapiens
  misc_feature (6105)..(6109): n is a, c, g, or t
  misc_feature (10991)..(10991): n is a, c, g, or t
ctttccggcaggctactgggctccgcccacacacctcccggcctggttcctaaacgccagctcggagcaatccccttgggctggagccaaatccctgctgtgattttaaggaagaccggcaggtccgggcccccaagggtcaaccccacacacatccccgcactttcctgtatgcaggcctgcgagcgtagagggagtggaattcacagcctccccacccatccgcaggggtctcctgggaggaacccaccagcgataggaacactgaagctgggctacggcgtccgcccgagccttttcttaaaggcgccgaccccggaagcggggcgtccgagggagcgcgcgacgggccacgcacgtccgggcgtccagttcggggcagcttctccggctgggtggcaaccaactatatctgaggaccagagccattttggggcaccagagcttgtgacctctccatctccacccagctgggtccaggggccactctcagcactcacctcagcagctgacatcataaagcagacttgggaacctggaagcactctggagaacctttccctgagacatggagctttggggccgaatgctgtgggccctcctgtctggcccagggaggaggggaagtacccggggctgggccttcagctcatggcaaccccaaccacctctggctgggttatccagtgccatagaactggtcagccactggactggggtctttgagaagaggggtatccctgaggcccgggaatccagtgagtacatcgtggctcatgtccttggagccaaaacatttcagagcctgaggccggcactttggacccagcccttgacctctcagcaactacagtgtatccgggagctgagtagccgtcgattgcagaggatgccggtgcagtacatccttggagagtgggacttccaggggctcagcctaaggatggtgcccccagtgtttattccgcggccagaaacagaggaactggttgagtgggtgctggaagaggtggcccagaggtcccatgctgtgggatccccaggcagccccctcattctggaggtgggctgcggatcaggagccatctccctcagcctgctgagccagctcccccagagccgagtcattgctgtggataagcgggaagctgctatctctctgacccatgagaatgctcagaggcttcggttgcaggacaggatttggatcatccacctcgacatgacctcagaaaggagctggacacacctgccctggggccccatggacctgattgtcagcaaccctccctacgtcttccaccaggacatggagcagctggcccctgagatccgcagctatgaagaccccgcggccctggatggtggggaggagggcatggacatcattacccacattctggccttggcaccccggctcctgaaagactctggtagtatcttcttagaagtggacccaaggcacccggagcttgtcagcagctggcttcagagccggcctgacctgtaccttaatcttgtggctgtgcgcagggacttctgtgggaggccccggttcctgcatatccggaggtctgggccatagcatggctgccctgtggatgccttgtcagtgccgccagcctgaccagaggggaggtggatggcactttccagagcccaggttcttatggcatttcccagggttctgtgatttccccatgctctgcatttctaggatatttctaggacacctggattggctccatcacatcagagtggctgagggcagttgctctgtgttggtgaaattgctgtgggggtatcgggggatatggccagtaaagtattgagagactaacaaatggtgacctaatgttttgtccatgacttgcaggtcccctgacccccttactcccaggtagcactggggcaagggtttccttctgccccagcagggctggcccgtcagtcccctgcttggtagtggtgtgggggtgcagtgtggaggaaggcacgtgagtcctcactcctggccttggataccatgggtcctggcataagcagctcactcccagtgattgattagtcctccactgccctgggtgcatgcgtacacaattccctggccaagcctggctcgagcacaggaagctcatctgcgttttggctcaaggatgactgcctgctttctggaggggagggtctggaggtctttgctgcacagttcctgggtcgcacatccacgttcatttaactgaaggcttgagccagtgaggggtgtttcctttttatccccatagcttttagctaaaacatccctcccgagttgaccccctggggtttcaaataacccatgtgtccctggttggggctggggagagtgagaagctgagatactgggcacagggttgtggcctccaccccagctctggtctgtgcagactcatggccaccaggaggcctgcagatccagccttcctgtcaacagcgacaggaaatctctaggttggtgagtgctggtgatgtgagcctacatcagggtgggtcctaagaaacatggcaaaccaggctgtctcattccactaactgccccctgccaccctggcacttcccagggcctggcagtatggtctgatgggcagtatggtccaataggcagcatcctctgctgcagctgggagagctgagttccagggctgtgtcctgcagtgggaccttgggcaactcctttccctatgagaagctggctcttctgagtccagggccaacgccaactggcaacctctttactcttagtcaagtggaatgtgcatgctggcatctgaatgtccattcgccaggcatggagagcaagagaaggtatgtactgcctgaggtcacatgacagtgaccaagtggagacagtaagttagatccctccctttggggagcctatattgctggagtcatacccagcctaagtgttgccctgcactatggctggaggacatttggtagaggtcacactgcagctcccagtgccccagtgtcctgccctgtgcccagccccagctgcatggactctgagctgcccctggcttcctttaaggaggctgctccagaaggaacctgggtggggagggcgaagggggtgcacaaccagggcaaggctccccacttccttagtcccccatgctcacagacctttgcctgctaaggtcctcaccagtattgccctttctgtctttctccttgtgccctttggctcttgctgtcttcagcagcatctcagggtagctgccctgacctcggagcagtctgtcgcccccctacacctcagccagtcctggcttccctgatggtctctccctcctggcctcaggcccattcctgaggaagggccttggcgagcttgtggatgttgcaccagaagagagtgcagtgttggagagtgacactgtcggggcagctggggccacaagcaggagccggcctcgggcacaactttctgcccagaaaaatgtgcagcttgactctgctgaggaaaaggtccaagccaagaggactggcaggcggggcctcaagcctgcagccactggcttgattgggccctggacgttgagcccagatgttggagccacaccagcctggatttcaatcccagaatctgcccctcaccaggatgtgaccttgggcagatgacttcacctcactcagccttggcttctaaggctgagaaatgggacttaatgcttttttattttataggatgcatgtgaggagcccatggaatgtgcctggcttggcacattgtggcatttttccttgccttcctcggagggcagacacagggaggaaggacccagtgccctcaggcgtccatctgatgcatgggaccaacataaggcaggcagggatacaaggcagtctggaaagaagggaaggcaggagtttcagtcttgggctcttgactcctcgctgttgtctagagatggagccagcaggctggtagcctggcagcctacatctcccctcagcctctcctcactatggccccagtgccttgaggcccaggccagggcagccagtggctctagctcagggaaagccaggcccacctgccctatcccctcccttgctcctgaggccaaagccagagactcgaacagcctccccaccaccaccagcatatgtcaaggagcacttgcaggcagaatgggaggaggacatggagctgatggagtccaggctgtgcaagcccctgaggtcttgagagatgtgcccactgcccgtgcagcctccttcagccagagcccagagcatagacaggagtgtaggagtccctgtttgatgtactctgggagagtaattctatctcctcttctgatagttggggaaactgaggccttgtctcacagttggatgcttttcccagttgtcagtgggtttctccatgggtctcatacagctgccttattgaaataggccccgaaccccctaaatgcaaaaaatactcttttttgctcctttacccccacctggaccctgggctattggctgctcccaatccttgccccaaacacttagctggctccccatgacttaagtgtgttctcttgtgtcctatggaatccagttctgaagaggtgggggaggacaactgtgggaaaagccctgggggcccctcccaaggccccatcagtgctctgagtaggctgtcatcagaacaaaagggctccactgctgacaaggtttgagaactgctggcttgaggtgagaacccctttaacctctgcgggacagcatgtctttccctatccaccttcgattcttttctcttttttttcttcattggctccttcttagtggattctcttctctactgccctgggcttcagcctttgtgcagtactctcgatgccctgaacacacaccttccctttgcccaggcggtgcaaacaatccacttcttcaagctccaacacaaatgctgcctcctttaggatgcctgctctgtgctctccctgcctcccctagcccatacctctgctggcaccttctgtaccatgccttcagaaaccttcttatccccctcatctctggggccccctgtggatctggcatacccaagttcagtaaatgtctatcagtaagctgatggtacatgcattttctagaatagagctgggacttcccatgtggcccacatctgacctggcagcccatgtattccggtcattagggatgggaagccatgaggacctggccttctgcccgacccaggcagccattcaagttgagcaatggccacttcgaagactcaagtgcacctgatccctgcgcaacagccacaccaggagaacaggctgtccttggcggcagtaggagcaggcgccaggtttcctggagctcttggcttcagccagcccccagccagagtcctggctaggacagtgacctgatctcctcctcatgaccttctgccctggacaagccccctgaactggatttgggactgtcaaagcaactctacccctgctctggtaggctgaacagtgaccccccaaaatggcagtgtcttaatcacctaaaccttaacatgtgactatattaccttcacatagcaaaatggactttgcagatgtgattaaggatcttgagatggaaggagtatcctggatttttcaggtaaactgagtataatcacaagggcctctgtaaaggaggcaggagtgtcagagtgacggaagaaaatgtatgtaacaatggaagcagaggtcagagtgatgcaattgctggaggaagagccatgagccgaggaatgcagacagcctcttctcctctggggcctcaagaagaatgcagtcctgccaataccttgattttaagccctgtgaaactgatttcagattgctgacctccagaacagtaagatcataaatttgtgttgttttcacatgtgtgaaaacacatgtgtgataatttgttacagcagccacgggaaacgaatatagattgtggtgcccaaattagagtgctgctgtaacacacgcctactgattgaagtggctttggaattgcaacgtggaaatgggcagaggctggaagaattttgagagtcatgataaattgccttaaccaccnnnnntctgataggtgatgtggccaggggaactcttcctcaaccttcagacctaaactgcccaggccccccctttttttactcatatttggagagaggtggccctttcccagagtgagaagactgaaagactgaccagcatgggtcccagaagggagtgggtgaggaatgggactgggatgtggggagaaagtgcaaggctggcctccatggcccatctccagagactgggtccagagaggacctcagagactgggaccaagcctgttcctgctctcctgtggagttatgtgactggcccaggaccccttgggtgtgtgaggatgagcaggggccctgtactctctgggttgcaggtactgcatctgtgaaatgagcacagcagcccctgactttgagctaatgggcctggcccctccatgtaagccataggcctgagcagagctgtgtcaccattctgttcctatggtggagtggggctatccctggggttctcaacctcctggttcctaaaactgaattggccaactggtgccctcagccctgtccctgtccaagctgggactaggacctccctttccaggggtactaaaggactctggagacaccatcccacccagccaaggcttggggctcctgaagccagtcctaacccaggagccacatggagagctactgggaggccagacatgggcctcatgctgggtttcagagctgagaagctgggggacagagagcatggacacctgggttcaagggtcagcttggccccaaatcacctggatacgctttggatgaagccaggagggcctgtttatactggaaggggtggatcatggcaagacttatattcaatccctgatcttttttcccagagagggatggggcttacttgaagtaacacagcacttgactcctgactcccagtatgatgctctcatctcctattgcttccaaaggcctggggttagttaattaagttaattaggtggtgctcatatggctgtccatgtagctactaaacccagggattctggcccataaagccctctgggccaggtttatgggcaggtaagagtcacattaggccaactgtagccctgggtgtgcagacagatctgagtcccatctgaagctctggtagctgtgggaggagagcaggatttcccccgcttgcggaatgagtgggtgccttcccctctgaggtaattggctgtacagcccccagcctctgccccccagggccctcctgaggtgtctggaaggacctttgggatctttggcctcataaccagaaatcagaagcttcaaattctagaggccccttttcttccaaagactacctctcacacatacagcagtcctgcaggaaaatggtcaggaaaggccaattttacagctcacaaagtgggaaaggcagggaagcctacctcagcttcatggaaagccctgaactgggctgacctccacctgccccagctatgcctaaagggggagggtgagacagcttagagtagccatgccccgtggcaggcaggcctggctaagtggcccccttcccaggggctggggtcttccccaaacactctacctctcagagcagaggatgtcaccttattgctccctcttgtactaggtctgcggccctcttctggggcatgtggctggggaaatggtgggatcagatatcccctactgagcccagggagcagattgttggtgcctgaagcgctcacagagatccctgtgctacagatgaggaaactgaggcttagcaggacaggagcagggctggggcacgagccaggtctcttctctggctcacagctgccagtccttcctttgccacctgaagaccccccaccccacctggctttccaggaacaggcctgcctgcctggagaggcgtccaagtccctctgctgttcctggaagtcagtgtgaggctgagctacgtgaccaagcaaagcaaactaggactacaggtgtgaacaaccctgcctggctaatttttaatttttttttttttttagaaacggggtcttgctatgttgccagggctggcacatggggtttttagttgtccccacattacaaagttgaggacaccaaggctcagcagggtgcagttgcaggtcaggttgcatagctggacaggaagggaggatgaggctgccattggtgtccatttgactatcagagacgctgaggccagcataactaggtcctgggctgtcccctgcagagcttagcgcagaagttacctgggcttgtggacccttggagcaggagcaagggtttccagggctgtccctagagggctttctagaagacctgcagctgctcctgggtgcatctcctgaggtatagggccagggcctcagtctctcaagacctactttgtgtcaggcaccagggagatgataccaagtggagggtcctatagaatatggtgcatcctgcgccaagtacttccaggattatcttactcaaccttcatgacatcctcagagatggaggctgtgaaccctctcgttatactgacgaagaaacaaactggggctaagaaacttgctcataggctggctgagctgtgattctggcataggctgagtgacctggagctggaggccttagtcatcacaccaggcttgaggaggggcggataggacaggaatataccaggcagtagggacagtctggacaaaagcctggagttctgcagacatgcgggtagggatatgtaggggtgaggtggtgccgagaggtccccttggctgagctctgaatgcatttctggggaccaggggcctaaagagctttttgagctgagttacagggttagagaagcattgaggctgctctttctggctgccaggaaaaaggggctggggcaggaggctgcaacttgtccagggtctggaggtggctggggtctgtagcagtggcatcagatattctggaacagaactgactcacaaccattgctgagggtttggatgtgagatggccaggaccacagtgggcccagggatctgattgggacctgggggaaatggggccaccctgagttggagactggggtgctggggggaacagtcggggagcttgacagtgtaggatgccttcagaatatccgagaagcagcattggggtgtctggagatgcaaatgtgaccatgtggggacacagtccaaaggcaacccttgaggtagagttgtgaagaccactctcctagacctgagtgctggcgacaacagtaccgggcatctgcagtgtgtaaactagtgccaggtgctgcacacacgtggtcataaatccatctgttggcacatcagggatcccttccttggcccactgtatggatgaagggactgaggcttaacatgcccaaggtcacacagccagcagctggccatgctggagtttgaacctagtcctctgacatcccagtcaggagaggcgtgagcaggctgccgaggccaaatgcagcccagggcctcaaccccccagaggggcctcaggagccagttaggtgccccacagccaacgtgggctccagggtgaaggggaaagtgatgaatcaaacagaaagcagcagacgcagactgagctctctccctgtcggcccgggtgccagattttcacgcccacagcaaaggggccaggcagagcgctaggtgtggggcaggagagggcagcgaaagtggctgccactgaacccagactctgatgtactccggatatgggtggcgtggactgacagacacccagcccagttccagactgaaagttgagtctgtctcagcatgtgaggatatgaagtttgccttgtcatggggagcatttcaggtccctaggcctgtgaggttctgggatgaggcaccagatggatgtgtctaaaaacccttgttgaaggcactccacagctcaataactgaccattgctcactactctcttggcccgcactgaaagccactgtttcttcatcatttcactcagcccgcctgtctcagccccccagaactttggagctcattctttcaaagtacatttcatgtgcaactgaaatacatatttttaaaaagataaaatgagcatctagttagcaaaaatgtattttgcaagtgcaaattctttcttagcatacagtccatcagggcgaagagcaatgaacacaaatgtttgaactgggggctgggatggtagttgtagtcttatgttggtctcaatgtccattttctttcagtgtttgattttggtagcacaggacaaagtgaccgctgattctcacagataattgtttacaaatgctagcactgtgtctgaagcccaccttgcagtctctttgattgacagggacagcaagagaagccttatctcaagctcagcacaaaccctgttctctgagcacataggaaggattctaatgtgtcataatttggtgctgtgcccatttgagtctgtgtgtggtttttaaaattgggtttttttttttttcaataattaaaaatatgagctgggcatggtggcacatgcctgtggtcccacctactcgggaggctgaggcaggaggattacttgagcacaagagtttaagacagcagtgagctataatagcgccactgcactccagcctggacatcagagtcagaccctgtctctaaaaaaataattttaggccgggcgcggtggctcacgcctgtaatcccagcactctgggaggctgaggcaggcagatcacctgaggtcaggagttcgaggccagcttggccaacatggtgaaaatccgtctgtactaaaaatacaaaaattagccgggtgtggtggctcacgcctgtaatcccagctacttgagaggctgaggcaggagaatcgcttgaaacngagaggcagatgttgcagtgagccaagatcacgccattgtactcccacccaggcaacaagagcaaaactctgtctcaaaaataataataataggccaggcgcagtagctcacgtttgtaatcccagcactttgggaggccaaggatcacaaggttaggagttcaagaccagcctggccaacacagtgaaaccccgtctactaaaaatacaaaaattagctgggtgtggtggtggacacctgtaatcccagctactcgggaggctgaagcaggagaattgcttgaacccgggaggcagagattgcagtgagccaagatcatgccactgcactccagcctgggcgacagagctagactccatctcaaaaaaaaaaatttaaaaataataattttaaaaaaatgttttaaaaatg

SEQ ID NO: 281485 - DNA, 11496 bp, Homo sapiens
  misc_feature (6198)..(6202): n is a, c, g, or t
  misc_feature (11084)..(11084): n is a, c, g, or t
ctttccggcaggctactgggctccgcccacacacctcccggcctggttcctaaacgccagctcggagcaatccccttgggctggagccaaatccctgctgtgattttaaggaagaccggcaggtccgggcccccaagggtcaaccccacacacatccccgcactttcctgtatgcaggcctgcgagcgtagagggagtggaattcacagcctccccacccatccgcaggggtctcctgggaggaacccaccagcgataggaacactgaagctgggctacggcgtccgcccgagccttttcttaaaggcgccgaccccggaagcggggcgtccgagggagcgcgcgacgggccacgcacgtccgggcgtccagttcggggcagcttctccggctggtgggtgggtggggcagcctttcaggcaggtatgcatgggaggtggggatcggaacggggtgtttcgactgcaaccgcctggagacctggccgggtggcaaccaactatatctgaggaccagagccattttggggcaccagagcttgtgacctctccatctccacccagctgggtccaggggccactctcagcactcacctcagcagctgacatcataaagcagacttgggaacctggaagcactctggagaacctttccctgagacatggagctttggggccgaatgctgtgggccctcctgtctggcccagggaggaggggaagtacccggggctgggccttcagctcatggcaaccccaaccacctctggctgggttatccagtgccatagaactggtcagccactggactggggtctttgagaagaggggtatccctgaggcccgggaatccagtgagtacatcgtggctcatgtccttggagccaaaacatttcagagcctgaggccggcactttggacccagcccttgacctctcagcaactacagtgtatccgggagctgagtagccgtcgattgcagaggatgccggtgcagtacatccttggagagtgggacttccaggggctcagcctaaggatggtgcccccagtgtttattccgcggccagaaacagaggaactggttgagtgggtgctggaagaggtggcccagaggtcccatgctgtgggatccccaggcagccccctcattctggaggtgggctgcggatcaggagccatctccctcagcctgctgagccagctcccccagagccgagtcattgctgtggataagcgggaagctgctatctctctgacccatgagaatgctcagaggcttcggttgcaggacaggatttggatcatccacctcgacatgacctcagaaaggagctggacacacctgccctggggccccatggacctgattgtcagcaaccctccctacgtcttccaccaggacatggagcagctggcccctgagatccgcagctatgaagaccccgcggccctggatggtggggaggagggcatggacatcattacccacattctggccttggcaccccggctcctgaaagactctggtagtatcttcttagaagtggacccaaggcacccggagcttgtcagcagctggcttcagagccggcctgacctgtaccttaatcttgtggctgtgcgcagggacttctgtgggaggccccggttcctgcatatccggaggtctgggccatagcatggctgccctgtggatgccttgtcagtgccgccagcctgaccagaggggaggtggatggcactttccagagcccaggttcttatggcatttcccagggttctgtgatttccccatgctctgcatttctaggatatttctaggacacctggattggctccatcacatcagagtggctgagggcagttgctctgtgttggtgaaattgctgtgggggtatcgggggatatggccagtaaagtattgagagactaacaaatggtgacctaatgttttgtccatgacttgcaggtcccctgacccccttactcccaggtagcactggggcaagggtttccttctgccccagcagggctggcccgtcagtcccctgcttggtagtggtgtgggggtgcagtgtggaggaaggcacgtgagtcctcactcctggccttggataccatgggtcctggcataagcagctcactcccagtgattgattagtcctccactgccctgggtgcatgcgtacacaattccctggccaagcctggctcgagcacaggaagctcatctgcgttttggctcaaggatgactgcctgctttctggaggggagggtctggaggtctttgctgcacagttcctgggtcgcacatccacgttcatttaactgaaggcttgagccagtgaggggtgtttcctttttatccccatagcttttagctaaaacatccctcccgagttgaccccctggggtttcaaataacccatgtgtccctggttggggctggggagagtgagaagctgagatactgggcacagggttgtggcctccaccccagctctggtctgtgcagactcatggccaccaggaggcctgcagatccagccttcctgtcaacagcgacaggaaatctctaggttggtgagtgctggtgatgtgagcctacatcagggtgggtcctaagaaacatggcaaaccaggctgtctcattccactaactgccccctgccaccctggcacttcccagggcctggcagtatggtctgatgggcagtatggtccaataggcagcatcctctgctgcagctgggagagctgagttccagggctgtgtcctgcagtgggaccttgggcaactcctttccctatgagaagctggctcttctgagtccagggccaacgccaactggcaacctctttactcttagtcaagtggaatgtgcatgctggcatctgaatgtccattcgccaggcatggagagcaagagaaggtatgtactgcctgaggtcacatgacagtgaccaagtggagacagtaagttagatccctccctttggggagcctatattgctggagtcatacccagcctaagtgttgccctgcactatggctggaggacatttggtagaggtcacactgcagctcccagtgccccagtgtcctgccctgtgcccagccccagctgcatggactctgagctgcccctggcttcctttaaggaggctgctccagaaggaacctgggtggggagggcgaagggggtgcacaaccagggcaaggctccccacttccttagtcccccatgctcacagacctttgcctgctaaggtcctcaccagtattgccctttctgtctttctccttgtgccctttggctcttgctgtcttcagcagcatctcagggtagctgccctgacctcggagcagtctgtcgcccccctacacctcagccagtcctggcttccctgatggtctctccctcctggcctcaggcccattcctgaggaagggccttggcgagcttgtggatgttgcaccagaagagagtgcagtgttggagagtgacactgtcggggcagctggggccacaagcaggagccggcctcgggcacaactttctgcccagaaaaatgtgcagcttgactctgctgaggaaaaggtccaagccaagaggactggcaggcggggcctcaagcctgcagccactggcttgattgggccctggacgttgagcccagatgttggagccacaccagcctggatttcaatcccagaatctgcccctcaccaggatgtgaccttgggcagatgacttcacctcactcagccttggcttctaaggctgagaaatgggacttaatgcttttttattttataggatgcatgtgaggagcccatggaatgtgcctggcttggcacattgtggcatttttccttgccttcctcggagggcagacacagggaggaaggacccagtgccctcaggcgtccatctgatgcatgggaccaacataaggcaggcagggatacaaggcagtctggaaagaagggaaggcaggagtttcagtcttgggctcttgactcctcgctgttgtctagagatggagccagcaggctggtagcctggcagcctacatctcccctcagcctctcctcactatggccccagtgccttgaggcccaggccagggcagccagtggctctagctcagggaaagccaggcccacctgccctatcccctcccttgctcctgaggccaaagccagagactcgaacagcctccccaccaccaccagcatatgtcaaggagcacttgcaggcagaatgggaggaggacatggagctgatggagtccaggctgtgcaagcccctgaggtcttgagagatgtgcccactgcccgtgcagcctccttcagccagagcccagagcatagacaggagtgtaggagtccctgtttgatgtactctgggagagtaattctatctcctcttctgatagttggggaaactgaggccttgtctcacagttggatgcttttcccagttgtcagtgggtttctccatgggtctcatacagctgccttattgaaataggccccgaaccccctaaatgcaaaaaatactcttttttgctcctttacccccacctggaccctgggctattggctgctcccaatccttgccccaaacacttagctggctccccatgacttaagtgtgttctcttgtgtcctatggaatccagttctgaagaggtgggggaggacaactgtgggaaaagccctgggggcccctcccaaggccccatcagtgctctgagtaggctgtcatcagaacaaaagggctccactgctgacaaggtttgagaactgctggcttgaggtgagaacccctttaacctctgcgggacagcatgtctttccctatccaccttcgattcttttctcttttttttcttcattggctccttcttagtggattctcttctctactgccctgggcttcagcctttgtgcagtactctcgatgccctgaacacacaccttccctttgcccaggcggtgcaaacaatccacttcttcaagctccaacacaaatgctgcctcctttaggatgcctgctctgtgctctccctgcctcccctagcccatacctctgctggcaccttctgtaccatgccttcagaaaccttcttatccccctcatctctggggccccctgtggatctggcatacccaagttcagtaaatgtctatcagtaagctgatggtacatgcattttctagaatagagctgggacttcccatgtggcccacatctgacctggcagcccatgtattccggtcattagggatgggaagccatgaggacctggccttctgcccgacccaggcagccattcaagttgagcaatggccacttcgaagactcaagtgcacctgatccctgcgcaacagccacaccaggagaacaggctgtccttggcggcagtaggagcaggcgccaggtttcctggagctcttggcttcagccagcccccagccagagtcctggctaggacagtgacctgatctcctcctcatgaccttctgccctggacaagccccctgaactggatttgggactgtcaaagcaactctacccctgctctggtaggctgaacagtgaccccccaaaatggcagtgtcttaatcacctaaaccttaacatgtgactatattaccttcacatagcaaaatggactttgcagatgtgattaaggatcttgagatggaaggagtatcctggatttttcaggtaaactgagtataatcacaagggcctctgtaaaggaggcaggagtgtcagagtgacggaagaaaatgtatgtaacaatggaagcagaggtcagagtgatgcaattgctggaggaagagccatgagccgaggaatgcagacagcctcttctcctctggggcctcaagaagaatgcagtcctgccaataccttgattttaagccctgtgaaactgatttcagattgctgacctccagaacagtaagatcataaatttgtgttgttttcacatgtgtgaaaacacatgtgtgataatttgttacagcagccacgggaaacgaatatagattgtggtgcccaaattagagtgctgctgtaacacacgcctactgattgaagtggctttggaattgcaacgtggaaatgggcagaggctggaagaattttgagagtcatgataaattgccttaaccaccnnnnntctgataggtgatgtggccaggggaactcttcctcaaccttcagacctaaactgcccaggccccccctttttttactcatatttggagagaggtggccctttcccagagtgagaagactgaaagactgaccagcatgggtcccagaagggagtgggtgaggaatgggactgggatgtggggagaaagtgcaaggctggcctccatggcccatctccagagactgggtccagagaggacctcagagactgggaccaagcctgttcctgctctcctgtggagttatgtgactggcccaggaccccttgggtgtgtgaggatgagcaggggccctgtactctctgggttgcaggtactgcatctgtgaaatgagcacagcagcccctgactttgagctaatgggcctggcccctccatgtaagccataggcctgagcagagctgtgtcaccattctgttcctatggtggagtggggctatccctggggttctcaacctcctggttcctaaaactgaattggccaactggtgccctcagccctgtccctgtccaagctgggactaggacctccctttccaggggtactaaaggactctggagacaccatcccacccagccaaggcttggggctcctgaagccagtcctaacccaggagccacatggagagctactgggaggccagacatgggcctcatgctgggtttcagagctgagaagctgggggacagagagcatggacacctgggttcaagggtcagcttggccccaaatcacctggatacgctttggatgaagccaggagggcctgtttatactggaaggggtggatcatggcaagacttatattcaatccctgatcttttttcccagagagggatggggcttacttgaagtaacacagcacttgactcctgactcccagtatgatgctctcatctcctattgcttccaaaggcctggggttagttaattaagttaattaggtggtgctcatatggctgtccatgtagctactaaacccagggattctggcccataaagccctctgggccaggtttatgggcaggtaagagtcacattaggccaactgtagccctgggtgtgcagacagatctgagtcccatctgaagctctggtagctgtgggaggagagcaggatttcccccgcttgcggaatgagtgggtgccttcccctctgaggtaattggctgtacagcccccagcctctgccccccagggccctcctgaggtgtctggaaggacctttgggatctttggcctcataaccagaaatcagaagcttcaaattctagaggccccttttcttccaaagactacctctcacacatacagcagtcctgcaggaaaatggtcaggaaaggccaattttacagctcacaaagtgggaaaggcagggaagcctacctcagcttcatggaaagccctgaactgggctgacctccacctgccccagctatgcctaaagggggagggtgagacagcttagagtagccatgccccgtggcaggcaggcctggctaagtggcccccttcccaggggctggggtcttccccaaacactctacctctcagagcagaggatgtcaccttattgctccctcttgtactaggtctgcggccctcttctggggcatgtggctggggaaatggtgggatcagatatcccctactgagcccagggagcagattgttggtgcctgaagcgctcacagagatccctgtgctacagatgaggaaactgaggcttagcaggacaggagcagggctggggcacgagccaggtctcttctctggctcacagctgccagtccttcctttgccacctgaagaccccccaccccacctggctttccaggaacaggcctgcctgcctggagaggcgtccaagtccctctgctgttcctggaagtcagtgtgaggctgagctacgtgaccaagcaaagcaaactaggactacaggtgtgaacaaccctgcctggctaatttttaatttttttttttttttagaaacggggtcttgctatgttgccagggctggcacatggggtttttagttgtccccacattacaaagttgaggacaccaaggctcagcagggtgcagttgcaggtcaggttgcatagctggacaggaagggaggatgaggctgccattggtgtccatttgactatcagagacgctgaggccagcataactaggtcctgggctgtcccctgcagagcttagcgcagaagttacctgggcttgtggacccttggagcaggagcaagggtttccagggctgtccctagagggctttctagaagacctgcagctgctcctgggtgcatctcctgaggtatagggccagggcctcagtctctcaagacctactttgtgtcaggcaccagggagatgataccaagtggagggtcctatagaatatggtgcatcctgcgccaagtacttccaggattatcttactcaaccttcatgacatcctcagagatggaggctgtgaaccctctcgttatactgacgaagaaacaaactggggctaagaaacttgctcataggctggctgagctgtgattctggcataggctgagtgacctggagctggaggccttagtcatcacaccaggcttgaggaggggcggataggacaggaatataccaggcagtagggacagtctggacaaaagcctggagttctgcagacatgcgggtagggatatgtaggggtgaggtggtgccgagaggtccccttggctgagctctgaatgcatttctggggaccaggggcctaaagagctttttgagctgagttacagggttagagaagcattgaggctgctctttctggctgccaggaaaaaggggctggggcaggaggctgcaacttgtccagggtctggaggtggctggggtctgtagcagtggcatcagatattctggaacagaactgactcacaaccattgctgagggtttggatgtgagatggccaggaccacagtgggcccagggatctgattgggacctgggggaaatggggccaccctgagttggagactggggtgctggggggaacagtcggggagcttgacagtgtaggatgccttcagaatatccgagaagcagcattggggtgtctggagatgcaaatgtgaccatgtggggacacagtccaaaggcaacccttgaggtagagttgtgaagaccactctcctagacctgagtgctggcgacaacagtaccgggcatctgcagtgtgtaaactagtgccaggtgctgcacacacgtggtcataaatccatctgttggcacatcagggatcccttccttggcccactgtatggatgaagggactgaggcttaacatgcccaaggtcacacagccagcagctggccatgctggagtttgaacctagtcctctgacatcccagtcaggagaggcgtgagcaggctgccgaggccaaatgcagcccagggcctcaaccccccagaggggcctcaggagccagttaggtgccccacagccaacgtgggctccagggtgaaggggaaagtgatgaatcaaacagaaagcagcagacgcagactgagctctctccctgtcggcccgggtgccagattttcacgcccacagcaaaggggccaggcagagcgctaggtgtggggcaggagagggcagcgaaagtggctgccactgaacccagactctgatgtactccggatatgggtggcgtggactgacagacacccagcccagttccagactgaaagttgagtctgtctcagcatgtgaggatatgaagtttgccttgtcatggggagcatttcaggtccctaggcctgtgaggttctgggatgaggcaccagatggatgtgtctaaaaacccttgttgaaggcactccacagctcaataactgaccattgctcactactctcttggcccgcactgaaagccactgtttcttcatcatttcactcagcccgcctgtctcagccccccagaactttggagctcattctttcaaagtacatttcatgtgcaactgaaatacatatttttaaaaagataaaatgagcatctagttagcaaaaatgtattttgcaagtgcaaattctttcttagcatacagtccatcagggcgaagagcaatgaacacaaatgtttgaactgggggctgggatggtagttgtagtcttatgttggtctcaatgtccattttctttcagtgtttgattttggtagcacaggacaaagtgaccgctgattctcacagataattgtttacaaatgctagcactgtgtctgaagcccaccttgcagtctctttgattgacagggacagcaagagaagccttatctcaagctcagcacaaaccctgttctctgagcacataggaaggattctaatgtgtcataatttggtgctgtgcccatttgagtctgtgtgtggtttttaaaattgggtttttttttttttcaataattaaaaatatgagctgggcatggtggcacatgcctgtggtcccacctactcgggaggctgaggcaggaggattacttgagcacaagagtttaagacagcagtgagctataatagcgccactgcactccagcctggacatcagagtcagaccctgtctctaaaaaaataattttaggccgggcgcggtggctcacgcctgtaatcccagcactctgggaggctgaggcaggcagatcacctgaggtcaggagttcgaggccagcttggccaacatggtgaaaatccgtctgtactaaaaatacaaaaattagccgggtgtggtggctcacgcctgtaatcccagctacttgagaggctgaggcaggagaatcgcttgaaacngagaggcagatgttgcagtgagccaagatcacgccattgtactcccacccaggcaacaagagcaaaactctgtctcaaaaataataataataggccaggcgcagtagctcacgtttgtaatcccagcactttgggaggccaaggatcacaaggttaggagttcaagaccagcctggccaacacagtgaaaccccgtctactaaaaatacaaaaattagctgggtgtggtggtggacacctgtaatcccagctactcgggaggctgaagcaggagaattgcttgaacccgggaggcagagattgcagtgagccaagatcatgccactgcactccagcctgggcgacagagctagactccatctcaaaaaaaaaaatttaaaaataataattttaaaaaaatgttttaaaaatg

SEQ ID NO: 281486 - DNA, 10444 bp, Homo sapiens
  misc_feature (5146)..(5150): n is a, c, g, or t
  misc_feature (10032)..(10032): n is a, c, g, or t
aatcttgactccttttcaggtttcaaactcaccaatgtctgatttctactcccaagaaggaggaagcagtggggtagcctggcatgggtcccatggggttctgaatgggtagtgggcagtgagtatcttgccagtccaagaagggttgactataagacctcattcttgtagtgaagggtaggggtctgcccccgtgcctacccctttctccctgtctgtgtaggcttcggttgcaggacaggatttggatcatccacctcgacatgacctcagaaaggagctggacacacctgccctggggccccatggacctgattgtcagcaaccctccctacgtcttccaccaggacatggagcagctggcccctgagatccgcagctatgaagaccccgcggccctggatggtggggaggagggcatggacatcattacccacattctggccttggcaccccggctcctgaaagactctggtagtatcttcttagaagtggacccaaggcacccggagcttgtcagcagctggcttcagagccggcctgacctgtaccttaatcttgtggctgtgcgcagggacttctgtgggaggccccggttcctgcatatccggaggtctgggccatagcatggctgccctgtggatgccttgtcagtgccgccagcctgaccagaggggaggtggatggcactttccagagcccaggttcttatggcatttcccagggttctgtgatttccccatgctctgcatttctaggatatttctaggacacctggattggctccatcacatcagagtggctgagggcagttgctctgtgttggtgaaattgctgtgggggtatcgggggatatggccagtaaagtattgagagactaacaaatggtgacctaatgttttgtccatgacttgcaggtcccctgacccccttactcccaggtagcactggggcaagggtttccttctgccccagcagggctggcccgtcagtcccctgcttggtagtggtgtgggggtgcagtgtggaggaaggcacgtgagtcctcactcctggccttggataccatgggtcctggcataagcagctcactcccagtgattgattagtcctccactgccctgggtgcatgcgtacacaattccctggccaagcctggctcgagcacaggaagctcatctgcgttttggctcaaggatgactgcctgctttctggaggggagggtctggaggtctttgctgcacagttcctgggtcgcacatccacgttcatttaactgaaggcttgagccagtgaggggtgtttcctttttatccccatagcttttagctaaaacatccctcccgagttgaccccctggggtttcaaataacccatgtgtccctggttggggctggggagagtgagaagctgagatactgggcacagggttgtggcctccaccccagctctggtctgtgcagactcatggccaccaggaggcctgcagatccagccttcctgtcaacagcgacaggaaatctctaggttggtgagtgctggtgatgtgagcctacatcagggtgggtcctaagaaacatggcaaaccaggctgtctcattccactaactgccccctgccaccctggcacttcccagggcctggcagtatggtctgatgggcagtatggtccaataggcagcatcctctgctgcagctgggagagctgagttccagggctgtgtcctgcagtgggaccttgggcaactcctttccctatgagaagctggctcttctgagtccagggccaacgccaactggcaacctctttactcttagtcaagtggaatgtgcatgctggcatctgaatgtccattcgccaggcatggagagcaagagaaggtatgtactgcctgaggtcacatgacagtgaccaagtggagacagtaagttagatccctccctttggggagcctatattgctggagtcatacccagcctaagtgttgccctgcactatggctggaggacatttggtagaggtcacactgcagctcccagtgccccagtgtcctgccctgtgcccagccccagctgcatggactctgagctgcccctggcttcctttaaggaggctgctccagaaggaacctgggtggggagggcgaagggggtgcacaaccagggcaaggctccccacttccttagtcccccatgctcacagacctttgcctgctaaggtcctcaccagtattgccctttctgtctttctccttgtgccctttggctcttgctgtcttcagcagcatctcagggtagctgccctgacctcggagcagtctgtcgcccccctacacctcagccagtcctggcttccctgatggtctctccctcctggcctcaggcccattcctgaggaagggccttggcgagcttgtggatgttgcaccagaagagagtgcagtgttggagagtgacactgtcggggcagctggggccacaagcaggagccggcctcgggcacaactttctgcccagaaaaatgtgcagcttgactctgctgaggaaaaggtccaagccaagaggactggcaggcggggcctcaagcctgcagccactggcttgattgggccctggacgttgagcccagatgttggagccacaccagcctggatttcaatcccagaatctgcccctcaccaggatgtgaccttgggcagatgacttcacctcactcagccttggcttctaaggctgagaaatgggacttaatgcttttttattttataggatgcatgtgaggagcccatggaatgtgcctggcttggcacattgtggcatttttccttgccttcctcggagggcagacacagggaggaaggacccagtgccctcaggcgtccatctgatgcatgggaccaacataaggcaggcagggatacaaggcagtctggaaagaagggaaggcaggagtttcagtcttgggctcttgactcctcgctgttgtctagagatggagccagcaggctggtagcctggcagcctacatctcccctcagcctctcctcactatggccccagtgccttgaggcccaggccagggcagccagtggctctagctcagggaaagccaggcccacctgccctatcccctcccttgctcctgaggccaaagccagagactcgaacagcctccccaccaccaccagcatatgtcaaggagcacttgcaggcagaatgggaggaggacatggagctgatggagtccaggctgtgcaagcccctgaggtcttgagagatgtgcccactgcccgtgcagcctccttcagccagagcccagagcatagacaggagtgtaggagtccctgtttgatgtactctgggagagtaattctatctcctcttctgatagttggggaaactgaggccttgtctcacagttggatgcttttcccagttgtcagtgggtttctccatgggtctcatacagctgccttattgaaataggccccgaaccccctaaatgcaaaaaatactcttttttgctcctttacccccacctggaccctgggctattggctgctcccaatccttgccccaaacacttagctggctccccatgacttaagtgtgttctcttgtgtcctatggaatccagttctgaagaggtgggggaggacaactgtgggaaaagccctgggggcccctcccaaggccccatcagtgctctgagtaggctgtcatcagaacaaaagggctccactgctgacaaggtttgagaactgctggcttgaggtgagaacccctttaacctctgcgggacagcatgtctttccctatccaccttcgattcttttctcttttttttcttcattggctccttcttagtggattctcttctctactgccctgggcttcagcctttgtgcagtactctcgatgccctgaacacacaccttccctttgcccaggcggtgcaaacaatccacttcttcaagctccaacacaaatgctgcctcctttaggatgcctgctctgtgctctccctgcctcccctagcccatacctctgctggcaccttctgtaccatgccttcagaaaccttcttatccccctcatctctggggccccctgtggatctggcatacccaagttcagtaaatgtctatcagtaagctgatggtacatgcattttctagaatagagctgggacttcccatgtggcccacatctgacctggcagcccatgtattccggtcattagggatgggaagccatgaggacctggccttctgcccgacccaggcagccattcaagttgagcaatggccacttcgaagactcaagtgcacctgatccctgcgcaacagccacaccaggagaacaggctgtccttggcggcagtaggagcaggcgccaggtttcctggagctcttggcttcagccagcccccagccagagtcctggctaggacagtgacctgatctcctcctcatgaccttctgccctggacaagccccctgaactggatttgggactgtcaaagcaactctacccctgctctggtaggctgaacagtgaccccccaaaatggcagtgtcttaatcacctaaaccttaacatgtgactatattaccttcacatagcaaaatggactttgcagatgtgattaaggatcttgagatggaaggagtatcctggatttttcaggtaaactgagtataatcacaagggcctctgtaaaggaggcaggagtgtcagagtgacggaagaaaatgtatgtaacaatggaagcagaggtcagagtgatgcaattgctggaggaagagccatgagccgaggaatgcagacagcctcttctcctctggggcctcaagaagaatgcagtcctgccaataccttgattttaagccctgtgaaactgatttcagattgctgacctccagaacagtaagatcataaatttgtgttgttttcacatgtgtgaaaacacatgtgtgataatttgttacagcagccacgggaaacgaatatagattgtggtgcccaaattagagtgctgctgtaacacacgcctactgattgaagtggctttggaattgcaacgtggaaatgggcagaggctggaagaattttgagagtcatgataaattgccttaaccaccnnnnntctgataggtgatgtggccaggggaactcttcctcaaccttcagacctaaactgcccaggccccccctttttttactcatatttggagagaggtggccctttcccagagtgagaagactgaaagactgaccagcatgggtcccagaagggagtgggtgaggaatgggactgggatgtggggagaaagtgcaaggctggcctccatggcccatctccagagactgggtccagagaggacctcagagactgggaccaagcctgttcctgctctcctgtggagttatgtgactggcccaggaccccttgggtgtgtgaggatgagcaggggccctgtactctctgggttgcaggtactgcatctgtgaaatgagcacagcagcccctgactttgagctaatgggcctggcccctccatgtaagccataggcctgagcagagctgtgtcaccattctgttcctatggtggagtggggctatccctggggttctcaacctcctggttcctaaaactgaattggccaactggtgccctcagccctgtccctgtccaagctgggactaggacctccctttccaggggtactaaaggactctggagacaccatcccacccagccaaggcttggggctcctgaagccagtcctaacccaggagccacatggagagctactgggaggccagacatgggcctcatgctgggtttcagagctgagaagctgggggacagagagcatggacacctgggttcaagggtcagcttggccccaaatcacctggatacgctttggatgaagccaggagggcctgtttatactggaaggggtggatcatggcaagacttatattcaatccctgatcttttttcccagagagggatggggcttacttgaagtaacacagcacttgactcctgactcccagtatgatgctctcatctcctattgcttccaaaggcctggggttagttaattaagttaattaggtggtgctcatatggctgtccatgtagctactaaacccagggattctggcccataaagccctctgggccaggtttatgggcaggtaagagtcacattaggccaactgtagccctgggtgtgcagacagatctgagtcccatctgaagctctggtagctgtgggaggagagcaggatttcccccgcttgcggaatgagtgggtgccttcccctctgaggtaattggctgtacagcccccagcctctgccccccagggccctcctgaggtgtctggaaggacctttgggatctttggcctcataaccagaaatcagaagcttcaaattctagaggccccttttcttccaaagactacctctcacacatacagcagtcctgcaggaaaatggtcaggaaaggccaattttacagctcacaaagtgggaaaggcagggaagcctacctcagcttcatggaaagccctgaactgggctgacctccacctgccccagctatgcctaaagggggagggtgagacagcttagagtagccatgccccgtggcaggcaggcctggctaagtggcccccttcccaggggctggggtcttccccaaacactctacctctcagagcagaggatgtcaccttattgctccctcttgtactaggtctgcggccctcttctggggcatgtggctggggaaatggtgggatcagatatcccctactgagcccagggagcagattgttggtgcctgaagcgctcacagagatccctgtgctacagatgaggaaactgaggcttagcaggacaggagcagggctggggcacgagccaggtctcttctctggctcacagctgccagtccttcctttgccacctgaagaccccccaccccacctggctttccaggaacaggcctgcctgcctggagaggcgtccaagtccctctgctgttcctggaagtcagtgtgaggctgagctacgtgaccaagcaaagcaaactaggactacaggtgtgaacaaccctgcctggctaatttttaatttttttttttttttagaaacggggtcttgctatgttgccagggctggcacatggggtttttagttgtccccacattacaaagttgaggacaccaaggctcagcagggtgcagttgcaggtcaggttgcatagctggacaggaagggaggatgaggctgccattggtgtccatttgactatcagagacgctgaggccagcataactaggtcctgggctgtcccctgcagagcttagcgcagaagttacctgggcttgtggacccttggagcaggagcaagggtttccagggctgtccctagagggctttctagaagacctgcagctgctcctgggtgcatctcctgaggtatagggccagggcctcagtctctcaagacctactttgtgtcaggcaccagggagatgataccaagtggagggtcctatagaatatggtgcatcctgcgccaagtacttccaggattatcttactcaaccttcatgacatcctcagagatggaggctgtgaaccctctcgttatactgacgaagaaacaaactggggctaagaaacttgctcataggctggctgagctgtgattctggcataggctgagtgacctggagctggaggccttagtcatcacaccaggcttgaggaggggcggataggacaggaatataccaggcagtagggacagtctggacaaaagcctggagttctgcagacatgcgggtagggatatgtaggggtgaggtggtgccgagaggtccccttggctgagctctgaatgcatttctggggaccaggggcctaaagagctttttgagctgagttacagggttagagaagcattgaggctgctctttctggctgccaggaaaaaggggctggggcaggaggctgcaacttgtccagggtctggaggtggctggggtctgtagcagtggcatcagatattctggaacagaactgactcacaaccattgctgagggtttggatgtgagatggccaggaccacagtgggcccagggatctgattgggacctgggggaaatggggccaccctgagttggagactggggtgctggggggaacagtcggggagcttgacagtgtaggatgccttcagaatatccgagaagcagcattggggtgtctggagatgcaaatgtgaccatgtggggacacagtccaaaggcaacccttgaggtagagttgtgaagaccactctcctagacctgagtgctggcgacaacagtaccgggcatctgcagtgtgtaaactagtgccaggtgctgcacacacgtggtcataaatccatctgttggcacatcagggatcccttccttggcccactgtatggatgaagggactgaggcttaacatgcccaaggtcacacagccagcagctggccatgctggagtttgaacctagtcctctgacatcccagtcaggagaggcgtgagcaggctgccgaggccaaatgcagcccagggcctcaaccccccagaggggcctcaggagccagttaggtgccccacagccaacgtgggctccagggtgaaggggaaagtgatgaatcaaacagaaagcagcagacgcagactgagctctctccctgtcggcccgggtgccagattttcacgcccacagcaaaggggccaggcagagcgctaggtgtggggcaggagagggcagcgaaagtggctgccactgaacccagactctgatgtactccggatatgggtggcgtggactgacagacacccagcccagttccagactgaaagttgagtctgtctcagcatgtgaggatatgaagtttgccttgtcatggggagcatttcaggtccctaggcctgtgaggttctgggatgaggcaccagatggatgtgtctaaaaacccttgttgaaggcactccacagctcaataactgaccattgctcactactctcttggcccgcactgaaagccactgtttcttcatcatttcactcagcccgcctgtctcagccccccagaactttggagctcattctttcaaagtacatttcatgtgcaactgaaatacatatttttaaaaagataaaatgagcatctagttagcaaaaatgtattttgcaagtgcaaattctttcttagcatacagtccatcagggcgaagagcaatgaacacaaatgtttgaactgggggctgggatggtagttgtagtcttatgttggtctcaatgtccattttctttcagtgtttgattttggtagcacaggacaaagtgaccgctgattctcacagataattgtttacaaatgctagcactgtgtctgaagcccaccttgcagtctctttgattgacagggacagcaagagaagccttatctcaagctcagcacaaaccctgttctctgagcacataggaaggattctaatgtgtcataatttggtgctgtgcccatttgagtctgtgtgtggtttttaaaattgggtttttttttttttcaataattaaaaatatgagctgggcatggtggcacatgcctgtggtcccacctactcgggaggctgaggcaggaggattacttgagcacaagagtttaagacagcagtgagctataatagcgccactgcactccagcctggacatcagagtcagaccctgtctctaaaaaaataattttaggccgggcgcggtggctcacgcctgtaatcccagcactctgggaggctgaggcaggcagatcacctgaggtcaggagttcgaggccagcttggccaacatggtgaaaatccgtctgtactaaaaatacaaaaattagccgggtgtggtggctcacgcctgtaatcccagctacttgagaggctgaggcaggagaatcgcttgaaacngagaggcagatgttgcagtgagccaagatcacgccattgtactcccacccaggcaacaagagcaaaactctgtctcaaaaataataataataggccaggcgcagtagctcacgtttgtaatcccagcactttgggaggccaaggatcacaaggttaggagttcaagaccagcctggccaacacagtgaaaccccgtctactaaaaatacaaaaattagctgggtgtggtggtggacacctgtaatcccagctactcgggaggctgaagcaggagaattgcttgaacccgggaggcagagattgcagtgagccaagatcatgccactgcactccagcctgggcgacagagctagactccatctcaaaaaaaaaaatttaaaaataataattttaaaaaaatgttttaaaaatg

SEQ ID NO: 281487 - DNA, 1674 bp, Homo sapiens
ctttccggcaggctactgggctccgcccacacacctcccggcctggttcctaaacgccagctcggagcaatccccttgggctggagccaaatccctgctgtgattttaaggaagaccggcaggtccgggcccccaagggtcaaccccacacacatccccgcactttcctgtatgcaggcctgcgagcgtagagggagtggaattcacagcctccccacccatccgcaggggtctcctgggaggaacccaccagcgataggaacactgaagctgggctacggcgtccgcccgagccttttcttaaaggcgccgaccccggaagcggggcgtccgagggagcgcgcgacgggccacgcacgtccgggcgtccagttcggggcagcttctccggctggtgggtgggtggggcagcctttcaggcagggtggcaaccaactatatctgaggaccagagccattttggggcaccagagcttgtgacctctccatctccacccagctgggtccaggggccactctcagcactcacctcagcagctgacatcataaagcagacttgggaacctggaagcactctggagaacctttccctgagacatggagctttggggccgaatgctgtgggccctcctgtctggcccagggaggaggggaagtacccggggctgggccttcagctcatggcaaccccaaccacctctggctgggttatccagtgccatagaactggtcagccactggactggggtctttgagaagaggggtatccctgaggcccgggaatccagtgagtacatcgtggctcatgtccttggagccaaaacatttcagagcctgaggccggcactttggacccagcccttgacctctcagcaactacagtgtatccgggagctgagtagccgtcgattgcagagctctgtccctgatgaccacccagctgccccctctgcaggatgccggtgcagtacatccttggagagtgggacttccaggggctcagcctaaggatggtgcccccagtgtttattccgcggccagaaacagaggaactggttgagtgggtgctggaagaggtggcccagaggtcccatgctgtgggatccccaggcagccccctcattctggaggtgggctgcggatcaggagccatctccctcagcctgctgagccagctcccccagagccgagtcattgctgtggataagcgggaagctgctatctctctgacccatgagaatgctcagaggcttcggttgcaggacaggatttggatcatccacctcgacatgacctcagaaaggagctggacacacctgccctggggccccatggacctgattgtcagcaaccctccctacgtcttccaccaggacatggagcagctggcccctgagatccgcagctatgaagaccccgcggccctggatggtggggaggagggcatggacatcattacccacattctggccttggcaccccggctcctgaaagactctggtagtttctcttagaagtgacccagcaccggactgtcagaagtggttcagaaccggctgactgtactaatctgggtgtggccggacttcgtggagccggcctggaaccggggtggcaagatgggccgtgtgcttgagcgcactacaagggggggggtcaaccgctttgttccct

SEQ ID NO: 281488 - DNA, 2228 bp, Homo sapiens
aacacttttttctcctttgatcatttttattcattattgaattggtgaacccatccagcatggttggaactccctaaaaaaaaaactagtaggattgaaggaaaaaaattacagttatcattcccagctagtatgtttagataatcaaagactagaagaagctatatattattagaaaaagaaagtttatagcaaagttgtagaatattcaatatataaaagttaattatatttttacatcccttttatgattgaattaataaatattaaagttaattgggaaaacatctagcaaaatatttgtaaaactttttgtagaactggaaaattttatttaaagataacctaaataaatgtagagatatgccatttatggatgctttggctgtgatattctaatacggtttttccttgcagactttgccttcaaaagaaacagcatttttaaacactacacaaatgccttgcctgcaatcagcttcaacttggagtagctatgaacacaattcggagtcttacctattaagagaacatgtatcagagttagattcctctttccattctgttctatcattgccatcagatgtgcctcttcattttcactttgaaacactgttaaaaaagactgaaataaaaggcaatcttgctgaaaataaatttgtagatgaatatatcatatctccatcacctgtacatagtactctgaatcaatggagaaatggatattcacctatatgtaagcctcaaataaggtcagaatcttctgcacaactgttacagggaagaaagaaaagacatttgagtgaaacagcattaggagaaagaactaaacttgaagaatctgattttcaacacacagaatcaggatcccatagcaattttactgctgtttccaatgtcaacgttttatcaagaatccagaattcatcacgaaatactgcacgacggagattgagaagtgagagctcttatgacatagataacattgtgattcccatgtcattagtagccccagctaaattagagaaactccaatataaggaaatacttactccaagctggaggatggttgttcttcagcctttggatgaatataatttaggcaaagaagagatagaagatctttctgatgaagtcttctccctaaggcacaaaaaatatgaagagagagagcaagccaggtggtcactatgggagcaaagcaagtggcacagaagaaacagcagagcttacagtaaaaatgttgaaggacaggacttgcttttgaaagaataccctaataacttcagtagcagtcagcaatgtgctgctgcaagtcctcctgggcttccttcagagaaccaggatctgtgtgcatatggcttaccttctttaaatcaaagtcaagaaaccaagtctttgtggtgggaacgacgggcttttccactgaagggtgaagacatggcagccttattatgtcaagatgaaaaaaaggatcaggttgaaaggtcaagcacagctttccatggtgaaatcttcggtaccagtgtaccagagaatggccaccatccaaaaaagcagtcagatggaatggaagaatacaaaacctttggtctaggacttactaatgttaaaaaaaataggtgacagggaacaggttaagaaaactatgtaaatgtaggaaagatgggaggaaataaagccctgttctggatcccccatcccctccagaataagagcatgttctgcatgtattaatcttttatgctgtttatgaaacaggcaagataagtctgtttttccttctggaaccataagggtaaccagattttcatctacagacaagtggtagtcatttgtgtttatcatgcaacttacttacaaacaccaagatattaattgctgcaacttgatgtcaaatcacattactgggtaatttttaagactatgtacccacaccatacatacatacatatatatatacacatacatacaaacctgtgtgccaagtgacagctatttttttatatacatggtaattcattaaaattgccttagtaatatattagaatatacaaatatgtgtgtataaaataaacatacacacacacacacacccctatgtagtttttaaaacactggcaatgacccactccccttggaaatgcatgtatgaactaccctatgaaatgtaagctgcagaatagataaaacacaggtttccactaataaaagacatctgaacgtcc

SEQ ID NO: 281489 - DNA, 1497 bp, Homo sapiens
gttatctggccagggaatagagaggtcaaaaggtgggagggtttagaaatgaattccgaaactcaggaaccaggaatgcataaatgaagagtatactgaagggctgaccaaaaatgtttcactgcctttcctaataaaaagtggttactgatcattttcattgacatttagggtgatgtatgttggtcttttctgataaagagttttgcatttaagacctattttttgtggtcttaaaaataagcttgtatgcttgcacacataaatacacattacacatctaccaagagattgttctgatttacaaaagatagaaaaatgttttattttttggttttcttaacattttttagtcagactttataacaatgtatttacaaaaattatgtaacgtgtactgccatatttacataactgatgaaaggagggtatcattacaagtaactagacagtactgtaaatctactgtaatcctgttttgcagaatactgcacgacggagattgagaagtgagagctcttatgacatagataacattgtgattcccatgtcattagtagccccagctaaattagagaaactccaatataaggaaatacttactccaaggtatgtatacttacatcttcatatttttcttccttccttccctaataaacttaaattttcaaagtgaagaattttaattaatgaaaggagcatccttctcccagttccttcatagccatggaggggaaacggtgaaaaaaaaattactcgtgccttaagtgttatatagtatcacaactttatttctcagtttttattaagatttaggaattcctagactactttagcattcttagtcttttttattattattatccagtgttatctactatgtatatgacactaaaaggtactttagtgacataaaaactatagcaacaaataatccttgcccttgaagatacaggtgtgacataagttgcaaagagttctacgttttcatggggtattcacactgtaagacagtaatacctgtgaccaaaaaaaaaaaaaaaaaaaaaagattttgatgcattgccaagtcagcaataaacacattcaaaagatgagtgggaaggtctgggaagtcatccatgaaggaatgggaaggtggagaaggtatttacatagggatacgacaacaaaggcacaggacaagtgtgtaaggcttagccagatactgttttgtgcaggttgataatggaaggctaaaaacaaagttaggtccagattgataatggaaggctagagacaaagttaggtccagatttgtggaggtccctgaatgccatacacagatctgctccctactggcagtaacgttagccaaactttttagaaatcatgaatgcagcttcttaagaatataaatgacaccaggaagtagagacagaaaaggctgcaaacagagacaggtgggtgacaatttcagtcaattgctatacatctctattctaatttcatttcttt

SEQ ID NO: 281490 - DNA, 881 bp, Homo sapiens
ttttgtcactcaacaattctcaatatattccattttgagttgctatttaagttgaaatgaaaaattgtacatttatgtgctaaagaacagaacaattattacaatatagacatgtacagattacttgttagatgaatttaaacaaaacaagttagttgaaacttaactgaaaatttttcccctttcagtctttgtggtgggaacgacgggcttttccactgaagggtgaagacatggcagccttattatgtcaagatgaaaaaaaggatcaggttgaaaggtcaagcacagctttccatggtgaaatcttcggtaccagtgtaccagagaatggccaccatccaaaaaagcagtcagatggaatggaagaatacaaaacctttggtctaggacttactaatgttaaaaaaaataggtgacagggaacaggttaagaaaactatgtaaatgtaggaaagatgggaggaaataaagccctgttctggatcccccatcccctccagaataagagcatgttctgcatgtattaatcttttatgctgtttatgaaacaggcaagataagtctgtttttccttctggaaccataagggtaaccagattttcacccggccaggcgcagtgagttttaaaattcgatgcttctgactctaggacaacccttgacttgattcagaaccccacgtagatgactctccaggcacgccactctgaaagtcgaatccagcacgactcgggtatctccgggcgatttattgtatctcgagcgcgaaatccatagcaacatagtacatgtacacggctactaccataggaaacagctatgcacatgtccactaatcttctagagacagcgcgccatccgtatggtcctaggtagct

SEQ ID NO: 281491 - DNA, 1946 bp, Homo sapiens
aacacttttttctcctttgatcatttttattcattattgaattggtgaacccatccagcatggttggaactccctaaaaaaaaaactagtaggattgaaggaaaaaaattacagttatcattcccagctagtatgtttagataatcaaagactagaagaagctatatattattagaaaaagaaagtttatagcaaagttgtagaatattcaatatataaaagttaattatatttttacatcccttttatgattgaattaataaatattaaagttaattgggaaaacatctagcaaaatatttgtaaaactttttgtagaactggaaaattttatttaaagataacctaaataaatgtagagatatgccatttatggatgctttggctgtgatattctaatacggtttttccttgcagactttgccttcaaaagaaacagcatttttaaacactacacaaatgccttgcctgcaatcagcttcaacttggagtagctatgaacacaattcggagtcttacctattaagagaacatgtatcagagttagattcctctttccattctgttctatcattgccatcagatgtgcctcttcattttcactttgaaacactgttaaaaaagactgaaataaaaggcaatcttgctgaaaataaatttgtagatgaatatatcatatctccatcacctgtacatagtactctgaatcaatggagaaatggatattcacctatatgtaagcctcaaataaggtcagaatcttctgcacaactgttacagggaagaaagaaaagacatttgagtgaaacagcattaggagaaagaactaaacttgaagaatctgattttcaacacacagaatcaggatcccatagcaattttactgctgtttccaatgtcaacgttttatcaagaatccagaattcatcacgaaatactgcacgacggagattgagaagtgagagctcttatgacatagataacattgtgattcccatgtcattagtagccccagctaaattagagaaactccaatataaggaaatacttactccaaggtatgtatacttacatcttcatatttttcttccttccttccctaataaacttaaattttcaaagtgaagaattttaattaatgaaaggagcatccttctcccagttccttcatagccatggaggggaaacggtgaaaaaaaaattactcgtgccttaagtgttatatagtatcacaactttatttctcagtttttattaagatttaggaattcctagactactttagcattcttagtcttttttattattattatccagtgttatctactatgtatatgacactaaaaggtactttagtgacataaaaactatagcaacaaataatccttgcccttgaagatacaggtgtgacataagttgcaaagagttctacgttttcatggggtattcacactgtaagacagtaatacctgtgaccaaaaaaaaaaaaaaaaaaaaaagattttgatgcattgccaagtcagcaataaacacattcaaaagatgagtgggaaggtctgggaagtcatccatgaaggaatgggaaggtggagaaggtatttacatagggatacgacaacaaaggcacaggacaagtgtgtaaggcttagccagatactgttttgtgcaggttgataatggaaggctaaaaacaaagttaggtccagattgataatggaaggctagagacaaagttaggtccagatttgtggaggtccctgaatgccatacacagatctgctccctactggcagtaacgttagccaaactttttagaaatcatgaatgcagcttcttaagaatataaatgacaccaggaagtagagacagaaaaggctgcaaacagagacaggtgggtgacaatttcagtcaattgctatacatctctattctaatttcatttcttt

SEQ ID NO: 281492 - DNA, 1580 bp, Homo sapiens
ttttgtcactcaacaattctcaatatattccattttgagttgctatttaagttgaaatgaaaaattgtacatttatgtgctaaagaacagaacaattattacaatatagacatgtacagattacttgttagatgaatttaaacaaaacaagttagttgaaacttaactgaaaatttttcccctttcagtctttgtggtgggaacgacgggcttttccactgaagggtgaagacatggcagccttattatgtcaagatgaaaaaaaggatcaggttgaaaggtcaagcacagctttccatggtgaaatcttcggtaccagtgtaccagagaatggccaccatccaaaaaagcagtcagatggaatggaagaatacaaaacctttggtctaggacttactaatgttaaaaaaaataggtgacagggaacaggttaagaaaactatgtaaatgtaggaaagatgggaggaaataaagccctgttctggatcccccatcccctccagaataagagcatgttctgcatgtattaatcttttatgctgtttatgaaacaggcaagataagtctgtttttccttctggaaccataagggtaaccagattttcatctacagacaagtggtagtcatttgtgtttatcatgcaacttacttacaaacaccaagatattaattgctgcaacttgatgtcaaatcacattactgggtaatttttaagactatgtacccacaccatacatacatacatatatatatacacatacatacaaacctgtgtgccaagtgacagctatttttttatatacatggtaattcattaaaattgccttagtaatatattagaatatacaaatatgtgtgtataaaataaacatacacacacacacacacccctatgtagtttttaaaacactggcaatgacccactccccttggaaatgcatgtatgaactaccctatgaaatgtaagctgcagaatagataaaacacaggtttccactaataaaagacatctgaacgtccctgaatatagagacagaagttttttgttgttgttgttgttgttttaacatgtttaaccaacagaagttatttacagaaattcatatatccaggcaacacaaaactcctttattcaaaatcactgctatctttgggactaaacacaggctactttctgtttactcctaacaaaataaagcaagcaaatttgagtcaaatattggtgcactttaatactatcacatctttgaaaactcaatttgagttttaccaattaatgtgtctcatgaagagaagacaccagttttaaaatgagccacaaacagtaaagccctatcagtataaaatttgaaaaaaaaaaaaaagatgattgtatttctagattagcaagaaattagttaattctggctgatttctatttctagctaatttggtcattctttgccatagcttactctattcaaataaacatatattcttgcttgcatcctagattggaaattaaaatttttcaaagaacaaagcttcaatattggatactgaagagtatacatgaaagaaaattccttttgaagctatt

SEQ ID NO: 281493 - DNA, 1961 bp, Homo sapiens
tatatgagaaaattcctattttatatttattatacatttgatcatttttaaaatagccaaaactcaaaaaggcaagattgtgtgaagtctggtagtcactttagttaaggagcatctttcatttaattagtcagacaaaagacaaaagcaaacccaaataaaaaacaagaataaccctccccccacaactgttataattcggtaaaatatttcataaagtactatttcatcctctgagtatgaaaataataaatagcaccaggggaatttttaaaaatctttgggcaaaactgtttaaagttaccaagttaacttgactcagtgataccttgggttgttcataaattttcaagacctcaaaaaataaaaaataattgtgttttcctgattttcttgctagagcttacagtaaaaatgttgaaggacaggacttgcttttgaaagaataccctaataacttcagtagcagtcagcaatgtgctgctgcaagtcctcctgggcttccttcagagaaccaggatctgtgtgcatatggcttaccttctttaaatcaaagtcaagaaaccaagtctttgtggtgggaacgacgggcttttccactgaagggtgaagacatggcagccttattatgtcaagatgaaaaaaaggatcaggttgaaaggtcaagcacagctttccatggtgaaatcttcggtaccagtgtaccagagaatggccaccatccaaaaaagcagtcagatggaatggaagaatacaaaacctttggtctaggacttactaatgttaaaaaaaataggtgacagggaacaggttaagaaaactatgtaaatgtaggaaagatgggaggaaataaagccctgttctggatcccccatcccctccagaataagagcatgttctgcatgtattaatcttttatgctgtttatgaaacaggcaagataagtctgtttttccttctggaaccataagggtaaccagattttcatctacagacaagtggtagtcatttgtgtttatcatgcaacttacttacaaacaccaagatattaattgctgcaacttgatgtcaaatcacattactgggtaatttttaagactatgtacccacaccatacatacatacatatatatatacacatacatacaaacctgtgtgccaagtgacagctatttttttatatacatggtaattcattaaaattgccttagtaatatattagaatatacaaatatgtgtgtataaaataaacatacacacacacacacacccctatgtagtttttaaaacactggcaatgacccactccccttggaaatgcatgtatgaactaccctatgaaatgtaagctgcagaatagataaaacacaggtttccactaataaaagacatctgaacgtccctgaatatagagacagaagttttttgttgttgttgttgttgttttaacatgtttaaccaacagaagttatttacagaaattcatatatccaggcaacacaaaactcctttattcaaaatcactgctatctttgggactaaacacaggctactttctgtttactcctaacaaaataaagcaagcaaatttgagtcaaatattggtgcactttaatactatcacatctttgaaaactcaatttgagttttaccaattaatgtgtctcatgaagagaagacaccagttttaaaatgagccacaaacagtaaagccctatcagtataaaatttgaaaaaaaaaaaaaagatgattgtatttctagattagcaagaaattagttaattctggctgatttctatttctagctaatttggtcattctttgccatagcttactctattcaaataaacatatattcttgcttgcatcctagattggaaattaaaatttttcaaagaacaaagcttcaatattggatactgaagagtatacatgaaagaaaattccttttgaagctatt

SEQ ID NO: 281494 - DNA, 668 bp, Homo sapiens
catggaagtgccaaggaaacactaatacatttagctgtgctgagtataaaattgccacatttaaataaataaaagctgtttaaaattggtttttatcttcaacagctggaggatggttgttcttcagcctttggatgaatataatttaggcaaagaagaggtaagctgcctttcatttaatgggataattgcacattatgtattatgaaacctgcttactttgacattcagggaactaaaggaatatataagccctttaacttacactgatttttttcttttcacttatgaaaaggaagttcttttaaaagaatattcgaaaaatgttttgtgcaaatttgactaccagcataatatagaaatacacaataatttaaaaagccaaggccgggcgcggtggctaatgcctgtaatcccagcactttgggaggccaagacgggcggatcacgaggtcaggagatggagaccatcctagctaacacggtgaaaccccgtctctactaaaaatacaaaaaaattagtcgggcgtggtggtgggcacctgtagtcccagctacttgggaggctgaggcaggagaatagcgtgaacccgggaggcggagcttgcaatgagccgagatcgcaccactgcactccagcctgggcaacagagcaagactccgtttca

SEQ ID NO: 281495 - DNA, 2105 bp, Homo sapiens
ttgttttctaatacacgaatttaaacacacacacacaaaacaaggaatcaatcacctgtcatctaattaggaaagtaattctaatgatattagacttgtttaatgtgtaacattcaatggttctttccatggcaggagaaagaactaaacttgaagaatctgattttcaacacacagaatcaggatcccatagcaattttactgctgtttccaatgtcaacgttttatcaagaatccagaattcatcacgaaatactgcacgacggagattgagaagtgagagctcttatgacatagataacattgtgattcccatgtcattagtagccccagctaaattagagaaactccaatataaggaaatacttactccaagctggaggatggttgttcttcagcctttggatgaatataatttaggcaaagaagagatagaagatctttctgatgaagtcttctccctaaggcacaaaaaatatgaagagagagagcaagccaggtggtcactatgggagcaaagcaagtggcacagaagaaacagcagagcttacagtaaaaatgttgaaggacaggacttgcttttgaaagaataccctaataacttcagtagcagtcagcaatgtgctgctgcaagtcctcctgggcttccttcagagaaccaggatctgtgtgcatatggcttaccttctttaaatcaaagtcaagaaaccaagtctttgtggtgggaacgacgggcttttccactgaagggtgaagacatggcagccttattatgtcaagatgaaaaaaaggatcaggttgaaaggtcaagcacagctttccatggtgaaatcttcggtaccagtgtaccagagaatggccaccatccaaaaaagcagtcagatggaatggaagaatacaaaacctttggtctaggacttactaatgttaaaaaaaataggtgacagggaacaggttaagaaaactatgtaaatgtaggaaagatgggaggaaataaagccctgttctggatcccccatcccctccagaataagagcatgttctgcatgtattaatcttttatgctgtttatgaaacaggcaagataagtctgtttttccttctggaaccataagggtaaccagattttcatctacagacaagtggtagtcatttgtgtttatcatgcaacttacttacaaacaccaagatattaattgctgcaacttgatgtcaaatcacattactgggtaatttttaagactatgtacccacaccatacatacatacatatatatatacacatacatacaaacctgtgtgccaagtgacagctatttttttatatacatggtaattcattaaaattgccttagtaatatattagaatatacaaatatgtgtgtataaaataaacatacacacacacacacacccctatgtagtttttaaaacactggcaatgacccactccccttggaaatgcatgtatgaactaccctatgaaatgtaagctgcagaatagataaaacacaggtttccactaataaaagacatctgaacgtccctgaatatagagacagaagttttttgttgttgttgttgttgttttaacatgtttaaccaacagaagttatttacagaaattcatatatccaggcaacacaaaactcctttattcaaaatcactgctatctttgggactaaacacaggctactttctgtttactcctaacaaaataaagcaagcaaatttgagtcaaatattggtgcactttaatactatcacatctttgaaaactcaatttgagttttaccaattaatgtgtctcatgaagagaagacaccagttttaaaatgagccacaaacagtaaagccctatcagtataaaatttgaaaaaaaaaaaaaagatgattgtatttctagattagcaagaaattagttaattctggctgatttctatttctagctaatttggtcattctttgccatagcttactctattcaaataaacatatattcttgcttgcatcctagattggaaattaaaatttttcaaagaacaaagcttcaatattggatactgaagagtatacatgaaagaaaattccttttgaagctatt

SEQ ID NO: 281496 - DNA, 706 bp, Homo sapiens
taatttctgtatttttagtagagacagggtttcaccatgttgcccaggctggtcttgaattcctggcctcaagtgatcctcccacctcagccttcctaaatgctggggtgggaagatcgcctaagcccaggaggtcaaggctgcagtgggccgtgatcacgccactgcattccagcctgggcagagaccccgtctcaaaaaaaacaaaaacaaaaaccaaacaaggcctaatcaaatcagggctacatggaataaatgacttaactatataaggtacaaaattatgctctctacaccatgctatggacacctccctcaaggagtggatgctcacaggccctggggagttaatagagaatgtggcacttaaaatgaatagggcaagggatcagaccatgcactatcactgtatcctgtaaaatggcaggtttacttttttttattttattttttaaagtgacagggtctccctctgtcagccaggctggagtgaggtggtaaaattatagctcactgtaaccttaaactcctgggttcaagtgatcctcctgcctaagccttctggctgagggaggctacaagtatttgctaccacacccagataatttttttttttttttttttacttctgtagagacaggatcttgttatgttgcccatgctggtcttgaactggcctcaagcaatactcctgcctcagcctctc

SEQ ID NO: 281497 - DNA, 591 bp, Homo sapiens
ggggtggtggcacacgcctatgatcccagctattcagaaggctgaggtgggaagatcgcctaagcccaggaggtcaaggctgcagtgggccgtgatcacgccactgcattccagcctgggcagagaccccgtctcaaaaaaaacaaaaacaaaaaccaaacaaggcctaatcaaatcagggctacatggaataaatgacttaactatataaggtacaaaattatgctctctacaccatgctatggacacctccctcaaggagtggatgctcacaggccctggggagttaatagagaatgtggcacttaaaatgaatagggcaagggattttattttttaaagtgacagggtctccctctgtcagccaggctggagtgaggtggtaaaattatagctcactgtaaccttaaactcctgggttcaagtgatcctcctgcctaagccttctggctgagggaggctacaagtatttgctaccacacccagataatttttttttttttttttttacttctgtagagacaggatcttgttatgttgcccatgctggtcttgaactggcctcaagcaatactcctgcctcagcctctc

SEQ ID NO: 281498 - DNA, 10879 bp, Homo sapiens
  misc_feature (951)..(951): n is a, c, g, or t
  misc_feature (4623)..(4623): n is a, c, g, or t
agttgtgtttatttcagggacagacacaaggggaagcagcagccagagcacacccgggccgctcacgggaagccttgctgaagagagaggatccgcagaagctgggaaattcctcccgcagcctaggcggagactgagccgcggctcaggttgagacagtgggcaggggcagggggcggcgctcccggcccatcccttagccccgcggcggccgtgtgggccggaggctgcctgcaccgcgtcagggaggccggcctagaaaccctccctcccagaagaaagccgatcccagttcaggtggggtcttcctcggttgcgtacctggctggagccgagctggtgggcggccggcagccggcgtttctggtgatgacagccccgaaatgaaagcagcgcggccgccgcctccgagggctgcagggagatcagcgtccagcaaataagaagcaagtcctggacccggaggaggaggagcggccgagcatctctctctgctccgccgtgtcctttagatgagcactcccggccggagccggaggtggatccgcagagctgcctctgggcgcctgaccccgcgctgacatcacaacctgtgacaggcgcatcacgcccggtacctgctcccggccgctgcccgtcctcccagcctctttgtatgccgcagacatggccagccagcaggattcgggcttctttgagatcagtatcaaatatttactgaaatcctggagtaatacttctcccgttggcaacggttacatcaagcctccggttccacctgcttctggcacgcacagggagaaagggccgccaaccatgctacccatcaatgtggacccagacagtaaaccaggagaatatgtcctcaaaagtttatttgtcaacttcaccactcaggctgaacgcaagattcgtatcattatggcagagcccctggaaaagccattgacnaaatctctgcaacgtggagaagacccccaatttgatcaggtcatcagctcaatgagctccctttctgagtactgcctgccttccattctacgtacattatttgactggtataaaaggcaaaatggcattgaggatgaatcacatgaatacagaccaagaacaagcaataaatcaaaaagcgatgaacaacagcgagattatttaatggaaagacgggacctcgccattgattttattttttctttagtattaatagaagttttgaaacagattccacttcatcctgtaatagacagtttaatacatgatgttattaacttggctttcaagcactttaaatacaaagaagggtaccttggtcccaacactggcaatatgcatattgtggcagacctgtatgcagaagtcattggagtgttggcacaagccaaattccctgctgtaaagaagaaatttatggcggagctaaaagaattacggcacaaagagcagaacccatatgtggttcaaagcattatcagcttaataatgggcatgaaattctttcgaattaagatgtatccagtggaggattttgaggcctctcttcagtttatgcaggaatgtgcacattacttcctcgaggtcaaagacaaagatatcaagcatgccttggctgggctttttgttgaaatacttgttccagttgctgctgctgttaaaaatgaagtaaatgttccctgccttagaaattttgtggaaagcctgtatgacaccacgctggaactttcttctcgaaagaagcattccttggccttgtaccccctggtgacctgtttgctctgtgtcagtcagaagcagctgttcctgaacaggtggcacattttcctcaacaactgcttgtccaaccttaaaaacaaagatcccaagatggctcgagttgcactggaatctctctacagattactttgggtttacatgattcgaattaaatgtgaaagcaacacagctactcagagccgacttataaccatcatcacaacacttttccccaaagggtcccgcggtgtggtaccaagggacatgcctctgaacatctttgtgaaaatcatccagttcattgcccaggaacgtttagattttgcaatgaaagaaatcattttcgattttctttgtgtgggaaaaccagcaaaagcattcagtctcaacccagagagaatgaacattggtttacgggcattcttggtcatagctgatagcttgcagcagaaagatggggaacctcccatgccggttacaggagccgttcttccttcaggaaacacgttaagagtaaagaaaacatatttgagtaaaacactaactgaagaggaagccaaaatgataggcatgtccttatattactctcaagtacgaaaagctgtagacaacattttaaggcaccttgataaagaagtaggaaggtgtatgatgctgactaatgtacagatgttaaacaaagaaccggaagacatgatcacgggtgagagaaagccaaaaatagatcttttcaggacctgtgttgctgctattcctcgactgcttcctgatgggatgtcaaaacttgaacttattgacttactggctaggctctctattcatatggatgatgaattgcgacatattgcacaaaattctcttcagggtttacttgttgacttctcagattggagggaagatgtactatttggctttaccaacttcctgctccgggaagtaaatgatatgcatcacacactccttgattcgtccctgaagttgctgctgcagctgctcacccagtggaaactagtcatccagacacaaggaaaagtctatgaacaagccaacaaaatcagaaattcagagctcatcgcaaatggctccagtcacagaattcagtcggaacgaggtccccactgcagtgtactccacgctgtagaaggttttgctctggttttactctgcagtttccaggtggccacacgcaaactgtccgttttaatactcaaggaaattcgagcgttgtttattgccctggggcagcctgaggatgacgacaggccgatgattgatgtcatggatcagctaagttcttccattctagaaagttttattcatgtagcagtttcggattcagcaacattaccactcacccacaatgtggatctgcagtggttggtggaatggaacgcagtcctggtcaatagccattatgatgtgaaaagcccttcccatgtctggatatttgcacagtctgtcaaagacccctgggtcctctgcctcttcagcttcctccggcaggagaacttacccaagcactgccccacagccctcagctatgcctggccttatgccttcactcggctccagtcggtgatgcctctggtggacccaaatagcccaattaatgccaagaaaaccagcactgccggcagcggagacaactatgttactttgtggagaaattacctaattctttgttttggagttgcaaaacccagtattatgagcccaggacacttaagagcttccactccagaaataatggcgaccacacctgatggtacagtgagctacgataacaaggccataggcaccccatcggtgggagttctgttaaagcagttggtgcctttgatgagactagagagcattgagatcacagagtccttagttttaggatttggaagaacaaattcccttgttttcagagaattggtagaagaacttcatccattaatgaaagaagctctggaaagaagaccagagaacaagaaacgccgagaacggcgagacttgttaaggctacaactacttcgaatttttgaacttttggctgatgctggtgtaataagtgacagcacaaatggagccctagagcgggatactttagccctgggagctttgttcttagaatatgtggacttgacccgcatgctcctagaagctgaaaatgacaaagaagttgaaattcttaaagatatccgggcacattttagtgcaatggtggccaacttgattcagtgtgttccagttcaccaccgaagatttctcttcccccagcaaagtctgaggcaccaccttttcatcttattcagccagtgggcaggacccttcagcattatgttcactcctctggatcgttacagtgacagaaatcatcagattacaagatatcagtattgtgcattaaaagcaatgtcagcagtactgtgctgtggccctgtctttgacaatgtgggcctttccccagatggctacctatataaatggcttgacaacattctggcttgtcaagatttacgagttcatcaacttggctgcgaagttgttgtcttgctactggaacttaatcctgaccaaataaatctttttaactgggcaattgaccgatgctacacaggttcctaccaacttgcatctggctgcttcaaagccatagcaactgtgtgtggaagcaggaactatcccttcgacatagtgacattgttaaaccttgttctattcaaggcctctgacaccaacagagagatttatgaaatctccatgcagctcatgcagatccttgaagcaaagctttttgtatactcaaagaaagtcgctgagcaaagaccgggaagtattctctatggaacacacggcccgctgccacccctctacagcgtgtcactngccctcttgtcatgtgagctggccaggatgtaccctgagctcacactccccctcttctcagaggtaagccagcgattccccacaacacaccccaacgggcgccagatcatgcttacctacctgctgccctggctgcacaacatcgagctggtggacagcaggctcctcctcccggggtcgagccccagcagcccagaggacgaagtcaaggaccgggaaggtgacgtgactgcttctcacgggctgagaggaaatggctggggctctccagaagccacgtcactggtcctgaacaacctcatgtacatgacggccaagtatggagatgaagttcctgggccagaaatggaaaatgcttggaatgctttagccaacaatgagaaatggagcaacaacctgaggatcaccttgcagttcctgattagcctctgtggggtcagcagcgacacagttctcctaccctatattaaaaaagtggcaatatacttgtgccgtaacaacaccattcaaaccatggaagagcttctctttgagctgcagcagacagaacccgtgaaccccatcgtccagcattgtgacaacccgcccttctaccgcttcacggccagtagcaaggcttccgcagcagcctcaggaaccacctctagcagcaatacagtggttgctggccaggaaaatttcccagatgctgaggagaacaagatattgaaagaatctgatgaaaggtttagtaatgtcatcagagcccacactcgcctcgagtcaagatacagcaatagctctggaggatcctacgatgaagataaaaatgatccaatttctccctacacgggctggttgctgactattacagagaccaagcagccgcagcccttaccgatgccttgtactggaggatgctgggcccccctggttgactatctcccggagaccatcactccccgggggccactccacaggtgcaatattgctgtaatttttatgactgaaatggtggtggatcacagtgtacgagaagactgggcgcttcatctaccattattacttcatgctgtcttcttaggtttagaccactaccggcctgaagtctttgaacacagcaaaaaactgcttcttcacctcttgattgccctctcttgcaacagcaatttccattccattgcttccgtgctcctgcagacccgagagatgggtgaagctaagactctaaccgtgcagccagcctaccaacctgaatatctctatacaggtggctttgacttcctgagagaggaccagtcatccccggtgcctgactcagggcttagttcaagctccacctcctctagcatcagtctgggaggcagcagtggaaacctcccacagatgacccaggaggtagaagatgtggacacagctgctgaaacagatgagaaggcaaacaagctcattgagtttctcacgaccagggcatttggtccactttggtgccatgaagacatcacacctaaaaatcaaaattcaaagagtgctgaacagctcactaattttctacgtcacgttgtatctgtatttaaagattccaaatcaggcttccatctggagcaccagttgagtgaagttgcattgcagacagccctcgcaagctcttcaaggcactatgctggtcggtccttccagatattccgggccctcaagcaacctctgtcagcacatgccttatctgaccttctctcaagattggtggaggtgataggagaacatggagatgagattcagggttatgtaatggaagcgctcctaaccttggaggcggctgtggataacttgtctgactgcttgaagaacagtgacctcctaactgtattgtcccgctcttcctcaccagatttaagctccagcagtaaactaacagcaagcagaaagagcacaggacaactaaacatgaacccgggaaccaccagcggcaacaccgcaactgccgaacggagccggcatcaacgaagcttctctgtgcccaagaagtttggtgtcatcgaccgatcctctgacccacctcgaagtgccacactggacagaattcaggcttgtacccaacaaggcctctcctcaaaaaccagaagctcatcctccttgaaggacagtctcacggacccatcccacataaaccatcccaccaacctgctggccaccatattctgggtcacagtggccttgatggagtctgattttgagtttgaatacttaatggccttaaggctgttgagcagactactggcacatatgccactcgataaggctgagaaccgagaaaagcttgagaaactccaggcacagctgaagtgggccgacttctccgggctgcagcagctgctgctgaaaggattcacatccctcaccaccacagacctgaccctgcagctcttcagtctgctgacaccagtgtccaaaatatccatggtggatgcatcccacgctattgggtttccactgaatgtcttgtgtctcctgcctcagctgattcagcattttgaaaatcccaatcagttctgtaaggatatagccgaaaggattgctcaggtttgtttagaagagaagaaccccaaactttcaaatcttgcacatgtcatgactctttataaaacgcacagctacacgagggactgtgccacgtgggtcaatgtggtctgtcgataccttcatgaagcatatgctgacattaccttgaatatggttacctacctggcagagctgctggagaagggcctccctagtgtgcagcagcccctgctccaggtgatctacagtcttctcagctacatggacctttctgtcgttcctgtcaaacagttcaatgtggaagttctgaagacaattgaaaaatatgtgcaaagtgttcactggagagaagctctgaatatcttgaagctggtagtttctcggtcagccagccttgttttaccttcataccagcacagtgacctctcaaaaatagaaatacatcgagtgtggactagtgcttccaaggaattacctgggaaaaccctggacttccacttcgatatttcggagactccaatcatcgggaggcggtatgatgagctgcagaattcttctgggcgtgatgggaagcccagggccatggccgtcacccggagcacatcttccacttcctcaggctccaactccaacgtccttgttccagtgagctggaaaaggccccagtattctcagaagagaacaaaagagaagttggtacatgtcctttctctgtgtggccaagaagtaggattgagcaaaaatccatcagtgattttttcatcgtgtggggatctggatctgcttgagcaccagacaagcttggtatcttctgaggacggtgcccgagagcaggagaacatggatgacacaaacagcgagcagcagtttagagtcttcagagacttcgacttcctagatgtggagctggaggatggagagggtgagagtatggacaatttcaactggggagtgcgcagacgttctctggacagcctggataagtgtgatatgcagattctggaggagcgccaactgtcaggaagcactcctagcctgaataaaatgcaccatgaggactccgatgaatcatccgaggaggaggacctcacagccagccagatcctggagcactcagacctaatcatgactctctccccctctgaagagacgaatcccatggagctgctcaccacagcctgtgactcgacccctgcagaacctcattcctttaacaccagaatgtccagctttgatgcttccttgcctgatatgaataatctgcagatttctgagggttcaaaggctgaagctgttcgtgaggaggaggacaccaccgtgcatgaggatgatctttctagttccatcaatgaactcccagcagcttttgaatgcagcgacagctttagcctggacatgactgagggggaagaaaaaggcaatcgggcactggaccagtttaccctggcgagctttggagaaggtgacaggggagtctctccccctccctcgcccttcttctcagccatccttgccgcctttcagcccgcagcctgtgacgatgccgaggaggcctggcgcagccacatcaaccagcttatgtgtgactcagatggctcctgtgctgtgtatacatttcatgtgttctcctccttgtttaagaatattcagaaaaggttctgcttcctaacctgtgatgcagccagttaccttggagataacctccggggaatcggatccaaatttgtcagctcttcccagatgctcacctcctgctctgaatgtcctacactttttgtggatgccgagactctcctttcatgtggacttctggacaagctcaagttcagtgtgttagaactgcaagaatatttggatacctacaacaacaggaaagaggccacactctcttggcttgcaaattgtaaggcaacatttgcagggggatcaagagatggagtaattacctgtcaaccaggggactccgaagaaaaggtacaattggaactgtgtcagagattatataagctacacttccagctgctattgctttttcagtcctactgtaagctcatcggccaggtgcacgaagttagctccatgccagagctgctgaatatgtccagggaactgagtgacctaaagaaacacctgaaggaagccagtgcagtcattgcagctgaccctctctattcagacggcgcgtggtccgagcccaccttcacgtccactgaagcagccatccagtccatgctggagtgcctgaagaacaacgaactcggcaaagctttgcggcagatcagggagtgcagaagtctgtggcccaatgacatctttggaagcagttctgatgatgaggtccagacactactgaatatttatttccgtcaccaaactctgggacagacgggtacttatgccctggtggggtctaaccagagcctgaccgagatctgcaccaagctgatggagctgaacatggagatccgggacatgatccgcagggcccagagttaccgagtcctcactacttttcttccagactccagtgtttctggcactagtctctgacaggagcctcctgtccccactgggttccaaactggcagtgctgccatgctggggcaacgtcattcagtgtcttctcggccttcaaaaggcttggacagactgttctccctcttgttacctgtagggctttttctaaagaggatggcagaacttccaacgtgtagcaatactataagaaccaaggtagcttagaacgtcctggacagactccactcatcatgctgtgtggcacaaatgtgttacatttgaccgagcatatgcaactcgctactgaagaagtgacttccgttgcataccaaagccgactacactgaacagtaccttcctttctagaaacaattttagattggcaaaagtgcaatgttttcttcactcaaaaaattttatattctcaaacatgtatattctttccctgtcttgttccattttcttttcttttttcttttttctttttcctttctttcgtgggctgagaaaggggcaggcaaaatgaagctggccactgaaaactgtaagatggtcaaaagctgacagcctgtgtatgtgaaaagggaattgtaaatggactgcaatgtaatgtacactgtaatttgaatacaattactgtatctaaaaggagctgctatgaagtacctttcttatgttgctaggctactgtttctgaaagccctggatctctttgcaccaaaaatggtccagatagactctttttaaggatcttggctgctttttactagaaggttgcttttatgagcatatttatactgctgaaggatgagtgttaattttaattaactttgccgttttgtagagaaaactattcacaagataaattccaagtcttttcacctgtcaggcatgcatattttaatatctgtttggatagtcagaagtagaatcataaaggtaaaatatgagttgttactttgtttcttcgatgtcatattttatgtgtaatatatatgtaaagggccattcttaagttctctccttaaacttaatgctgtcaagtgttagatgtgtgcatgtgaacttgttgcactgcagaaacatattcagagtttatctatgtaacttattcactctgtaaatacatttaaagtttttgtgatgtaagcttaattgatattctgttcagaactttctttagactaaaaaaaaaaaaaaa

SEQ ID NO: 281499 - DNA, 1084 bp, Homo sapiens
atcccccgggctgcaggattcggcacgaggttacctgtagggctttttctaaagaggatggcagaacttccaacgtgtagcaatactataagaaccaaggtagcttagaacgtcctggacagactccactcatcatgctgtgtggcacaaatgtgttacatttgaccgagcatatgcaactcgctactgaagaagtgacttccgttgcataccaaagccgactacactgaacagtaccttcctttctagaaacaattttagattggcaaaagtgcaatgttttcttcactcaaaaaattttatattctcaaacatgtatattctttccctgtcttgttccattttcttttcttttttcttttttctttttcctttctttcgtgggctgagaaaggggcaggcaaaatgaagctggccactgaaaactgtaagatggtcaaaagctgacagcctgtgtatgtgaaaagggaattgtaaatggactgcaatgtaatgtacactgtaatttgaatacaattactgtatctaaaaggagctgctatgaagtacctttcttatgttgctaggctactgtttctgaaagccctggatctctttgcaccaaaaatggtccagatagactctttttaaggatcttggctgctttttactagaaggttgcttttatgagcatatttatactgctgaaggatgagtgttaattttaattaactttgccgttttgtagagaaaactattcacaagataaattccaagtcttttcacctgtcaggcatgcatattttaatatctgtttggatagtcagaagtagaatcataaaggtaaaatatgagttgttactttgtttcttcgatgtcatattttatgtgtaatatatatgtaaagggccattcttaagttctctccttaaacttaatgctgtcaagtgttagatgtgtgcatgtgaacttgttgcactgcagaaacatattcagagtttatctatgtaacttattcactctgtaaatacatttaaagtttttgtgatgtaagcttaattgatattctgttcagaactttctttagactaaaaaaaaaaaaaaa

SEQ ID NO: 281500 - DNA, 512 bp, Homo sapiens
agtcattacagcacaatttcattttactattattagaactttaatgaattttttcctaatggaattataccaaaaatgttctcagaacattgctgaatttacctatgtctttccctctctttctgacagtggcttgcaaattgtaaggcaacatttgcagggggatcaagagatggagtaattacctgtcaaccaggggactccgaagaaaaggtaataaaagcctgttagaatgggtctcttgtgtgctctaacattgtgtattagttttggtctacccaagaagcctggaacttgagaaaagaagaggcggaatgagtcaccccaaacatttacatgaaaccaacagagtaagacagaatgccttccagcatgactgtgtgttgatgggatttgtggggaggtttcttcgttttggaaaagtagaggtataaaataaccttttttgctggatactgtctaactatactaataatttcctaataaatttattcttaattcagaaaataagg

SEQ ID NO: 281501 - DNA, 866 bp, Homo sapiens
agttgtgtttatttcagggacagacacaaggggaagcagcagccagagcacacccgggccgctcacgggaagccttgctgaagagagaggatccgcagaagctgggaaattcctcccgcagcctaggcggagactgagccgcggctcaggttgagacagtgggcaggggcagggggcggcgctcccggcccatcccttagccccgcggcggccgtgtgggccggaggctgcctgcaccgcgtcagggaggccggcctagaaaccctccctcccagaagaaagccgatcccagttcaggtggggtcttcctcggttgcgtacctggctggagccgagctggtgggcggccggcagccggcgtttctggtgatgacagccccgaaatgaaagcagcgcggccgccgcctccgagggctgcagggagatcagcgtccagcaaataagaagcaagtcctggacccggaggaggaggagcggccgagcatctctctctgctccgccgtgtcctttagatgagcactcccggccggagccggaggtggatccgcagagctgcctctgggcgcctgaccccgcgctgacatcacaacctgtgacaggcgcatcacgcccggtacctgctcccggccgctgcccgtcctcccagcctctttgtatgccgcagacatggccagccagcaggattcgggcttctttgagatcagtatcaaatatttactgaaatcctggagtaatagtgagtaatagaaaataacctttttgtttgtttgtttgctggatgttgcataaggctggagacagagaatctcaactggacacacatgtttgtgagccgcggaagtttttctttttttcttttcttttct

SEQ ID NO: 281502 - DNA, 8537 bp, Homo sapiens
  misc_feature (2281)..(2281): n is a, c, g, or t
cgatgagtaatcttggcaggcgtgagccaccatgcctggccaaattagaagtttttttaaaggtatttatgaagtcatttactaagcaaaaaataagggagacccattttcagactcaagtagaagagatatacattaatatctgttaatccttgttagctctagaagaccagttaataaagtaaatgattttattttcctttattcgtttcacaggctctctattcatatggatgatgaattgcgacatattgcacaaaattctcttcagggtttacttgttgacttctcagattggagggaagatgtactatttggctttaccaacttcctgctccgggaagtaaatgatatgcatcacacactccttgattcgtccctgaagttgctgctgcagctgctcacccagtggaaactagtcatccagacacaaggaaaagtctatgaacaagccaacaaaatcagaaattcagagctcatcgcaaatggctccagtcacagaattcagtcggaacgaggtccccactgcagtgtactccacgctgtagaaggttttgctctggttttactctgcagtttccaggtggccacacgcaaactgtccgttttaatactcaaggaaattcgagcgttgtttattgccctggggcagcctgaggatgacgacaggccgatgattgatgtcatggatcagctaagttcttccattctagaaagttttattcatgtagcagtttcggattcagcaacattaccactcacccacaatgtggatctgcagtggttggtggaatggaacgcagtcctggtcaatagccattatgatgtgaaaagcccttcccatgtctggatatttgcacagtctgtcaaagacccctgggtcctctgcctcttcagcttcctccggcaggagaacttacccaagcactgccccacagccctcagctatgcctggccttatgccttcactcggctccagtcggtgatgcctctggtggacccaaatagcccaattaatgccaagaaaaccagcactgccggcagcggagacaactatgttactttgtggagaaattacctaattctttgttttggagttgcaaaacccagtattatgagcccaggacacttaagagcttccactccagaaataatggcgaccacacctgatggtacagtgagctacgataacaaggccataggcaccccatcggtgggagttctgttaaagcagttggtgcctttgatgagactagagagcattgagatcacagagtccttagttttaggatttggaagaacaaattcccttgttttcagagaattggtagaagaacttcatccattaatgaaagaagctctggaaagaagaccagagaacaagaaacgccgagaacggcgagacttgttaaggctacaactacttcgaatttttgaacttttggctgatgctggtgtaataagtgacagcacaaatggagccctagagcgggatactttagccctgggagctttgttcttagaatatgtggacttgacccgcatgctcctagaagctgaaaatgacaaagaagttgaaattcttaaagatatccgggcacattttagtgcaatggtggccaacttgattcagtgtgttccagttcaccaccgaagatttctcttcccccagcaaagtctgaggcaccaccttttcatcttattcagccagtgggcaggacccttcagcattatgttcactcctctggatcgttacagtgacagaaatcatcagattacaagatatcagtattgtgcattaaaagcaatgtcagcagtactgtgctgtggccctgtctttgacaatgtgggcctttccccagatggctacctatataaatggcttgacaacattctggcttgtcaagatttacgagttcatcaacttggctgcgaagttgttgtcttgctactggaacttaatcctgaccaaataaatctttttaactgggcaattgaccgatgctacacaggttcctaccaacttgcatctggctgcttcaaagccatagcaactgtgtgtggaagcaggaactatcccttcgacatagtgacattgttaaaccttgttctattcaaggcctctgacaccaacagagagatttatgaaatctccatgcagctcatgcagatccttgaagcaaagctttttgtatactcaaagaaagtcgctgagcaaagaccgggaagtattctctatggaacacacggcccgctgccacccctctacagcgtgtcactngccctcttgtcatgtgagctggccaggatgtaccctgagctcacactccccctcttctcagaggtaagccagcgattccccacaacacaccccaacgggcgccagatcatgcttacctacctgctgccctggctgcacaacatcgagctggtggacagcaggctcctcctcccggggtcgagccccagcagcccagaggacgaagtcaaggaccgggaaggtgacgtgactgcttctcacgggctgagaggaaatggctggggctctccagaagccacgtcactggtcctgaacaacctcatgtacatgacggccaagtatggagatgaagttcctgggccagaaatggaaaatgcttggaatgctttagccaacaatgagaaatggagcaacaacctgaggatcaccttgcagttcctgattagcctctgtggggtcagcagcgacacagttctcctaccctatattaaaaaagtggcaatatacttgtgccgtaacaacaccattcaaaccatggaagagcttctctttgagctgcagcagacagaacccgtgaaccccatcgtccagcattgtgacaacccgcccttctaccgcttcacggccagtagcaaggcttccgcagcagcctcaggaaccacctctagcagcaatacagtggttgctggccaggaaaatttcccagatgctgaggagaacaagatattgaaagaatctgatgaaaggtttagtaatgtcatcagagcccacactcgcctcgagtcaagatacagcaatagctctggaggatcctacgatgaagataaaaatgatccaatttctccctacacgggctggttgctgactattacagagaccaagcagccgcagcccttaccgatgccttgtactggaggatgctgggcccccctggttgactatctcccggagaccatcactccccgggggccactccacaggtgcaatattgctgtaatttttatgactgaaatggtggtggatcacagtgtacgagaagactgggcgcttcatctaccattattacttcatgctgtcttcttaggtttagaccactaccggcctgaagtctttgaacacagcaaaaaactgcttcttcacctcttgattgccctctcttgcaacagcaatttccattccattgcttccgtgctcctgcagacccgagagatgggtgaagctaagactctaaccgtgcagccagcctaccaacctgaatatctctatacaggtggctttgacttcctgagagaggaccagtcatccccggtgcctgactcagggcttagttcaagctccacctcctctagcatcagtctgggaggcagcagtggaaacctcccacagatgacccaggaggtagaagatgtggacacagctgctgaaacagatgagaaggcaaacaagctcattgagtttctcacgaccagggcatttggtccactttggtgccatgaagacatcacacctaaaaatcaaaattcaaagagtgctgaacagctcactaattttctacgtcacgttgtatctgtatttaaagattccaaatcaggcttccatctggagcaccagttgagtgaagttgcattgcagacagccctcgcaagctcttcaaggcactatgctggtcggtccttccagatattccgggccctcaagcaacctctgtcagcacatgccttatctgaccttctctcaagattggtggaggtgataggagaacatggagatgagattcagggttatgtaatggaagcgctcctaaccttggaggcggctgtggataacttgtctgactgcttgaagaacagtgacctcctaactgtattgtcccgctcttcctcaccagatttaagctccagcagtaaactaacagcaagcagaaagagcacaggacaactaaacatgaacccgggaaccaccagcggcaacaccgcaactgccgaacggagccggcatcaacgaagcttctctgtgcccaagaagtttggtgtcatcgaccgatcctctgacccacctcgaagtgccacactggacagaattcaggcttgtacccaacaaggcctctcctcaaaaaccagaagctcatcctccttgaaggacagtctcacggacccatcccacataaaccatcccaccaacctgctggccaccatattctgggtcacagtggccttgatggagtctgattttgagtttgaatacttaatggccttaaggctgttgagcagactactggcacatatgccactcgataaggctgagaaccgagaaaagcttgagaaactccaggcacagctgaagtgggccgacttctccgggctgcagcagctgctgctgaaaggattcacatccctcaccaccacagacctgaccctgcagctcttcagtctgctgacaccagtgtccaaaatatccatggtggatgcatcccacgctattgggtttccactgaatgtcttgtgtctcctgcctcagctgattcagcattttgaaaatcccaatcagttctgtaaggatatagccgaaaggattgctcaggtttgtttagaagagaagaaccccaaactttcaaatcttgcacatgtcatgactctttataaaacgcacagctacacgagggactgtgccacgtgggtcaatgtggtctgtcgataccttcatgaagcatatgctgacattaccttgaatatggttacctacctggcagagctgctggagaagggcctccctagtgtgcagcagcccctgctccaggtgatctacagtcttctcagctacatggacctttctgtcgttcctgtcaaacagttcaatgtggaagttctgaagacaattgaaaaatatgtgcaaagtgttcactggagagaagctctgaatatcttgaagctggtagtttctcggtcagccagccttgttttaccttcataccagcacagtgacctctcaaaaatagaaatacatcgagtgtggactagtgcttccaaggaattacctgggaaaaccctggacttccacttcgatatttcggagactccaatcatcgggaggcggtatgatgagctgcagaattcttctgggcgtgatgggaagcccagggccatggccgtcacccggagcacatcttccacttcctcaggctccaactccaacgtccttgttccagtgagctggaaaaggccccagtattctcagaagagaacaaaagagaagttggtacatgtcctttctctgtgtggccaagaagtaggattgagcaaaaatccatcagtgattttttcatcgtgtggggatctggatctgcttgagcaccagacaagcttggtatcttctgaggacggtgcccgagagcaggagaacatggatgacacaaacagcgagcagcagtttagagtcttcagagacttcgacttcctagatgtggagctggaggatggagagggtgagagtatggacaatttcaactggggagtgcgcagacgttctctggacagcctggataagtgtgatatgcagattctggaggagcgccaactgtcaggaagcactcctagcctgaataaaatgcaccatgaggactccgatgaatcatccgaggaggaggacctcacagccagccagatcctggagcactcagacctaatcatgactctctccccctctgaagagacgaatcccatggagctgctcaccacagcctgtgactcgacccctgcagaacctcattcctttaacaccagaatgtccagctttgatgcttccttgcctgatatgaataatctgcagatttctgagggttcaaaggctgaagctgttcgtgaggaggaggacaccaccgtgcatgaggatgatctttctagttccatcaatgaactcccagcagcttttgaatgcagcgacagctttagcctggacatgactgagggggaagaaaaaggcaatcgggcactggaccagtttaccctggcgagctttggagaaggtgacaggggagtctctccccctccctcgcccttcttctcagccatccttgccgcctttcagcccgcagcctgtgacgatgccgaggaggcctggcgcagccacatcaaccagcttatgtgtgactcagatggctcctgtgctgtgtatacatttcatgtgttctcctccttgtttaagaatattcagaaaaggttctgcttcctaacctgtgatgcagccagttaccttggagataacctccggggaatcggatccaaatttgtcagctcttcccagatgctcacctcctgctctgaatgtcctacactttttgtggatgccgagactctcctttcatgtggacttctggacaagctcaagttcagtgtgttagaactgcaagaatatttggatacctacaacaacaggaaagaggccacactctcttggcttgcaaattgtaaggcaacatttgcagggggatcaagagatggagtaattacctgtcaaccaggggactccgaagaaaaggtacaattggaactgtgtcagagattatataagctacacttccagctgctattgctttttcagtcctactgtaagctcatcggccaggtgcacgaagttagctccatgccagagctgctgaatatgtccagggaactgagtgacctaaagaaacacctgaaggaagccagtgcagtcattgcagctgaccctctctattcagacggcgcgtggtccgagcccaccttcacgtccactgaagcagccatccagtccatgctggagtgcctgaagaacaacgaactcggcaaagctttgcggcagatcagggagtgcagaagtctgtggcccaatgacatctttggaagcagttctgatgatgaggtccagacactactgaatatttatttccgtcaccaaactctgggacagacgggtacttatgccctggtggggtctaaccagagcctgaccgagatctgcaccaagctgatggagctgaacatggagatccgggacatgatccgcagggcccagagttaccgagtcctcactacttttcttccagactccagtgtttctggcactagtctctgacaggagcctcctgtccccactgggttccaaactggcagtgctgccatgctggggcaacgtcattcagtgtcttctcggccttcaaaaggcttggacagactgttctccctcttgttacctgtagggctttttctaaagaggatggcagaacttccaacgtgtagcaatactataagaaccaaggtagcttagaacgtcctggacagactccactcatcatgctgtgtggcacaaatgtgttacatttgaccgagcatatgcaactcgctactgaagaagtgacttccgttgcataccaaagccgactacactgaacagtaccttcctttctagaaacaattttagattggcaaaagtgcaatgttttcttcactcaaaaaattttatattctcaaacatgtatattctttccctgtcttgttccattttcttttcttttttcttttttctttttcctttctttcgtgggctgagaaaggggcaggcaaaatgaagctggccactgaaaactgtaagatggtcaaaagctgacagcctgtgtatgtgaaaagggaattgtaaatggactgcaatgtaatgtacactgtaatttgaatacaattactgtatctaaaaggagctgctatgaagtacctttcttatgttgctaggctactgtttctgaaagccctggatctctttgcaccaaaaatggtccagatagactctttttaaggatcttggctgctttttactagaaggttgcttttatgagcatatttatactgctgaaggatgagtgttaattttaattaactttgccgttttgtagagaaaactattcacaagataaattccaagtcttttcacctgtcaggcatgcatattttaatatctgtttggatagtcagaagtagaatcataaaggtaaaatatgagttgttactttgtttcttcgatgtcatattttatgtgtaatatatatgtaaagggccattcttaagttctctccttaaacttaatgctgtcaagtgttagatgtgtgcatgtgaacttgttgcactgcagaaacatattcagagtttatctatgtaacttattcactctgtaaatacatttaaagtttttgtgatgtaagcttaattgatattctgttcagaactttctttagactaaaaaaaaaaaaaaa

SEQ ID NO: 281503 - DNA, 5511 bp, Homo sapiens
ctcatagctgactcctgagggaaaacctgcgtcagggagagaggaacctacgatgaagagtaaatgatccaatttctccctacacgggctggttgctgactattacagagaccaagcagccgcagcccttaccgatgccttgtactggaggatgctgggcccccctggttgactatctcccggagaccatcactccccgggggccactccacaggtgcaatattgctgtaatttttatgactgaaatggtggtggatcacagtgtacgagaagactgggcgcttcatctaccattattacttcatgctgtcttcttaggtttagaccactaccggcctgaagtctttgaacacagcaaaaaactgcttcttcacctcttgattgccctctcttgcaacagcaatttccattccattgcttccgtgctcctgcagacccgagagatgggtgaagctaagactctaaccgtgcagccagcctaccaacctgaatatctctatacaggtggctttgacttcctgagagaggaccagtcatccccggtgcctgactcagggcttagttcaagctccacctcctctagcatcagtctgggaggcagcagtggaaacctcccacagatgacccaggaggtagaagatgtggacacagctgctgaaacagatgagaaggcaaacaagctcattgagtttctcacgaccagggcatttggtccactttggtgccatgaagacatcacacctaaaaatcaaaattcaaagagtgctgaacagctcactaattttctacgtcacgttgtatctgtatttaaagattccaaatcaggcttccatctggagcaccagttgagtgaagttgcattgcagacagccctcgcaagctcttcaaggcactatgctggtcggtccttccagatattccgggccctcaagcaacctctgtcagcacatgccttatctgaccttctctcaagattggtggaggtgataggagaacatggagatgagattcagggttatgtaatggaagcgctcctaaccttggaggcggctgtggataacttgtctgactgcttgaagaacagtgacctcctaactgtattgtcccgctcttcctcaccagatttaagctccagcagtaaactaacagcaagcagaaagagcacaggacaactaaacatgaacccgggaaccaccagcggcaacaccgcaactgccgaacggagccggcatcaacgaagcttctctgtgcccaagaagtttggtgtcatcgaccgatcctctgacccacctcgaagtgccacactggacagaattcaggcttgtacccaacaaggcctctcctcaaaaaccagaagctcatcctccttgaaggacagtctcacggacccatcccacataaaccatcccaccaacctgctggccaccatattctgggtcacagtggccttgatggagtctgattttgagtttgaatacttaatggccttaaggctgttgagcagactactggcacatatgccactcgataaggctgagaaccgagaaaagcttgagaaactccaggcacagctgaagtgggccgacttctccgggctgcagcagctgctgctgaaaggattcacatccctcaccaccacagacctgaccctgcagctcttcagtctgctgacaccagtgtccaaaatatccatggtggatgcatcccacgctattgggtttccactgaatgtcttgtgtctcctgcctcagctgattcagcattttgaaaatcccaatcagttctgtaaggatatagccgaaaggattgctcaggtttgtttagaagagaagaaccccaaactttcaaatcttgcacatgtcatgactctttataaaacgcacagctacacgagggactgtgccacgtgggtcaatgtggtctgtcgataccttcatgaagcatatgctgacattaccttgaatatggttacctacctggcagagctgctggagaagggcctccctagtgtgcagcagcccctgctccaggtgatctacagtcttctcagctacatggacctttctgtcgttcctgtcaaacagttcaatgtggaagttctgaagacaattgaaaaatatgtgcaaagtgttcactggagagaagctctgaatatcttgaagctggtagtttctcggtcagccagccttgttttaccttcataccagcacagtgacctctcaaaaatagaaatacatcgagtgtggactagtgcttccaaggaattacctgggaaaaccctggacttccacttcgatatttcggagactccaatcatcgggaggcggtatgatgagctgcagaattcttctgggcgtgatgggaagcccagggccatggccgtcacccggagcacatcttccacttcctcaggctccaactccaacgtccttgttccagtgagctggaaaaggccccagtattctcagaagagaacaaaagagaagttggtacatgtcctttctctgtgtggccaagaagtaggattgagcaaaaatccatcagtgattttttcatcgtgtggggatctggatctgcttgagcaccagacaagcttggtatcttctgaggacggtgcccgagagcaggagaacatggatgacacaaacagcgagcagcagtttagagtcttcagagacttcgacttcctagatgtggagctggaggatggagagggtgagagtatggacaatttcaactggggagtgcgcagacgttctctggacagcctggataagtgtgatatgcagattctggaggagcgccaactgtcaggaagcactcctagcctgaataaaatgcaccatgaggactccgatgaatcatccgaggaggaggacctcacagccagccagatcctggagcactcagacctaatcatgactctctccccctctgaagagacgaatcccatggagctgctcaccacagcctgtgactcgacccctgcagaacctcattcctttaacaccagaatgtccagctttgatgcttccttgcctgatatgaataatctgcagatttctgagggttcaaaggctgaagctgttcgtgaggaggaggacaccaccgtgcatgaggatgatctttctagttccatcaatgaactcccagcagcttttgaatgcagcgacagctttagcctggacatgactgagggggaagaaaaaggcaatcgggcactggaccagtttaccctggcgagctttggagaaggtgacaggggagtctctccccctccctcgcccttcttctcagccatccttgccgcctttcagcccgcagcctgtgacgatgccgaggaggcctggcgcagccacatcaaccagcttatgtgtgactcagatggctcctgtgctgtgtatacatttcatgtgttctcctccttgtttaagaatattcagaaaaggttctgcttcctaacctgtgatgcagccagttaccttggagataacctccggggaatcggatccaaatttgtcagctcttcccagatgctcacctcctgctctgaatgtcctacactttttgtggatgccgagactctcctttcatgtggacttctggacaagctcaagttcagtgtgttagaactgcaagaatatttggatacctacaacaacaggaaagaggccacactctcttggcttgcaaattgtaaggcaacatttgcagggggatcaagagatggagtaattacctgtcaaccaggggactccgaagaaaaggtacaattggaactgtgtcagagattatataagctacacttccagctgctattgctttttcagtcctactgtaagctcatcggccaggtgcacgaagttagctccatgccagagctgctgaatatgtccagggaactgagtgacctaaagaaacacctgaaggaagccagtgcagtcattgcagctgaccctctctattcagacggcgcgtggtccgagcccaccttcacgtccactgaagcagccatccagtccatgctggagtgcctgaagaacaacgaactcggcaaagctttgcggcagatcagggagtgcagaagtctgtggcccaatgacatctttggaagcagttctgatgatgaggtccagacactactgaatatttatttccgtcaccaaactctgggacagacgggtacttatgccctggtggggtctaaccagagcctgaccgagatctgcaccaagctgatggagctgaacatggagatccgggacatgatccgcagggcccagagttaccgagtcctcactacttttcttccagactccagtgtttctggcactagtctctgacaggagcctcctgtccccactgggttccaaactggcagtgctgccatgctggggcaacgtcattcagtgtcttctcggccttcaaaaggcttggacagactgttctccctcttgttacctgtagggctttttctaaagaggatggcagaacttccaacgtgtagcaatactataagaaccaaggtagcttagaacgtcctggacagactccactcatcatgctgtgtggcacaaatgtgttacatttgaccgagcatatgcaactcgctactgaagaagtgacttccgttgcataccaaagccgactacactgaacagtaccttcctttctagaaacaattttagattggcaaaagtgcaatgttttcttcactcaaaaaattttatattctcaaacatgtatattctttccctgtcttgttccattttcttttcttttttcttttttctttttcctttctttcgtgggctgagaaaggggcaggcaaaatgaagctggccactgaaaactgtaagatggtcaaaagctgacagcctgtgtatgtgaaaagggaattgtaaatggactgcaatgtaatgtacactgtaatttgaatacaattactgtatctaaaaggagctgctatgaagtacctttcttatgttgctaggctactgtttctgaaagccctggatctctttgcaccaaaaatggtccagatagactctttttaaggatcttggctgctttttactagaaggttgcttttatgagcatatttatactgctgaaggatgagtgttaattttaattaactttgccgttttgtagagaaaactattcacaagataaattccaagtcttttcacctgtcaggcatgcatattttaatatctgtttggatagtcagaagtagaatcataaaggtaaaatatgagttgttactttgtttcttcgatgtcatattttatgtgtaatatatatgtaaagggccattcttaagttctctccttaaacttaatgctgtcaagtgttagatgtgtgcatgtgaacttgttgcactgcagaaacatattcagagtttatctatgtaacttattcactctgtaaatacatttaaagtttttgtgatgtaagcttaattgatattctgttcagaactttctttagactaaaaaaaaaaaaaaa

SEQ ID NO: 281504 - DNA, 10806 bp, Homo sapiens
  misc_feature (951)..(951): n is a, c, g, or t
  misc_feature (4623)..(4623): n is a, c, g, or t
agttgtgtttatttcagggacagacacaaggggaagcagcagccagagcacacccgggccgctcacgggaagccttgctgaagagagaggatccgcagaagctgggaaattcctcccgcagcctaggcggagactgagccgcggctcaggttgagacagtgggcaggggcagggggcggcgctcccggcccatcccttagccccgcggcggccgtgtgggccggaggctgcctgcaccgcgtcagggaggccggcctagaaaccctccctcccagaagaaagccgatcccagttcaggtggggtcttcctcggttgcgtacctggctggagccgagctggtgggcggccggcagccggcgtttctggtgatgacagccccgaaatgaaagcagcgcggccgccgcctccgagggctgcagggagatcagcgtccagcaaataagaagcaagtcctggacccggaggaggaggagcggccgagcatctctctctgctccgccgtgtcctttagatgagcactcccggccggagccggaggtggatccgcagagctgcctctgggcgcctgaccccgcgctgacatcacaacctgtgacaggcgcatcacgcccggtacctgctcccggccgctgcccgtcctcccagcctctttgtatgccgcagacatggccagccagcaggattcgggcttctttgagatcagtatcaaatatttactgaaatcctggagtaatacttctcccgttggcaacggttacatcaagcctccggttccacctgcttctggcacgcacagggagaaagggccgccaaccatgctacccatcaatgtggacccagacagtaaaccaggagaatatgtcctcaaaagtttatttgtcaacttcaccactcaggctgaacgcaagattcgtatcattatggcagagcccctggaaaagccattgacnaaatctctgcaacgtggagaagacccccaatttgatcaggtcatcagctcaatgagctccctttctgagtactgcctgccttccattctacgtacattatttgactggtataaaaggcaaaatggcattgaggatgaatcacatgaatacagaccaagaacaagcaataaatcaaaaagcgatgaacaacagcgagattatttaatggaaagacgggacctcgccattgattttattttttctttagtattaatagaagttttgaaacagattccacttcatcctgtaatagacagtttaatacatgatgttattaacttggctttcaagcactttaaatacaaagaagggtaccttggtcccaacactggcaatatgcatattgtggcagacctgtatgcagaagtcattggagtgttggcacaagccaaattccctgctgtaaagaagaaatttatggcggagctaaaagaattacggcacaaagagcagaacccatatgtggttcaaagcattatcagcttaataatgggcatgaaattctttcgaattaagatgtatccagtggaggattttgaggcctctcttcagtttatgcaggaatgtgcacattacttcctcgaggtcaaagacaaagatatcaagcatgccttggctgggctttttgttgaaatacttgttccagttgctgctgctgttaaaaatgaagtaaatgttccctgccttagaaattttgtggaaagcctgtatgacaccacgctggaactttcttctcgaaagaagcattccttggccttgtaccccctggtgacctgtttgctctgtgtcagtcagaagcagctgttcctgaacaggtggcacattttcctcaacaactgcttgtccaaccttaaaaacaaagatcccaagatggctcgagttgcactggaatctctctacagattactttgggtttacatgattcgaattaaatgtgaaagcaacacagctactcagagccgacttataaccatcatcacaacacttttccccaaagggtcccgcggtgtggtaccaagggacatgcctctgaacatctttgtgaaaatcatccagttcattgcccaggaacgtttagattttgcaatgaaagaaatcattttcgattttctttgtgtgggaaaaccagcaaaagcattcagtctcaacccagagagaatgaacattggtttacgggcattcttggtcatagctgatagcttgcagcagaaagatggggaacctcccatgccggttacaggagccgttcttccttcaggaaacacgttaagagtaaagaaaacatatttgagtaaaacactaactgaagaggaagccaaaatgataggcatgtccttatattactctcaagtacgaaaagctgtagacaacattttaaggcaccttgataaagaagtaggaaggtgtatgatgctgactaatgtacagatgttaaacaaagaaccggaagacatgatcacgggtgagagaaagccaaaaatagatcttttcaggacctgtgttgctgctattcctcgactgcttcctgatgggatgtcaaaacttgaacttattgacttactggctaggctctctattcatatggatgatgaattgcgacatattgcacaaaattctcttcagggtttacttgttgacttctcagattggagggaagatgtactatttggctttaccaacttcctgctccgggaagtaaatgatatgcatcacacactccttgattcgtccctgaagttgctgctgcagctgctcacccagtggaaactagtcatccagacacaaggaaaagtctatgaacaagccaacaaaatcagaaattcagagctcatcgcaaatggctccagtcacagaattcagtcggaacgaggtccccactgcagtgtactccacgctgtagaaggttttgctctggttttactctgcagtttccaggtggccacacgcaaactgtccgttttaatactcaaggaaattcgagcgttgtttattgccctggggcagcctgaggatgacgacaggccgatgattgatgtcatggatcagctaagttcttccattctagaaagttttattcatgtagcagtttcggattcagcaacattaccactcacccacaatgtggatctgcagtggttggtggaatggaacgcagtcctggtcaatagccattatgatgtgaaaagcccttcccatgtctggatatttgcacagtctgtcaaagacccctgggtcctctgcctcttcagcttcctccggcaggagaacttacccaagcactgccccacagccctcagctatgcctggccttatgccttcactcggctccagtcggtgatgcctctggtggacccaaatagcccaattaatgccaagaaaaccagcactgccggcagcggagacaactatgttactttgtggagaaattacctaattctttgttttggagttgcaaaacccagtattatgagcccaggacacttaagagcttccactccagaaataatggcgaccacacctgatggtacagtgagctacgataacaaggccataggcaccccatcggtgggagttctgttaaagcagttggtgcctttgatgagactagagagcattgagatcacagagtccttagttttaggatttggaagaacaaattcccttgttttcagagaattggtagaagaacttcatccattaatgaaagaagctctggaaagaagaccagagaacaagaaacgccgagaacggcgagacttgttaaggctacaactacttcgaatttttgaacttttggctgatgctggtgtaataagtgacagcacaaatggagccctagagcgggatactttagccctgggagctttgttcttagaatatgtggacttgacccgcatgctcctagaagctgaaaatgacaaagaagttgaaattcttaaagatatccgggcacattttagtgcaatggtggccaacttgattcagtgtgttccagttcaccaccgaagatttctcttcccccagcaaagtctgaggcaccaccttttcatcttattcagccagtgggcaggacccttcagcattatgttcactcctctggatcgttacagtgacagaaatcatcagattacaagatatcagtattgtgcattaaaagcaatgtcagcagtactgtgctgtggccctgtctttgacaatgtgggcctttccccagatggctacctatataaatggcttgacaacattctggcttgtcaagatttacgagttcatcaacttggctgcgaagttgttgtcttgctactggaacttaatcctgaccaaataaatctttttaactgggcaattgaccgatgctacacaggttcctaccaacttgcatctggctgcttcaaagccatagcaactgtgtgtggaagcaggaactatcccttcgacatagtgacattgttaaaccttgttctattcaaggcctctgacaccaacagagagatttatgaaatctccatgcagctcatgcagatccttgaagcaaagctttttgtatactcaaagaaagtcgctgagcaaagaccgggaagtattctctatggaacacacggcccgctgccacccctctacagcgtgtcactngccctcttgtcatgtgagctggccaggatgtaccctgagctcacactccccctcttctcagaggtaagccagcgattccccacaacacaccccaacgggcgccagatcatgcttacctacctgctgccctggctgcacaacatcgagctggtggacagcaggctcctcctcccggggtcgagccccagcagcccagaggacgaagtcaaggaccgggaaggtgacgtgactgcttctcacgggctgagaggaaatggctggggctctccagaagccacgtcactggtcctgaacaacctcatgtacatgacggccaagtatggagatgaagttcctgggccagaaatggaaaatgcttggaatgctttagccaacaatgagaaatggagcaacaacctgaggatcaccttgcagttcctgattagcctctgtggggtcagcagcgacacagttctcctaccctatattaaaaaagtggcaatatacttgtgccgtaacaacaccattcaaaccatggaagagcttctctttgagctgcagcagacagaacccgtgaaccccatcgtccagcattgtgacaacccgcccttctaccgcttcacggccagtagcaaggcttccgcagcagcctcaggaaccacctctagcagcaatacagtggttgctggccaggaaaatttcccagatgctgaggagaacaagatattgaaagaatctgatgaaaggtttagtaatgtcatcagagcccacactcgcctcgagtcaagatacagcaatagctctggaggatcctacgatgaagataaaaatgatccaatttctccctacacgggctggttgctgactattacagagaccaagcagccgcagcccttaccgatgccttgtactggaggatgctgggcccccctggttgactatctcccggagaccatcactccccgggggccactccacaggtgcaatattgctgtaatttttatgactgaaatggtggtggatcacagtgtacgagaagactgggcgcttcatctaccattattacttcatgctgtcttcttaggtttagaccactaccggcctgaagtctttgaacacagcaaaaaactgcttcttcacctcttgattgccctctcttgcaacagcaatttccattccattgcttccgtgctcctgcagacccgagagatgggtgaagctaagactctaaccgtgcagccagcctaccaacctgaatatctctatacaggtggctttgacttcctgagagaggaccagtcatccccggtgcctgactcagggcttagttcaagctccacctcctctagcatcagtctgggaggcagcagtggaaacctcccacagatgacccaggaggtagaagatgtggacacagctgctgaaacagatgagaaggcaaacaagctcattgagtttctcacgaccagggcatttggtccactttggtgccatgaagacatcacacctaaaaatcaaaattcaaagagtgctgaacagctcactaattttctacgtcacgttgtatctgtatttaaagattccaaatcaggcttccatctggagcaccagttgagtgaagttgcattgcagacagccctcgcaagctcttcaaggcactatgctggtcggtccttccagatattccgggccctcaagcaacctctgtcagcacatgccttatctgaccttctctcaagattggtggaggtgataggagaacatggagatgagattcagggttatgtaatggaagcgctcctaaccttggaggcggctgtggataacttgtctgactgcttgaagaacagtgacctcctaactgtattgtcccgctcttcctcaccagatttaagctccagcagtaaactaacagcaagcagaaagagcacaggacaactaaacatgaacccgggaaccaccagcggcaacaccgcaactgccgaacggagccggcatcaacgaagcttctctgtgcccaagaagtttggtgtcatcgaccgatcctctgacccacctcgaagtgccacactggacagaattcaggcttgtacccaacaaggcctctcctcaaaaaccagaagctcatcctccttgaaggacagtctcacggacccatcccacataaaccatcccaccaacctgctggccaccatattctgggtcacagtggccttgatggagtctgattttgagtttgaatacttaatggccttaaggctgttgagcagactactggcacatatgccactcgataaggctgagaaccgagaaaagcttgagaaactccaggcacagctgaagtgggccgacttctccgggctgcagcagctgctgctgaaaggattcacatccctcaccaccacagacctgaccctgcagctcttcagtctgctgacaccagtgtccaaaatatccatggtggatgcatcccacgctattgggtttccactgaatgtcttgtgtctcctgcctcagctgattcagcattttgaaaatcccaatcagttctgtaaggatatagccgaaaggattgctcaggtttgtttagaagagaagaaccccaaactttcaaatcttgcacatgtcatgactctttataaaacgcacagctacacgagggactgtgccacgtgggtcaatgtggtctgtcgataccttcatgaagcatatgctgacattaccttgaatatggttacctacctggcagagctgctggagaagggcctccctagtgtgcagcagcccctgctccaggtgatctacagtcttctcagctacatggacctttctgtcgttcctgtcaaacagttcaatgtggaagttctgaagacaattgaaaaatatgtgcaaagtgttcactggagagaagctctgaatatcttgaagctggtagtttctcggtcagccagccttgttttaccttcataccagcacagtgacctctcaaaaatagaaatacatcgagtgtggactagtgcttccaaggaattacctgggaaaaccctggacttccacttcgatatttcggagactccaatcatcgggaggcggtatgatgagctgcagaattcttctgggcgtgatgggaagcccagggccatggccgtcacccggagcacatcttccacttcctcaggctccaactccaacgtccttgttccagtgagctggaaaaggccccagtattctcagaagagaacaaaagagaagttggtacatgtcctttctctgtgtggccaagaagtaggattgagcaaaaatccatcagtgattttttcatcgtgtggggatctggatctgcttgagcaccagacaagcttggtatcttctgaggacggtgcccgagagcaggagaacatggatgacacaaacagcgagcagcagtttagagtcttcagagacttcgacttcctagatgtggagctggaggatggagagggtgagagtatggacaatttcaactggggagtgcgcagacgttctctggacagcctggataagtgtgatatgcagattctggaggagcgccaactgtcaggaagcactcctagcctgaataaaatgcaccatgaggactccgatgaatcatccgaggaggaggacctcacagccagccagatcctggagcactcagacctaatcatgactctctccccctctgaagagacgaatcccatggagctgctcaccacagcctgtgactcgacccctgcagaacctcattcctttaacaccagaatgtccagctttgatgcttccttgcctgatatgaataatctgcagatttctgagggttcaaaggctgaagctgttcgtgaggaggaggacaccaccgtgcatgaggatgatctttctagttccatcaatgaactcccagcagcttttgaatgcagcgacagctttagcctggacatgactgagggggaagaaaaaggcaatcgggcactggaccagtttaccctggcgagcccgcagcctgtgacgatgccgaggaggcctggcgcagccacatcaaccagcttatgtgtgactcagatggctcctgtgctgtgtatacatttcatgtgttctcctccttgtttaagaatattcagaaaaggttctgcttcctaacctgtgatgcagccagttaccttggagataacctccggggaatcggatccaaatttgtcagctcttcccagatgctcacctcctgctctgaatgtcctacactttttgtggatgccgagactctcctttcatgtggacttctggacaagctcaagttcagtgtgttagaactgcaagaatatttggatacctacaacaacaggaaagaggccacactctcttggcttgcaaattgtaaggcaacatttgcagggggatcaagagatggagtaattacctgtcaaccaggggactccgaagaaaaggtacaattggaactgtgtcagagattatataagctacacttccagctgctattgctttttcagtcctactgtaagctcatcggccaggtgcacgaagttagctccatgccagagctgctgaatatgtccagggaactgagtgacctaaagaaacacctgaaggaagccagtgcagtcattgcagctgaccctctctattcagacggcgcgtggtccgagcccaccttcacgtccactgaagcagccatccagtccatgctggagtgcctgaagaacaacgaactcggcaaagctttgcggcagatcagggagtgcagaagtctgtggcccaatgacatctttggaagcagttctgatgatgaggtccagacactactgaatatttatttccgtcaccaaactctgggacagacgggtacttatgccctggtggggtctaaccagagcctgaccgagatctgcaccaagctgatggagctgaacatggagatccgggacatgatccgcagggcccagagttaccgagtcctcactacttttcttccagactccagtgtttctggcactagtctctgacaggagcctcctgtccccactgggttccaaactggcagtgctgccatgctggggcaacgtcattcagtgtcttctcggccttcaaaaggcttggacagactgttctccctcttgttacctgtagggctttttctaaagaggatggcagaacttccaacgtgtagcaatactataagaaccaaggtagcttagaacgtcctggacagactccactcatcatgctgtgtggcacaaatgtgttacatttgaccgagcatatgcaactcgctactgaagaagtgacttccgttgcataccaaagccgactacactgaacagtaccttcctttctagaaacaattttagattggcaaaagtgcaatgttttcttcactcaaaaaattttatattctcaaacatgtatattctttccctgtcttgttccattttcttttcttttttcttttttctttttcctttctttcgtgggctgagaaaggggcaggcaaaatgaagctggccactgaaaactgtaagatggtcaaaagctgacagcctgtgtatgtgaaaagggaattgtaaatggactgcaatgtaatgtacactgtaatttgaatacaattactgtatctaaaaggagctgctatgaagtacctttcttatgttgctaggctactgtttctgaaagccctggatctctttgcaccaaaaatggtccagatagactctttttaaggatcttggctgctttttactagaaggttgcttttatgagcatatttatactgctgaaggatgagtgttaattttaattaactttgccgttttgtagagaaaactattcacaagataaattccaagtcttttcacctgtcaggcatgcatattttaatatctgtttggatagtcagaagtagaatcataaaggtaaaatatgagttgttactttgtttcttcgatgtcatattttatgtgtaatatatatgtaaagggccattcttaagttctctccttaaacttaatgctgtcaagtgttagatgtgtgcatgtgaacttgttgcactgcagaaacatattcagagtttatctatgtaacttattcactctgtaaatacatttaaagtttttgtgatgtaagcttaattgatattctgttcagaactttctttagactaaaaaaaaaaaaaaa

SEQ ID NO: 281505 - DNA, 10824 bp, Homo sapiens
  misc_feature (951)..(951): n is a, c, g, or t
  misc_feature (4623)..(4623): n is a, c, g, or t
agttgtgtttatttcagggacagacacaaggggaagcagcagccagagcacacccgggccgctcacgggaagccttgctgaagagagaggatccgcagaagctgggaaattcctcccgcagcctaggcggagactgagccgcggctcaggttgagacagtgggcaggggcagggggcggcgctcccggcccatcccttagccccgcggcggccgtgtgggccggaggctgcctgcaccgcgtcagggaggccggcctagaaaccctccctcccagaagaaagccgatcccagttcaggtggggtcttcctcggttgcgtacctggctggagccgagctggtgggcggccggcagccggcgtttctggtgatgacagccccgaaatgaaagcagcgcggccgccgcctccgagggctgcagggagatcagcgtccagcaaataagaagcaagtcctggacccggaggaggaggagcggccgagcatctctctctgctccgccgtgtcctttagatgagcactcccggccggagccggaggtggatccgcagagctgcctctgggcgcctgaccccgcgctgacatcacaacctgtgacaggcgcatcacgcccggtacctgctcccggccgctgcccgtcctcccagcctctttgtatgccgcagacatggccagccagcaggattcgggcttctttgagatcagtatcaaatatttactgaaatcctggagtaatacttctcccgttggcaacggttacatcaagcctccggttccacctgcttctggcacgcacagggagaaagggccgccaaccatgctacccatcaatgtggacccagacagtaaaccaggagaatatgtcctcaaaagtttatttgtcaacttcaccactcaggctgaacgcaagattcgtatcattatggcagagcccctggaaaagccattgacnaaatctctgcaacgtggagaagacccccaatttgatcaggtcatcagctcaatgagctccctttctgagtactgcctgccttccattctacgtacattatttgactggtataaaaggcaaaatggcattgaggatgaatcacatgaatacagaccaagaacaagcaataaatcaaaaagcgatgaacaacagcgagattatttaatggaaagacgggacctcgccattgattttattttttctttagtattaatagaagttttgaaacagattccacttcatcctgtaatagacagtttaatacatgatgttattaacttggctttcaagcactttaaatacaaagaagggtaccttggtcccaacactggcaatatgcatattgtggcagacctgtatgcagaagtcattggagtgttggcacaagccaaattccctgctgtaaagaagaaatttatggcggagctaaaagaattacggcacaaagagcagaacccatatgtggttcaaagcattatcagcttaataatgggcatgaaattctttcgaattaagatgtatccagtggaggattttgaggcctctcttcagtttatgcaggaatgtgcacattacttcctcgaggtcaaagacaaagatatcaagcatgccttggctgggctttttgttgaaatacttgttccagttgctgctgctgttaaaaatgaagtaaatgttccctgccttagaaattttgtggaaagcctgtatgacaccacgctggaactttcttctcgaaagaagcattccttggccttgtaccccctggtgacctgtttgctctgtgtcagtcagaagcagctgttcctgaacaggtggcacattttcctcaacaactgcttgtccaaccttaaaaacaaagatcccaagatggctcgagttgcactggaatctctctacagattactttgggtttacatgattcgaattaaatgtgaaagcaacacagctactcagagccgacttataaccatcatcacaacacttttccccaaagggtcccgcggtgtggtaccaagggacatgcctctgaacatctttgtgaaaatcatccagttcattgcccaggaacgtttagattttgcaatgaaagaaatcattttcgattttctttgtgtgggaaaaccagcaaaagcattcagtctcaacccagagagaatgaacattggtttacgggcattcttggtcatagctgatagcttgcagcagaaagatggggaacctcccatgccggttacaggagccgttcttccttcaggaaacacgttaagagtaaagaaaacatatttgagtaaaacactaactgaagaggaagccaaaatgataggcatgtccttatattactctcaagtacgaaaagctgtagacaacattttaaggcaccttgataaagaagtaggaaggtgtatgatgctgactaatgtacagatgttaaacaaagaaccggaagacatgatcacgggtgagagaaagccaaaaatagatcttttcaggacctgtgttgctgctattcctcgactgcttcctgatgggatgtcaaaacttgaacttattgacttactggctaggctctctattcatatggatgatgaattgcgacatattgcacaaaattctcttcagggtttacttgttgacttctcagattggagggaagatgtactatttggctttaccaacttcctgctccgggaagtaaatgatatgcatcacacactccttgattcgtccctgaagttgctgctgcagctgctcacccagtggaaactagtcatccagacacaaggaaaagtctatgaacaagccaacaaaatcagaaattcagagctcatcgcaaatggctccagtcacagaattcagtcggaacgaggtccccactgcagtgtactccacgctgtagaaggttttgctctggttttactctgcagtttccaggtggccacacgcaaactgtccgttttaatactcaaggaaattcgagcgttgtttattgccctggggcagcctgaggatgacgacaggccgatgattgatgtcatggatcagctaagttcttccattctagaaagttttattcatgtagcagtttcggattcagcaacattaccactcacccacaatgtggatctgcagtggttggtggaatggaacgcagtcctggtcaatagccattatgatgtgaaaagcccttcccatgtctggatatttgcacagtctgtcaaagacccctgggtcctctgcctcttcagcttcctccggcaggagaacttacccaagcactgccccacagccctcagctatgcctggccttatgccttcactcggctccagtcggtgatgcctctggtggacccaaatagcccaattaatgccaagaaaaccagcactgccggcagcggagacaactatgttactttgtggagaaattacctaattctttgttttggagttgcaaaacccagtattatgagcccaggacacttaagagcttccactccagaaataatggcgaccacacctgatggtacagtgagctacgataacaaggccataggcaccccatcggtgggagttctgttaaagcagttggtgcctttgatgagactagagagcattgagatcacagagtccttagttttaggatttggaagaacaaattcccttgttttcagagaattggtagaagaacttcatccattaatgaaagaagctctggaaagaagaccagagaacaagaaacgccgagaacggcgagacttgttaaggctacaactacttcgaatttttgaacttttggctgatgctggtgtaataagtgacagcacaaatggagccctagagcgggatactttagccctgggagctttgttcttagaatatgtggacttgacccgcatgctcctagaagctgaaaatgacaaagaagttgaaattcttaaagatatccgggcacattttagtgcaatggtggccaacttgattcagtgtgttccagttcaccaccgaagatttctcttcccccagcaaagtctgaggcaccaccttttcatcttattcagccagtgggcaggacccttcagcattatgttcactcctctggatcgttacagtgacagaaatcatcagattacaagatatcagtattgtgcattaaaagcaatgtcagcagtactgtgctgtggccctgtctttgacaatgtgggcctttccccagatggctacctatataaatggcttgacaacattctggcttgtcaagatttacgagttcatcaacttggctgcgaagttgttgtcttgctactggaacttaatcctgaccaaataaatctttttaactgggcaattgaccgatgctacacaggttcctaccaacttgcatctggctgcttcaaagccatagcaactgtgtgtggaagcaggaactatcccttcgacatagtgacattgttaaaccttgttctattcaaggcctctgacaccaacagagagatttatgaaatctccatgcagctcatgcagatccttgaagcaaagctttttgtatactcaaagaaagtcgctgagcaaagaccgggaagtattctctatggaacacacggcccgctgccacccctctacagcgtgtcactngccctcttgtcatgtgagctggccaggatgtaccctgagctcacactccccctcttctcagaggtaagccagcgattccccacaacacaccccaacgggcgccagatcatgcttacctacctgctgccctggctgcacaacatcgagctggtggacagcaggctcctcctcccggggtcgagccccagcagcccagaggacgaagtcaaggaccgggaaggtgacgtgactgcttctcacgggctgagaggaaatggctggggctctccagaagccacgtcactggtcctgaacaacctcatgtacatgacggccaagtatggagatgaagttcctgggccagaaatggaaaatgcttggaatgctttagccaacaatgagaaatggagcaacaacctgaggatcaccttgcagttcctgattagcctctgtggggtcagcagcgacacagttctcctaccctatattaaaaaagtggcaatatacttgtgccgtaacaacaccattcaaaccatggaagagcttctctttgagctgcagcagacagaacccgtgaaccccatcgtccagcattgtgacaacccgcccttctaccgcttcacggccagtagcaaggcttccgcagcagcctcaggaaccacctctagcagcaatacagtggttgctggccaggaaaatttcccagatgctgaggagaacaagatattgaaagaatctgatgaaaggtttagtaatgtcatcagagcccacactcgcctcgagtcaagatacagcaatagctctggaggatcctacgatgaagataaaaatgatccaatttctccctacacgggctggttgctgactattacagagaccaagcagccgcagcccttaccgatgccttgtactggaggatgctgggcccccctggttgactatctcccggagaccatcactccccgggggccactccacaggtgcaatattgctgtaatttttatgactgaaatggtggtggatcacagtgtacgagaagactgggcgcttcatctaccattattacttcatgctgtcttcttaggtttagaccactaccggcctgaagtctttgaacacagcaaaaaactgcttcttcacctcttgattgccctctcttgcaacagcaatttccattccattgcttccgtgctcctgcagacccgagagatgggtgaagctaagactctaaccgtgcagccagcctaccaacctgaatatctctatacaggtggctttgacttcctgagagaggaccagtcatccccggtgcctgactcagggcttagttcaagctccacctcctctagcatcagtctgggaggcagcagtggaaacctcccacagatgacccaggaggtagaagatgtggacacagctgctgaaacagatgagaaggcaaacaagctcattgagtttctcacgaccagggcatttggtccactttggtgccatgaagacatcacacctaaaaatcaaaattcaaagagtgctgaacagctcactaattttctacgtcacgttgtatctgtatttaaagattccaaatcaggcttccatctggagcaccagttgagtgaagttgcattgcagacagccctcgcaagctcttcaaggcactatgctggtcggtccttccagatattccgggccctcaagcaacctctgtcagcacatgccttatctgaccttctctcaagattggtggaggtgataggagaacatggagatgagattcagggttatgtaatggaagcgctcctaaccttggaggcggctgtggataacttgtctgactgcttgaagaacagtgacctcctaactgtattgtcccgctcttcctcaccagatttaagctccagcagtaaactaacagcaagcagaaagagcacaggacaactaaacatgaacccgggaaccaccagcggcaacaccgcaactgccgaacggagccggcatcaacgaagcttctctgtgcccaagaagtttggtgtcatcgaccgatcctctgacccacctcgaagtgccacactggacagaattcaggcttgtacccaacaaggcctctcctcaaaaaccagaagctcatcctccttgaaggacagtctcacggacccatcccacataaaccatcccaccaacctgctggccaccatattctgggtcacagtggccttgatggagtctgattttgagtttgaatacttaatggccttaaggctgttgagcagactactggcacatatgccactcgataaggctgagaaccgagaaaagcttgagaaactccaggcacagctgaagtgggccgacttctccgggctgcagcagctgctgctgaaaggattcacatccctcaccaccacagacctgaccctgcagctcttcagtctgctgacaccagtgtccaaaatatccatggtggatgcatcccacgctattgggtttccactgaatgtcttgtgtctcctgcctcagctgattcagcattttgaaaatcccaatcagttctgtaaggatatagccgaaaggattgctcaggtttgtttagaagagaagaaccccaaactttcaaatcttgcacatgtcatgactctttataaaacgcacagctacacgagggactgtgccacgtgggtcaatgtggtctgtcgataccttcatgaagcatatgctgacattaccttgaatatggttacctacctggcagagctgctggagaagggcctccctagtgtgcagcagcccctgctccaggtgatctacagtcttctcagctacatggacctttctgtcgttcctgtcaaacagttcaatgtggaagttctgaagacaattgaaaaatatgtgcaaagtgttcactggagagaagctctgaatatcttgaagctggtagtttctcggtcagccagccttgttttaccttcataccagcacagtgacctctcaaaaatagaaatacatcgagtgtggactagtgcttccaaggaattacctgggaaaaccctggacttccacttcgatatttcggagactccaatcatcgggaggcggtatgatgagctgcagaattcttctgggcgtgatgggaagcccagggccatggccgtcacccggagcacatcttccacttcctcaggctccaactccaacgtccttgttccagtgagctggaaaaggccccagtattctcagaagagaacaaaagagaagttggtacatgtcctttctctgtgtggccaagaagtaggattgagcaaaaatccatcagtgattttttcatcgtgtggggatctggatctgcttgagcaccagacaagcttggtatcttctgaggacggtgcccgagagcaggagaacatggatgacacaaacagcgagcagcagtttagagtcttcagagacttcgacttcctagatgtggagctggaggatggagagggtgagagtatggacaatttcaactggggagtgcgcagacgttctctggacagcctggataagtgtgatatgcagattctggaggagcgccaactgtcaggaagcactcctagcctgaataaaatgcaccatgaggactccgatgaatcatccgaggaggaggacctcacagccagccagatcctggagcactcagacctaatcatgactctctccccctctgaagagacgaatcccatggagctgctcaccacagcctgtgactcgacccctgcagaacctcattcctttaacaccagaatgtccagctttgatgcttccttgcctgatatgaataatctgcagatttctgagggttcaaaggctgaagctgttcgtgaggaggaggacaccaccgtgcatgaggatgatctttctagttccatcaatgaactcccagcagcttttgaatgcagcgacagctttagcctggacatgactgagggggaagaaaaaggcaatcgggcactggaccagtttaccctggcgagctttggagaaggtgacaggggagtctctccccctccctcgcccttcttctcagccatccttgccgcctttcagcccgcagcctgtgacgatgccgaggaggcctggcgcagccacatcaaccagcttatgtgtgactcagatggctcctgtgctgtgtatacatttcatgtgttctcctccttgtttaagataacctccggggaatcggatccaaatttgtcagctcttcccagatgctcacctcctgctctgaatgtcctacactttttgtggatgccgagactctcctttcatgtggacttctggacaagctcaagttcagtgtgttagaactgcaagaatatttggatacctacaacaacaggaaagaggccacactctcttggcttgcaaattgtaaggcaacatttgcagggggatcaagagatggagtaattacctgtcaaccaggggactccgaagaaaaggtacaattggaactgtgtcagagattatataagctacacttccagctgctattgctttttcagtcctactgtaagctcatcggccaggtgcacgaagttagctccatgccagagctgctgaatatgtccagggaactgagtgacctaaagaaacacctgaaggaagccagtgcagtcattgcagctgaccctctctattcagacggcgcgtggtccgagcccaccttcacgtccactgaagcagccatccagtccatgctggagtgcctgaagaacaacgaactcggcaaagctttgcggcagatcagggagtgcagaagtctgtggcccaatgacatctttggaagcagttctgatgatgaggtccagacactactgaatatttatttccgtcaccaaactctgggacagacgggtacttatgccctggtggggtctaaccagagcctgaccgagatctgcaccaagctgatggagctgaacatggagatccgggacatgatccgcagggcccagagttaccgagtcctcactacttttcttccagactccagtgtttctggcactagtctctgacaggagcctcctgtccccactgggttccaaactggcagtgctgccatgctggggcaacgtcattcagtgtcttctcggccttcaaaaggcttggacagactgttctccctcttgttacctgtagggctttttctaaagaggatggcagaacttccaacgtgtagcaatactataagaaccaaggtagcttagaacgtcctggacagactccactcatcatgctgtgtggcacaaatgtgttacatttgaccgagcatatgcaactcgctactgaagaagtgacttccgttgcataccaaagccgactacactgaacagtaccttcctttctagaaacaattttagattggcaaaagtgcaatgttttcttcactcaaaaaattttatattctcaaacatgtatattctttccctgtcttgttccattttcttttcttttttcttttttctttttcctttctttcgtgggctgagaaaggggcaggcaaaatgaagctggccactgaaaactgtaagatggtcaaaagctgacagcctgtgtatgtgaaaagggaattgtaaatggactgcaatgtaatgtacactgtaatttgaatacaattactgtatctaaaaggagctgctatgaagtacctttcttatgttgctaggctactgtttctgaaagccctggatctctttgcaccaaaaatggtccagatagactctttttaaggatcttggctgctttttactagaaggttgcttttatgagcatatttatactgctgaaggatgagtgttaattttaattaactttgccgttttgtagagaaaactattcacaagataaattccaagtcttttcacctgtcaggcatgcatattttaatatctgtttggatagtcagaagtagaatcataaaggtaaaatatgagttgttactttgtttcttcgatgtcatattttatgtgtaatatatatgtaaagggccattcttaagttctctccttaaacttaatgctgtcaagtgttagatgtgtgcatgtgaacttgttgcactgcagaaacatattcagagtttatctatgtaacttattcactctgtaaatacatttaaagtttttgtgatgtaagcttaattgatattctgttcagaactttctttagactaaaaaaaaaaaaaaa

SEQ ID NO: 281506 - DNA, 1782 bp, Homo sapiens
cctgtgccatgcttgctgtgtagcaaatggaatctcttgcacaattggaactgtgtcagagattatataagctacacttccagctgctattgctttttcagtcctactgtaagctcatcggccaggtgcacgaagttagctccatgccagagctgctgaatatgtccagggaactgagtgacctaaagaaacacctgaaggaagccagtgcagtcattgcagctgaccctctctattcagacggcgcgtggtccgagcccaccttcacgtccactgaagcagccatccagtccatgctggagtgcctgaagaacaacgaactcggcaaagctttgcggcagatcagggagtgcagaagtctgtggcccaatgacatctttggaagcagttctgatgatgaggtccagacactactgaatatttatttccgtcaccaaactctgggacagacgggtacttatgccctggtggggtctaaccagagcctgaccgagatctgcaccaagctgatggagctgaacatggagatccgggacatgatccgcagggcccagagttaccgagtcctcactacttttcttccagactccagtgtttctggcactagtctctgacaggagcctcctgtccccactgggttccaaactggcagtgctgccatgctggggcaacgtcattcagtgtcttctcggccttcaaaaggcttggacagactgttctccctcttgttacctgtagggctttttctaaagaggatggcagaacttccaacgtgtagcaatactataagaaccaaggtagcttagaacgtcctggacagactccactcatcatgctgtgtggcacaaatgtgttacatttgaccgagcatatgcaactcgctactgaagaagtgacttccgttgcataccaaagccgactacactgaacagtaccttcctttctagaaacaattttagattggcaaaagtgcaatgttttcttcactcaaaaaattttatattctcaaacatgtatattctttccctgtcttgttccattttcttttcttttttcttttttctttttcctttctttcgtgggctgagaaaggggcaggcaaaatgaagctggccactgaaaactgtaagatggtcaaaagctgacagcctgtgtatgtgaaaagggaattgtaaatggactgcaatgtaatgtacactgtaatttgaatacaattactgtatctaaaaggagctgctatgaagtacctttcttatgttgctaggctactgtttctgaaagccctggatctctttgcaccaaaaatggtccagatagactctttttaaggatcttggctgctttttactagaaggttgcttttatgagcatatttatactgctgaaggatgagtgttaattttaattaactttgccgttttgtagagaaaactattcacaagataaattccaagtcttttcacctgtcaggcatgcatattttaatatctgtttggatagtcagaagtagaatcataaaggtaaaatatgagttgttactttgtttcttcgatgtcatattttatgtgtaatatatatgtaaagggccattcttaagttctctccttaaacttaatgctgtcaagtgttagatgtgtgcatgtgaacttgttgcactgcagaaacatattcagagtttatctatgtaacttattcactctgtaaatacatttaaagtttttgtgatgtaagcttaattgatattctgttcagaactttctttagactaaaaaaaaaaaaaaa

SEQ ID NO: 281507 - DNA, 9399 bp, Homo sapiens
  misc_feature (951)..(951): n is a, c, g, or t
  misc_feature (4623)..(4623): n is a, c, g, or t
agttgtgtttatttcagggacagacacaaggggaagcagcagccagagcacacccgggccgctcacgggaagccttgctgaagagagaggatccgcagaagctgggaaattcctcccgcagcctaggcggagactgagccgcggctcaggttgagacagtgggcaggggcagggggcggcgctcccggcccatcccttagccccgcggcggccgtgtgggccggaggctgcctgcaccgcgtcagggaggccggcctagaaaccctccctcccagaagaaagccgatcccagttcaggtggggtcttcctcggttgcgtacctggctggagccgagctggtgggcggccggcagccggcgtttctggtgatgacagccccgaaatgaaagcagcgcggccgccgcctccgagggctgcagggagatcagcgtccagcaaataagaagcaagtcctggacccggaggaggaggagcggccgagcatctctctctgctccgccgtgtcctttagatgagcactcccggccggagccggaggtggatccgcagagctgcctctgggcgcctgaccccgcgctgacatcacaacctgtgacaggcgcatcacgcccggtacctgctcccggccgctgcccgtcctcccagcctctttgtatgccgcagacatggccagccagcaggattcgggcttctttgagatcagtatcaaatatttactgaaatcctggagtaatacttctcccgttggcaacggttacatcaagcctccggttccacctgcttctggcacgcacagggagaaagggccgccaaccatgctacccatcaatgtggacccagacagtaaaccaggagaatatgtcctcaaaagtttatttgtcaacttcaccactcaggctgaacgcaagattcgtatcattatggcagagcccctggaaaagccattgacnaaatctctgcaacgtggagaagacccccaatttgatcaggtcatcagctcaatgagctccctttctgagtactgcctgccttccattctacgtacattatttgactggtataaaaggcaaaatggcattgaggatgaatcacatgaatacagaccaagaacaagcaataaatcaaaaagcgatgaacaacagcgagattatttaatggaaagacgggacctcgccattgattttattttttctttagtattaatagaagttttgaaacagattccacttcatcctgtaatagacagtttaatacatgatgttattaacttggctttcaagcactttaaatacaaagaagggtaccttggtcccaacactggcaatatgcatattgtggcagacctgtatgcagaagtcattggagtgttggcacaagccaaattccctgctgtaaagaagaaatttatggcggagctaaaagaattacggcacaaagagcagaacccatatgtggttcaaagcattatcagcttaataatgggcatgaaattctttcgaattaagatgtatccagtggaggattttgaggcctctcttcagtttatgcaggaatgtgcacattacttcctcgaggtcaaagacaaagatatcaagcatgccttggctgggctttttgttgaaatacttgttccagttgctgctgctgttaaaaatgaagtaaatgttccctgccttagaaattttgtggaaagcctgtatgacaccacgctggaactttcttctcgaaagaagcattccttggccttgtaccccctggtgacctgtttgctctgtgtcagtcagaagcagctgttcctgaacaggtggcacattttcctcaacaactgcttgtccaaccttaaaaacaaagatcccaagatggctcgagttgcactggaatctctctacagattactttgggtttacatgattcgaattaaatgtgaaagcaacacagctactcagagccgacttataaccatcatcacaacacttttccccaaagggtcccgcggtgtggtaccaagggacatgcctctgaacatctttgtgaaaatcatccagttcattgcccaggaacgtttagattttgcaatgaaagaaatcattttcgattttctttgtgtgggaaaaccagcaaaagcattcagtctcaacccagagagaatgaacattggtttacgggcattcttggtcatagctgatagcttgcagcagaaagatggggaacctcccatgccggttacaggagccgttcttccttcaggaaacacgttaagagtaaagaaaacatatttgagtaaaacactaactgaagaggaagccaaaatgataggcatgtccttatattactctcaagtacgaaaagctgtagacaacattttaaggcaccttgataaagaagtaggaaggtgtatgatgctgactaatgtacagatgttaaacaaagaaccggaagacatgatcacgggtgagagaaagccaaaaatagatcttttcaggacctgtgttgctgctattcctcgactgcttcctgatgggatgtcaaaacttgaacttattgacttactggctaggctctctattcatatggatgatgaattgcgacatattgcacaaaattctcttcagggtttacttgttgacttctcagattggagggaagatgtactatttggctttaccaacttcctgctccgggaagtaaatgatatgcatcacacactccttgattcgtccctgaagttgctgctgcagctgctcacccagtggaaactagtcatccagacacaaggaaaagtctatgaacaagccaacaaaatcagaaattcagagctcatcgcaaatggctccagtcacagaattcagtcggaacgaggtccccactgcagtgtactccacgctgtagaaggttttgctctggttttactctgcagtttccaggtggccacacgcaaactgtccgttttaatactcaaggaaattcgagcgttgtttattgccctggggcagcctgaggatgacgacaggccgatgattgatgtcatggatcagctaagttcttccattctagaaagttttattcatgtagcagtttcggattcagcaacattaccactcacccacaatgtggatctgcagtggttggtggaatggaacgcagtcctggtcaatagccattatgatgtgaaaagcccttcccatgtctggatatttgcacagtctgtcaaagacccctgggtcctctgcctcttcagcttcctccggcaggagaacttacccaagcactgccccacagccctcagctatgcctggccttatgccttcactcggctccagtcggtgatgcctctggtggacccaaatagcccaattaatgccaagaaaaccagcactgccggcagcggagacaactatgttactttgtggagaaattacctaattctttgttttggagttgcaaaacccagtattatgagcccaggacacttaagagcttccactccagaaataatggcgaccacacctgatggtacagtgagctacgataacaaggccataggcaccccatcggtgggagttctgttaaagcagttggtgcctttgatgagactagagagcattgagatcacagagtccttagttttaggatttggaagaacaaattcccttgttttcagagaattggtagaagaacttcatccattaatgaaagaagctctggaaagaagaccagagaacaagaaacgccgagaacggcgagacttgttaaggctacaactacttcgaatttttgaacttttggctgatgctggtgtaataagtgacagcacaaatggagccctagagcgggatactttagccctgggagctttgttcttagaatatgtggacttgacccgcatgctcctagaagctgaaaatgacaaagaagttgaaattcttaaagatatccgggcacattttagtgcaatggtggccaacttgattcagtgtgttccagttcaccaccgaagatttctcttcccccagcaaagtctgaggcaccaccttttcatcttattcagccagtgggcaggacccttcagcattatgttcactcctctggatcgttacagtgacagaaatcatcagattacaagatatcagtattgtgcattaaaagcaatgtcagcagtactgtgctgtggccctgtctttgacaatgtgggcctttccccagatggctacctatataaatggcttgacaacattctggcttgtcaagatttacgagttcatcaacttggctgcgaagttgttgtcttgctactggaacttaatcctgaccaaataaatctttttaactgggcaattgaccgatgctacacaggttcctaccaacttgcatctggctgcttcaaagccatagcaactgtgtgtggaagcaggaactatcccttcgacatagtgacattgttaaaccttgttctattcaaggcctctgacaccaacagagagatttatgaaatctccatgcagctcatgcagatccttgaagcaaagctttttgtatactcaaagaaagtcgctgagcaaagaccgggaagtattctctatggaacacacggcccgctgccacccctctacagcgtgtcactngccctcttgtcatgtgagctggccaggatgtaccctgagctcacactccccctcttctcagaggtaagccagcgattccccacaacacaccccaacgggcgccagatcatgcttacctacctgctgccctggctgcacaacatcgagctggtggacagcaggctcctcctcccggggtcgagccccagcagcccagaggacgaagtcaaggaccgggaaggtgacgtgactgcttctcacgggctgagaggaaatggctggggctctccagaagccacgtcactggtcctgaacaacctcatgtacatgacggccaagtatggagatgaagttcctgggccagaaatggaaaatgcttggaatgctttagccaacaatgagaaatggagcaacaacctgaggatcaccttgcagttcctgattagcctctgtggggtcagcagcgacacagttctcctaccctatattaaaaaagtggcaatatacttgtgccgtaacaacaccattcaaaccatggaagagcttctctttgagctgcagcagacagaacccgtgaaccccatcgtccagcattgtgacaacccgcccttctaccgcttcacggccagtagcaaggcttccgcagcagcctcaggaaccacctctagcagcaatacagtggttgctggccaggaaaatttcccagatgctgaggagaacaagatattgaaagaatctgatgaaaggtttagtaatgtcatcagagcccacactcgcctcgagtcaagatacagcaatagctctggaggatcctacgatgaagataaaaatgatccaatttctccctacacgggctggttgctgactattacagagaccaagcagccgcagcccttaccgatgccttgtactggaggatgctgggcccccctggttgactatctcccggagaccatcactccccgggggccactccacaggtgcaatattgctgtaatttttatgactgaaatggtggtggatcacagtgtacgagaagactgggcgcttcatctaccattattacttcatgctgtcttcttaggtttagaccactaccggcctgaagtctttgaacacagcaaaaaactgcttcttcacctcttgattgccctctcttgcaacagcaatttccattccattgcttccgtgctcctgcagacccgagagatgggtgaagctaagactctaaccgtgcagccagcctaccaacctgaatatctctatacaggtggctttgacttcctgagagaggaccagtcatccccggtgcctgactcagggcttagttcaagctccacctcctctagcatcagtctgggaggcagcagtggaaacctcccacagatgacccaggaggtagaagatgtggacacagctgctgaaacagatgagaaggcaaacaagctcattgagtttctcacgaccagggcatttggtccactttggtgccatgaagacatcacacctaaaaatcaaaattcaaagagtgctgaacagctcactaattttctacgtcacgttgtatctgtatttaaagattccaaatcaggcttccatctggagcaccagttgagtgaagttgcattgcagacagccctcgcaagctcttcaaggcactatgctggtcggtccttccagatattccgggccctcaagcaacctctgtcagcacatgccttatctgaccttctctcaagattggtggaggtgataggagaacatggagatgagattcagggttatgtaatggaagcgctcctaaccttggaggcggctgtggataacttgtctgactgcttgaagaacagtgacctcctaactgtattgtcccgctcttcctcaccagatttaagctccagcagtaaactaacagcaagcagaaagagcacaggacaactaaacatgaacccgggaaccaccagcggcaacaccgcaactgccgaacggagccggcatcaacgaagcttctctgtgcccaagaagtttggtgtcatcgaccgatcctctgacccacctcgaagtgccacactggacagaattcaggcttgtacccaacaaggcctctcctcaaaaaccagaagctcatcctccttgaaggacagtctcacggacccatcccacataaaccatcccaccaacctgctggccaccatattctgggtcacagtggccttgatggagtctgattttgagtttgaatacttaatggccttaaggctgttgagcagactactggcacatatgccactcgataaggctgagaaccgagaaaagcttgagaaactccaggcacagctgaagtgggccgacttctccgggctgcagcagctgctgctgaaaggattcacatccctcaccaccacagacctgaccctgcagctcttcagtctgctgacaccagtgtccaaaatatccatggtggatgcatcccacgctattgggtttccactgaatgtcttgtgtctcctgcctcagctgattcagcattttgaaaatcccaatcagttctgtaaggatatagccgaaaggattgctcaggtttgtttagaagagaagaaccccaaactttcaaatcttgcacatgtcatgactctttataaaacgcacagctacacgagggactgtgccacgtgggtcaatgtggtctgtcgataccttcatgaagcatatgctgacattaccttgaatatggttacctacctggcagagctgctggagaagggcctccctagtgtgcagcagcccctgctccaggtgatctacagtcttctcagctacatggacctttctgtcgttcctgtcaaacagttcaatgtggaagttctgaagacaattgaaaaatatgtgcaaagtgttcactggagagaagctctgaatatcttgaagctggtagtttctcggtcagccagccttgttttaccttcataccagcacagtgacctctcaaaaatagaaatacatcgagtgtggactagtgcttccaaggaattacctgggaaaaccctggacttccacttcgatatttcggagactccaatcatcgggaggcggtatgatgagctgcagaattcttctgggcgtgatgggaagcccagggccatggccgtcacccggagcacatcttccacttcctcaggctccaactccaacgtccttgttccagtgagctggaaaaggccccagtattctcagaagagaacaaaagagaagttggtacatgtcctttctctgtgtggccaagaagtaggattgagcaaaaatccatcagtgattttttcatcgtgtggggatctggatctgcttgagcaccagacaagcttggtatcttctgaggacggtgcccgagagcaggagaacatggatgacacaaacagcgagcagcagtttagagtcttcagagacttcgacttcctagatgtggagctggaggatggagagggtgagagtatggacaatttcaactggggagtgcgcagacgttctctggacagcctggataagtgtgatatgcagattctggaggagcgccaactgtcaggaagcactcctagcctgaataaaatgcaccatgaggactccgatgaatcatccgaggaggaggacctcacagccagccagatcctggagcactcagacctaatcatgactctctccccctctgaagagacgaatcccatggagctgctcaccacagcctgtgactcgacccctgcagaacctcattcctttaacaccagaatgtccagctttgatgcttccttgcctgatatgaataatctgcagatttctgagggttcaaaggctgaagctgttcgtgaggaggaggacaccaccgtgcatgaggatgatctttctagttccatcaatgaactcccagcagcttttgaatgcagcgacagctttagcctggacatgactgagggggaagaaaaaggcaatcgggcactggaccagtttaccctggcgagctttggagaaggtgacaggggagtctctccccctccctcgcccttcttctcagccatccttgccgcctttcagcccgcagcctgtgacgatgccgaggaggcctggcgcagccacatcaaccagcttatgtgtgactcagatggctcctgtgctgtgtatacatttcatgtgttctcctccttgtttaagaatattcagaaaaggttctgcttcctaacctgtgatgcagccagttaccttggagataacctccggggaatcggatccaaatttgtcagctcttcccagatgctcacctcctgctctcctttcatgtggacttctggacaagctcaagttcagtgtgttagaactgcaagaatatttggatacctacaacaacaggaaagaggccacactctcttggcttgcaaattgtaaggcaacatttgcagggggatcaagagatggagtaattacctgtcaaccaggggactccgaagaaaaggtaataaaagcctgttagaatgggtctcttgtgtgctctaacattgtgtattagttttggtctacccaagaagcctggaacttgagaaaagaagaggcggaatgagtcaccccaaacatttacatgaaaccaacagagtaagacagaatgccttccagcatgactgtgtgttgatgggatttgtggggaggtttcttcgttttggaaaagtagaggtataaaataaccttttttgctggatactgtctaactatactaataatttcctaataaatttattcttaattcagaaaataagg

SEQ ID NO: 281508 - DNA, 203 bp, Homo sapiens
cagatgggcatggtcttcctccaggttctctgcaagccacaaaactgagcagtgcccctcctcttttagccaccacctgttcgcttggtgcatattgatgaaaatagccattttctgttgagtttatattttaacactttcattttgtgttcttgtttttactacaggaacgtttagattttgcaatgaaagaaatcattttc

SEQ ID NO: 281509 - DNA, 927 bp, Homo sapiens
agttgtgtttatttcagggacagacacaaggggaagcagcagccagagcacacccgggccgctcacgggaagccttgctgaagagagaggatccgcagaagctgggaaattcctcccgcagcctaggcggagactgagccgcggctcaggttgagacagtgggcaggggcagggggcggcgctcccggcccatcccttagccccgcggcggccgtgtgggccggaggctgcctgcaccgcgtcagggaggccggcctagaaaccctccctcccagaagaaagccgatcccagttcaggtggggtcttcctcggttgcgtacctggctggagccgagctggtgggcggccggcagccggcgtttctggtgatgacagccccgaaatgaaagcagcgcggccgccgcctccgagggctgcagggagatcagcgtccagcaaataagaagcaagtcctggacccggaggaggaggagcggccgagcatctctctctgctccgccgtgtcctttagatgagcactcccggccggagccggaggtggatccgcagagctgcctctgggcgcctgaccccgcgctgacatcacaacctgtgacaggcgcatcacgcccggtacctgctcccggccgctgcccgtcctcccagcctctttgtatgccgcagacatggccagccagcaggattcgggcttctttgagatcagtatcaaatatttactgaaatcctggagtaatatgcggtgccttctggaaaccatccaccatttgcacactaccccagtgcagaagatttagcaagtaaccagttcctggaaacgcgaatggcatttgtggaacaagataagacacaacttaacctcattttctttcatactaatgtctttcatttgatagatgccattcatcatattccttttaacattgctc

SEQ ID NO: 281510 - DNA, 3311 bp, Homo sapiens
actctaatcagttcagaaacagtggaacattttcctggctgctccagtttacacacacacacacatacacacacacacacaggtagtatacagtcttcatccattaaaaagcagcgacgtgattcttgaacattttcctggtgcatgaacttgcgtctttgccacgagtttaatctgaaggcacctgtccaacataaataataaaagaacattctaaaaatacccactgaaggaattaggtgtgtactggaaatacggtgctatgaagagccaattacaatttttcgtagcacaaacaaccaaagggagaacggtttctcaggagaggactcttgattcgcaggtgattttttcatcgtgtggggatctggatctgcttgagcaccagacaagcttggtatcttctgaggacggtgcccgagagcaggagaacatggatgacacaaacagcgagcagcagtttagagtcttcagagacttcgacttcctagatgtggagctggaggatggagagggtgagagtatggacaatttcaactggggagtgcgcagacgttctctggacagcctggataagtgtgatatgcagattctggaggagcgccaactgtcaggaagcactcctagcctgaataaaatgcaccatgaggactccgatgaatcatccgaggaggaggacctcacagccagccagatcctggagcactcagacctaatcatgactctctccccctctgaagagacgaatcccatggagctgctcaccacagcctgtgactcgacccctgcagaacctcattcctttaacaccagaatgtccagctttgatgcttccttgcctgatatgaataatctgcagatttctgagggttcaaaggctgaagctgttcgtgaggaggaggacaccaccgtgcatgaggatgatctttctagttccatcaatgaactcccagcagcttttgaatgcagcgacagctttagcctggacatgactgagggggaagaaaaaggcaatcgggcactggaccagtttaccctggcgagctttggagaaggtgacaggggagtctctccccctccctcgcccttcttctcagccatccttgccgcctttcagcccgcagcctgtgacgatgccgaggaggcctggcgcagccacatcaaccagcttatgtgtgactcagatggctcctgtgctgtgtatacatttcatgtgttctcctccttgtttaagaatattcagaaaaggttctgcttcctaacctgtgatgcagccagttaccttggagataacctccggggaatcggatccaaatttgtcagctcttcccagatgctcacctcctgctctgaatgtcctacactttttgtggatgccgagactctcctttcatgtggacttctggacaagctcaagttcagtgtgttagaactgcaagaatatttggatacctacaacaacaggaaagaggccacactctcttggcttgcaaattgtaaggcaacatttgcagggggatcaagagatggagtaattacctgtcaaccaggggactccgaagaaaaggtacaattggaactgtgtcagagattatataagctacacttccagctgctattgctttttcagtcctactgtaagctcatcggccaggtgcacgaagttagctccatgccagagctgctgaatatgtccagggaactgagtgacctaaagaaacacctgaaggaagccagtgcagtcattgcagctgaccctctctattcagacggcgcgtggtccgagcccaccttcacgtccactgaagcagccatccagtccatgctggagtgcctgaagaacaacgaactcggcaaagctttgcggcagatcagggagtgcagaagtctgtggcccaatgacatctttggaagcagttctgatgatgaggtccagacactactgaatatttatttccgtcaccaaactctgggacagacgggtacttatgccctggtggggtctaaccagagcctgaccgagatctgcaccaagctgatggagctgaacatggagatccgggacatgatccgcagggcccagagttaccgagtcctcactacttttcttccagactccagtgtttctggcactagtctctgacaggagcctcctgtccccactgggttccaaactggcagtgctgccatgctggggcaacgtcattcagtgtcttctcggccttcaaaaggcttggacagactgttctccctcttgttacctgtagggctttttctaaagaggatggcagaacttccaacgtgtagcaatactataagaaccaaggtagcttagaacgtcctggacagactccactcatcatgctgtgtggcacaaatgtgttacatttgaccgagcatatgcaactcgctactgaagaagtgacttccgttgcataccaaagccgactacactgaacagtaccttcctttctagaaacaattttagattggcaaaagtgcaatgttttcttcactcaaaaaattttatattctcaaacatgtatattctttccctgtcttgttccattttcttttcttttttcttttttctttttcctttctttcgtgggctgagaaaggggcaggcaaaatgaagctggccactgaaaactgtaagatggtcaaaagctgacagcctgtgtatgtgaaaagggaattgtaaatggactgcaatgtaatgtacactgtaatttgaatacaattactgtatctaaaaggagctgctatgaagtacctttcttatgttgctaggctactgtttctgaaagccctggatctctttgcaccaaaaatggtccagatagactctttttaaggatcttggctgctttttactagaaggttgcttttatgagcatatttatactgctgaaggatgagtgttaattttaattaactttgccgttttgtagagaaaactattcacaagataaattccaagtcttttcacctgtcaggcatgcatattttaatatctgtttggatagtcagaagtagaatcataaaggtaaaatatgagttgttactttgtttcttcgatgtcatattttatgtgtaatatatatgtaaagggccattcttaagttctctccttaaacttaatgctgtcaagtgttagatgtgtgcatgtgaacttgttgcactgcagaaacatattcagagtttatctatgtaacttattcactctgtaaatacatttaaagtttttgtgatgtaagcttaattgatattctgttcagaactttctttagactaaaaaaaaaaaaaaa

SEQ ID NO: 281511 - DNA, 3136 bp, Homo sapiens
actctaatcagttcagaaacagtggaacattttcctggctgctccagtttacacacacacacacatacacacacacacacaggtagtatacagtcttcatccattaaaaagcagcgacgtgattcttgaacattttcctggtgcatgaacttgcgtctttgccacgagtttaatctgaaggcacctgtccaacataaataataaaagaacattctaaaaatacccactgaaggaattaggtgtgtactggaaatacggtgctatgaagagccaattacaatttttcgtagcacaaacaaccaaagggagaacggtttctcaggagaggactcttgattcgcaggtgattttttcatcgtgtggggatctggatctgcttgagcaccagacaacctggataagtgtgatatgcagattctggaggagcgccaactgtcaggaagcactcctagcctgaataaaatgcaccatgaggactccgatgaatcatccgaggaggaggacctcacagccagccagatcctggagcactcagacctaatcatgactctctccccctctgaagagacgaatcccatggagctgctcaccacagcctgtgactcgacccctgcagaacctcattcctttaacaccagaatgtccagctttgatgcttccttgcctgatatgaataatctgcagatttctgagggttcaaaggctgaagctgttcgtgaggaggaggacaccaccgtgcatgaggatgatctttctagttccatcaatgaactcccagcagcttttgaatgcagcgacagctttagcctggacatgactgagggggaagaaaaaggcaatcgggcactggaccagtttaccctggcgagctttggagaaggtgacaggggagtctctccccctccctcgcccttcttctcagccatccttgccgcctttcagcccgcagcctgtgacgatgccgaggaggcctggcgcagccacatcaaccagcttatgtgtgactcagatggctcctgtgctgtgtatacatttcatgtgttctcctccttgtttaagaatattcagaaaaggttctgcttcctaacctgtgatgcagccagttaccttggagataacctccggggaatcggatccaaatttgtcagctcttcccagatgctcacctcctgctctgaatgtcctacactttttgtggatgccgagactctcctttcatgtggacttctggacaagctcaagttcagtgtgttagaactgcaagaatatttggatacctacaacaacaggaaagaggccacactctcttggcttgcaaattgtaaggcaacatttgcagggggatcaagagatggagtaattacctgtcaaccaggggactccgaagaaaaggtacaattggaactgtgtcagagattatataagctacacttccagctgctattgctttttcagtcctactgtaagctcatcggccaggtgcacgaagttagctccatgccagagctgctgaatatgtccagggaactgagtgacctaaagaaacacctgaaggaagccagtgcagtcattgcagctgaccctctctattcagacggcgcgtggtccgagcccaccttcacgtccactgaagcagccatccagtccatgctggagtgcctgaagaacaacgaactcggcaaagctttgcggcagatcagggagtgcagaagtctgtggcccaatgacatctttggaagcagttctgatgatgaggtccagacactactgaatatttatttccgtcaccaaactctgggacagacgggtacttatgccctggtggggtctaaccagagcctgaccgagatctgcaccaagctgatggagctgaacatggagatccgggacatgatccgcagggcccagagttaccgagtcctcactacttttcttccagactccagtgtttctggcactagtctctgacaggagcctcctgtccccactgggttccaaactggcagtgctgccatgctggggcaacgtcattcagtgtcttctcggccttcaaaaggcttggacagactgttctccctcttgttacctgtagggctttttctaaagaggatggcagaacttccaacgtgtagcaatactataagaaccaaggtagcttagaacgtcctggacagactccactcatcatgctgtgtggcacaaatgtgttacatttgaccgagcatatgcaactcgctactgaagaagtgacttccgttgcataccaaagccgactacactgaacagtaccttcctttctagaaacaattttagattggcaaaagtgcaatgttttcttcactcaaaaaattttatattctcaaacatgtatattctttccctgtcttgttccattttcttttcttttttcttttttctttttcctttctttcgtgggctgagaaaggggcaggcaaaatgaagctggccactgaaaactgtaagatggtcaaaagctgacagcctgtgtatgtgaaaagggaattgtaaatggactgcaatgtaatgtacactgtaatttgaatacaattactgtatctaaaaggagctgctatgaagtacctttcttatgttgctaggctactgtttctgaaagccctggatctctttgcaccaaaaatggtccagatagactctttttaaggatcttggctgctttttactagaaggttgcttttatgagcatatttatactgctgaaggatgagtgttaattttaattaactttgccgttttgtagagaaaactattcacaagataaattccaagtcttttcacctgtcaggcatgcatattttaatatctgtttggatagtcagaagtagaatcataaaggtaaaatatgagttgttactttgtttcttcgatgtcatattttatgtgtaatatatatgtaaagggccattcttaagttctctccttaaacttaatgctgtcaagtgttagatgtgtgcatgtgaacttgttgcactgcagaaacatattcagagtttatctatgtaacttattcactctgtaaatacatttaaagtttttgtgatgtaagcttaattgatattctgttcagaactttctttagactaaaaaaaaaaaaaaa

SEQ ID NO: 281512 - DNA, 9434 bp, Homo sapiens
  misc_feature (951)..(951): n is a, c, g, or t
  misc_feature (4623)..(4623): n is a, c, g, or t
agttgtgtttatttcagggacagacacaaggggaagcagcagccagagcacacccgggccgctcacgggaagccttgctgaagagagaggatccgcagaagctgggaaattcctcccgcagcctaggcggagactgagccgcggctcaggttgagacagtgggcaggggcagggggcggcgctcccggcccatcccttagccccgcggcggccgtgtgggccggaggctgcctgcaccgcgtcagggaggccggcctagaaaccctccctcccagaagaaagccgatcccagttcaggtggggtcttcctcggttgcgtacctggctggagccgagctggtgggcggccggcagccggcgtttctggtgatgacagccccgaaatgaaagcagcgcggccgccgcctccgagggctgcagggagatcagcgtccagcaaataagaagcaagtcctggacccggaggaggaggagcggccgagcatctctctctgctccgccgtgtcctttagatgagcactcccggccggagccggaggtggatccgcagagctgcctctgggcgcctgaccccgcgctgacatcacaacctgtgacaggcgcatcacgcccggtacctgctcccggccgctgcccgtcctcccagcctctttgtatgccgcagacatggccagccagcaggattcgggcttctttgagatcagtatcaaatatttactgaaatcctggagtaatacttctcccgttggcaacggttacatcaagcctccggttccacctgcttctggcacgcacagggagaaagggccgccaaccatgctacccatcaatgtggacccagacagtaaaccaggagaatatgtcctcaaaagtttatttgtcaacttcaccactcaggctgaacgcaagattcgtatcattatggcagagcccctggaaaagccattgacnaaatctctgcaacgtggagaagacccccaatttgatcaggtcatcagctcaatgagctccctttctgagtactgcctgccttccattctacgtacattatttgactggtataaaaggcaaaatggcattgaggatgaatcacatgaatacagaccaagaacaagcaataaatcaaaaagcgatgaacaacagcgagattatttaatggaaagacgggacctcgccattgattttattttttctttagtattaatagaagttttgaaacagattccacttcatcctgtaatagacagtttaatacatgatgttattaacttggctttcaagcactttaaatacaaagaagggtaccttggtcccaacactggcaatatgcatattgtggcagacctgtatgcagaagtcattggagtgttggcacaagccaaattccctgctgtaaagaagaaatttatggcggagctaaaagaattacggcacaaagagcagaacccatatgtggttcaaagcattatcagcttaataatgggcatgaaattctttcgaattaagatgtatccagtggaggattttgaggcctctcttcagtttatgcaggaatgtgcacattacttcctcgaggtcaaagacaaagatatcaagcatgccttggctgggctttttgttgaaatacttgttccagttgctgctgctgttaaaaatgaagtaaatgttccctgccttagaaattttgtggaaagcctgtatgacaccacgctggaactttcttctcgaaagaagcattccttggccttgtaccccctggtgacctgtttgctctgtgtcagtcagaagcagctgttcctgaacaggtggcacattttcctcaacaactgcttgtccaaccttaaaaacaaagatcccaagatggctcgagttgcactggaatctctctacagattactttgggtttacatgattcgaattaaatgtgaaagcaacacagctactcagagccgacttataaccatcatcacaacacttttccccaaagggtcccgcggtgtggtaccaagggacatgcctctgaacatctttgtgaaaatcatccagttcattgcccaggaacgtttagattttgcaatgaaagaaatcattttcgattttctttgtgtgggaaaaccagcaaaagcattcagtctcaacccagagagaatgaacattggtttacgggcattcttggtcatagctgatagcttgcagcagaaagatggggaacctcccatgccggttacaggagccgttcttccttcaggaaacacgttaagagtaaagaaaacatatttgagtaaaacactaactgaagaggaagccaaaatgataggcatgtccttatattactctcaagtacgaaaagctgtagacaacattttaaggcaccttgataaagaagtaggaaggtgtatgatgctgactaatgtacagatgttaaacaaagaaccggaagacatgatcacgggtgagagaaagccaaaaatagatcttttcaggacctgtgttgctgctattcctcgactgcttcctgatgggatgtcaaaacttgaacttattgacttactggctaggctctctattcatatggatgatgaattgcgacatattgcacaaaattctcttcagggtttacttgttgacttctcagattggagggaagatgtactatttggctttaccaacttcctgctccgggaagtaaatgatatgcatcacacactccttgattcgtccctgaagttgctgctgcagctgctcacccagtggaaactagtcatccagacacaaggaaaagtctatgaacaagccaacaaaatcagaaattcagagctcatcgcaaatggctccagtcacagaattcagtcggaacgaggtccccactgcagtgtactccacgctgtagaaggttttgctctggttttactctgcagtttccaggtggccacacgcaaactgtccgttttaatactcaaggaaattcgagcgttgtttattgccctggggcagcctgaggatgacgacaggccgatgattgatgtcatggatcagctaagttcttccattctagaaagttttattcatgtagcagtttcggattcagcaacattaccactcacccacaatgtggatctgcagtggttggtggaatggaacgcagtcctggtcaatagccattatgatgtgaaaagcccttcccatgtctggatatttgcacagtctgtcaaagacccctgggtcctctgcctcttcagcttcctccggcaggagaacttacccaagcactgccccacagccctcagctatgcctggccttatgccttcactcggctccagtcggtgatgcctctggtggacccaaatagcccaattaatgccaagaaaaccagcactgccggcagcggagacaactatgttactttgtggagaaattacctaattctttgttttggagttgcaaaacccagtattatgagcccaggacacttaagagcttccactccagaaataatggcgaccacacctgatggtacagtgagctacgataacaaggccataggcaccccatcggtgggagttctgttaaagcagttggtgcctttgatgagactagagagcattgagatcacagagtccttagttttaggatttggaagaacaaattcccttgttttcagagaattggtagaagaacttcatccattaatgaaagaagctctggaaagaagaccagagaacaagaaacgccgagaacggcgagacttgttaaggctacaactacttcgaatttttgaacttttggctgatgctggtgtaataagtgacagcacaaatggagccctagagcgggatactttagccctgggagctttgttcttagaatatgtggacttgacccgcatgctcctagaagctgaaaatgacaaagaagttgaaattcttaaagatatccgggcacattttagtgcaatggtggccaacttgattcagtgtgttccagttcaccaccgaagatttctcttcccccagcaaagtctgaggcaccaccttttcatcttattcagccagtgggcaggacccttcagcattatgttcactcctctggatcgttacagtgacagaaatcatcagattacaagatatcagtattgtgcattaaaagcaatgtcagcagtactgtgctgtggccctgtctttgacaatgtgggcctttccccagatggctacctatataaatggcttgacaacattctggcttgtcaagatttacgagttcatcaacttggctgcgaagttgttgtcttgctactggaacttaatcctgaccaaataaatctttttaactgggcaattgaccgatgctacacaggttcctaccaacttgcatctggctgcttcaaagccatagcaactgtgtgtggaagcaggaactatcccttcgacatagtgacattgttaaaccttgttctattcaaggcctctgacaccaacagagagatttatgaaatctccatgcagctcatgcagatccttgaagcaaagctttttgtatactcaaagaaagtcgctgagcaaagaccgggaagtattctctatggaacacacggcccgctgccacccctctacagcgtgtcactngccctcttgtcatgtgagctggccaggatgtaccctgagctcacactccccctcttctcagaggtaagccagcgattccccacaacacaccccaacgggcgccagatcatgcttacctacctgctgccctggctgcacaacatcgagctggtggacagcaggctcctcctcccggggtcgagccccagcagcccagaggacgaagtcaaggaccgggaaggtgacgtgactgcttctcacgggctgagaggaaatggctggggctctccagaagccacgtcactggtcctgaacaacctcatgtacatgacggccaagtatggagatgaagttcctgggccagaaatggaaaatgcttggaatgctttagccaacaatgagaaatggagcaacaacctgaggatcaccttgcagttcctgattagcctctgtggggtcagcagcgacacagttctcctaccctatattaaaaaagtggcaatatacttgtgccgtaacaacaccattcaaaccatggaagagcttctctttgagctgcagcagacagaacccgtgaaccccatcgtccagcattgtgacaacccgcccttctaccgcttcacggccagtagcaaggcttccgcagcagcctcaggaaccacctctagcagcaatacagtggttgctggccaggaaaatttcccagatgctgaggagaacaagatattgaaagaatctgatgaaaggtttagtaatgtcatcagagcccacactcgcctcgagtcaagatacagcaatagctctggaggatcctacgatgaagataaaaatgatccaatttctccctacacgggctggttgctgactattacagagaccaagcagccgcagcccttaccgatgccttgtactggaggatgctgggcccccctggttgactatctcccggagaccatcactccccgggggccactccacaggtgcaatattgctgtaatttttatgactgaaatggtggtggatcacagtgtacgagaagactgggcgcttcatctaccattattacttcatgctgtcttcttaggtttagaccactaccggcctgaagtctttgaacacagcaaaaaactgcttcttcacctcttgattgccctctcttgcaacagcaatttccattccattgcttccgtgctcctgcagacccgagagatgggtgaagctaagactctaaccgtgcagccagcctaccaacctgaatatctctatacaggtggctttgacttcctgagagaggaccagtcatccccggtgcctgactcagggcttagttcaagctccacctcctctagcatcagtctgggaggcagcagtggaaacctcccacagatgacccaggaggtagaagatgtggacacagctgctgaaacagatgagaaggcaaacaagctcattgagtttctcacgaccagggcatttggtccactttggtgccatgaagacatcacacctaaaaatcaaaattcaaagagtgctgaacagctcactaattttctacgtcacgttgtatctgtatttaaagattccaaatcaggcttccatctggagcaccagttgagtgaagttgcattgcagacagccctcgcaagctcttcaaggcactatgctggtcggtccttccagatattccgggccctcaagcaacctctgtcagcacatgccttatctgaccttctctcaagattggtggaggtgataggagaacatggagatgagattcagggttatgtaatggaagcgctcctaaccttggaggcggctgtggataacttgtctgactgcttgaagaacagtgacctcctaactgtattgtcccgctcttcctcaccagatttaagctccagcagtaaactaacagcaagcagaaagagcacaggacaactaaacatgaacccgggaaccaccagcggcaacaccgcaactgccgaacggagccggcatcaacgaagcttctctgtgcccaagaagtttggtgtcatcgaccgatcctctgacccacctcgaagtgccacactggacagaattcaggcttgtacccaacaaggcctctcctcaaaaaccagaagctcatcctccttgaaggacagtctcacggacccatcccacataaaccatcccaccaacctgctggccaccatattctgggtcacagtggccttgatggagtctgattttgagtttgaatacttaatggccttaaggctgttgagcagactactggcacatatgccactcgataaggctgagaaccgagaaaagcttgagaaactccaggcacagctgaagtgggccgacttctccgggctgcagcagctgctgctgaaaggattcacatccctcaccaccacagacctgaccctgcagctcttcagtctgctgacaccagtgtccaaaatatccatggtggatgcatcccacgctattgggtttccactgaatgtcttgtgtctcctgcctcagctgattcagcattttgaaaatcccaatcagttctgtaaggatatagccgaaaggattgctcaggtttgtttagaagagaagaaccccaaactttcaaatcttgcacatgtcatgactctttataaaacgcacagctacacgagggactgtgccacgtgggtcaatgtggtctgtcgataccttcatgaagcatatgctgacattaccttgaatatggttacctacctggcagagctgctggagaagggcctccctagtgtgcagcagcccctgctccaggtgatctacagtcttctcagctacatggacctttctgtcgttcctgtcaaacagttcaatgtggaagttctgaagacaattgaaaaatatgtgcaaagtgttcactggagagaagctctgaatatcttgaagctggtagtttctcggtcagccagccttgttttaccttcataccagcacagtgacctctcaaaaatagaaatacatcgagtgtggactagtgcttccaaggaattacctgggaaaaccctggacttccacttcgatatttcggagactccaatcatcgggaggcggtatgatgagctgcagaattcttctgggcgtgatgggaagcccagggccatggccgtcacccggagcacatcttccacttcctcaggctccaactccaacgtccttgttccagtgagctggaaaaggccccagtattctcagaagagaacaaaagagaagttggtacatgtcctttctctgtgtggccaagaagtaggattgagcaaaaatccatcagtgattttttcatcgtgtggggatctggatctgcttgagcaccagacaagcttggtatcttctgaggacggtgcccgagagcaggagaacatggatgacacaaacagcgagcagcagtttagagtcttcagagacttcgacttcctagatgtggagctggaggatggagagggtgagagtatggacaatttcaactggggagtgcgcagacgttctctggacagcctggataagtgtgatatgcagattctggaggagcgccaactgtcaggaagcactcctagcctgaataaaatgcaccatgaggactccgatgaatcatccgaggaggaggacctcacagccagccagatcctggagcactcagacctaatcatgactctctccccctctgaagagacgaatcccatggagctgctcaccacagcctgtgactcgacccctgcagaacctcattcctttaacaccagaatgtccagctttgatgcttccttgcctgatatgaataatctgcagatttctgagggttcaaaggctgaagctgttcgtgaggaggaggacaccaccgtgcatgaggatgatctttctagttccatcaatgaactcccagcagcttttgaatgcagcgacagctttagcctggacatgactgagggggaagaaaaaggcaatcgggcactggaccagtttaccctggcgagctttggagaaggtgacaggggagtctctccccctccctcgcccttcttctcagccatccttgccgcctttcagcccgcagcctgtgacgatgccgaggaggcctggcgcagccacatcaaccagcttatgtgtgactcagatggctcctgtgctgtgtatacatttcatgtgttctcctccttgtttaagaatattcagaaaaggttctgcttcctaacctgtgatgcagccagttaccttggagataacctccggggaatcggatccaaatttgtcagctcttcccagatgctcacctcctgctctgaatgtcctacactttttgtggatgccgagactctcctttcatgtggacttctggacaagctcaagttcagtgtgttagaactgcaagaatatttggatacctacaacaacaggaaagaggccacactctcttggcttgcaaattgtaaggcaacatttgcagggggatcaagagatggagtaattacctgtcaaccaggggactccgaagaaaaggtaataaaagcctgttagaatgggtctcttgtgtgctctaacattgtgtattagttttggtctacccaagaagcctggaacttgagaaaagaagaggcggaatgagtcaccccaaacatttacatgaaaccaacagagtaagacagaatgccttccagcatgactgtgtgttgatgggatttgtggggaggtttcttcgttttggaaaagtagaggtataaaataaccttttttgctggatactgtctaactatactaataatttcctaataaatttattcttaattcagaaaataagg

SEQ ID NO: 281513 - DNA, 513 bp, Homo sapiens
cagctgactctccagcagggcccggagaggattgggacagacctagcatcacggcggaactcccaagcctcaggttcagagtcacagaggagtatacagctgggagccagtgaacctgagggaggccatggaaaagacaaggacttccctctcctgctgacccaaaggcccatcttccgaattctggaacccccttttcatcaggcgctgcccatgtcgatcatcttgatgacatcatcagcagagttaaccagatgctcctgcagccccaccacttgcacctgttgcttgccgtcctccagcacgcgcagcttggccttcttgttgagcaggtcaaacagctgtgccaggcagggggaatgaggctaaggccactgggcacccggcaccccacccgactgcttcctcctactagcctgcccagctcggacaagagccagcagcaggaaaggcagagaatacgaactgatggatgtcagcctagcagaggtcaatatacttgggatctgagcc

SEQ ID NO: 281514 - DNA, 496 bp, Homo sapiens
gcaaaaggtcaagacatacaaactcagagtttttaaaatcaagaattgaaagtggtccactagcttctgttcataggacattgagccccagatttggcacatgaccgtcacccactcggaacatgaagcacagcttgccatttcggacggcaatcacagcatggcggctgaaaatcaaagtttctgcccttctgtgagcctgagctgttttcatgaaaatgcagcctaacatgactgcattgatgatcaaacccacaatattctggagaatcaaaaccgtgatggccaaagggcattcctctgtcatcatcctccctccaaacccaatggtaacttgaacttcaatggagaagagaaaagcagaagtgaaagacctgtgaggaatgatatcagaaaagaacaccatcaggtcacattttgaataatgaaatatgccaagctgagcttttcattttcttccaccaaagactattaaatgcttgcagaaagactagcc

SEQ ID NO: 281515 - DNA, 1339 bp, Homo sapiens
aatgcttccctgtctccttctgtactgtggaagctttgctcttttactctgcaataaatcttgctgctgctaactgtttgggtccacgctacctctataagctgtaacactcaccataaaggtcttacagcttcattcctgaagccagtgagaccacgaacccagcaggaggaacgaacaactccagacgcgctgccttaagagctgttaacactcaccgcaaggtctgcagcttcactcctgaagccagagagaccacgaacccagcaggaggaatgaacaactccagatgcgccgccttaagagctgtaacgctcaccgcgaaggtctgcagcctcactcctgagccagcgagaccacgaacccaccagaaggaagaaactccgaacacatccgaacctcggaaggaagaaactccaaacacatccaaacatcagaaggaacaaactctgcacacaccgcctttaagaactgtaacactcaccaccagggttcgcggcttcattcttgaagtcagtgagaccaagaagccaccaattccggacacaatatgaagggggaatctggaatatttcaagataaggtccaattcttccattgtctcgtaatccaatgcagagcatcatatcggatttgagaaaactcacgaagaccaaaagaacctccaacaatcagcaactaaaacaaagaaaggaaacatttaagcaaaacagaagaccagaattcaaattcagcctatctatagattgcttttctaaacaacaatagaggcacattatacaaaaattctatagattatttttcctggtgagtcaccattcatcttttagagtaaatgcagtatatactggctaggaaatcattatagcacatcattaccaaataccaaaatcgtcaccctatacctgtatttgaccttatgatttaaatgacatcataacaagcattgtattatctgactcttacaatagacctatttttgttttttgctaagaaaaaaacaaaaacaaaaacaaattcaacaaatgaggaaataaaagcacagccagctaaatgacttgtccattgttaacttaaattttgcccagggatgtctctgtaattccattgctatgcgatcttccttagtaagtaatgaaattgaaacctgatcaactgatcagaccatgtccaaataaggcagatgcctagctataaccaaccaagctatttctgtacttcactttcctgttttgtctatactcattgcccatattgcagaatggagctctctcaacttctggttctgagtgctgcctgattcatgaattttctttgttcaaataaactctataacatt

SEQ ID NO: 281516 - DNA, 773 bp, Homo sapiens
aatgcttccctgtctccttctgtactgtggaagctttgctcttttactctgcaataaatcttgctgctgctaactgtttgggtccacgctacctctataagctgtaacactcaccataaaggtcttacagcttcattcctgaagccagtgagaccacgaacccagcaggaggaacgaacaactccagacgcgctgccttaagagctgttaacactcaccgcaaggtctgcagcttcactcctgaagccagagagaccacgaacccagcaggaggaatgaacaactccagatgcgccgccttaagagctgtaacgctcaccgcgaaggtctgcagcctcactcctgagccagcgagaccacgaacccaccagaaggaagaaactccgaacacatccgaacctcggaaggaagaaactccaaacacatccaaacatcagaaggaacaaactctgcacacaccgcctttaagaactgtaacactcaccaccagggttcgcggcttcattcttgaagtcagtgagaccaagaagccaccaattccggacacaatatgaagggggaatctggaatatttcaagataaggtccaattcttccattgtctcgtaatccaatgcagagatgtgaaatgtaagatcatctgaaggagagctttggttcaagtcaaatgcatgcctcaacctagcagagccaaagagatacttgtatgatgtaagtcagattatgtcattcttctgctcaaaactctccaataaatagctcaccattcccttc

SEQ ID NO: 281517 - DNA, 977 bp, Homo sapiens
ctcggcgggccgggtctccagggaggacctgatttttcttcacccatagttagggaggcgcaatcgccctggctttggggctggggcctccggggaggttccggtaggggcgttggagaggccgctctttttgcaaggcccgagacggcgggccctgcgcaggccgccctattccgcgccctcagggcgtcagtatccgcctgaggccggataccccagctgggcccggatgccgtcgatgggcccggagcatcctcggcgctgccctcccagagccccgcagaggctgaggtggcgcggggggcgggcccggctccgcgagaagcagcggcagcgagggctggaggacccgggctacggggctctggggcgtctggcctgggtgggactgagcccattcggggggactccggggttctggtgtaggtagatccggggcaggctcaggaccaagtccctctccttccaccaaggagcgcccagaggccggcgggagctccaggttcacctcctcctcctccaggaaatcccacttccaactggatgtctggatgaactactgaaagctgctgagtgtcctgcagcagggtcggtggacctgggtgtctgtctggacacatcctccagtggcctggacctgcccatgaaggtggtggacatgttcaggagctgtttgcctgcgtgtgctgtgaacttcaagtgcttacatgagctggtgaaacatgaagaaaatggcctggtctttgaggactcagaggaactggcagctcagctgcagacggtaagggccatgtagaattgaggagcccgctggtgctcccggcaggcagccagcctccgcaggaccccgaccagcgacacgatggcttctgggcaatacagcacgtctacggtgaaagcttcaggttactgaaagggaccagcggacagttccaggtcatgctgacctcagcagaagggcgaggccagagaggcag

SEQ ID NO: 281518 - DNA, 901 bp, Homo sapiens
ctcggcgggccgggtctccagggaggacctgatttttcttcacccatagttagggaggcgcaatcgccctggctttggggctggggcctccggggaggttccggtaggggcgttggagaggccgctctttttgcaaggcccgagacggcgggccctgcgcaggccgccctattccgcgccctcagggcgtcagtatccgcctgaggccggataccccagctgggcccggatgccgtcgatgggcccggagcatcctcggcgctgccctcccagagccccgcagaggctgaggtggcgcggggggcgggcccggctccgcgagaagcagcggcagcgagggctggaggacccgggctacggggctctggggcgtctggcctgggtgggactgagcccattcggggggactccggggttctggtgtaggtagatccggggcaggctcaggaccaagtccctctccttccaccaaggagcgcccagaggccggcgggagctccaggttcacctcctcctcctccaggaaatcccacttccaactggatgtctggatgaactactgaaagctgctgagtgtcctgcagcagggtcggtggacctgggtgtctgtctggacacatcctccagtggcctggacctgcccatgaaggtggtggacatgttcaggagctgtttgcctgcgtgtgctgtgaacttcaagtgacggtaagggccatgtagaattgaggagcccgctggtgctcccggcaggcagccagcctccgcaggaccccgaccagcgacacgatggcttctgggcaatacagcacgtctacggtgaaagcttcaggttactgaaagggaccagcggacagttccaggtcatgctgacctcagcagaagggcgaggccagagaggcag

SEQ ID NO: 281519 - DNA, 352 bp, Homo sapiens
tcaaatcggtttggccattttgatgtgcacccccaggcctttatacccttcagatgccaaatctaagaaccagctcccagaaaccacacatcctgttccaacccccagcctggcttgagcgtgggtgggtgggagacaagctggacaccccaggggtctggtgtcttctccaggcagctctcaggctcccttggttctctctgcagcttacatgagctggtgaaacatgaagaaaatggcctggtctttgaggactcagaggaactggcagctcagctgcaggtagccatgtctgccaccacgccagggtgggcagggttctggagactggcaccgagccacaatccctgat

SEQ ID NO: 281520 - DNA, 761 bp, Homo sapiens
ggtacaacatttcctagggtaccgtcgtccacacagagttgtcgtgcattcatgttttggaccatgctaatgactgtagtgactggattatgttctaggtagattgtaagagtatgatcgaaggaattagaagaggagcggaacgcagaggggggaaacggggaagtagagacaggatgactagtggatgcttttggtgatgaataagagtgatgctatatcaaacacgagtacgctcttacgtgtaagcatcgaatttcattgattattatttcgaagctatttgcattttgtcattcaaacaggttatgaagttcatggaatggaaaaaataccagaagatggaccagcacttataattttttatcatggagctattcctatagatttttactatttcatggctaaaatatttatacacaaaggcagaacttgccgagtagtagctgatcactttgtctttaaaattccaggtaaactttcactgtagatagtaatgtaaaaatgttttattaacaaaaccaagttatgtggtcgtctctatcctgagctctctaacgtcatttgaaaaagctttttgccttttagggtgtgtataacactcttggaactctaatatgggaatatctaattatcctttttaggcaatatatctaaaaataaagacattgtggccaaaaatgttagctcattttttattttatacattttaaaattgtttatttttaagtgaaaattgtatttatggcatacaatataat

SEQ ID NO: 281521 - DNA, 1008 bp, Homo sapiens
gcggcccgggctggcagcctccgcttggcttctttcacacgggttgcttcggaggaatccgccgtgcaaatctgtccgcccccttggccactgatcccccgaagagcttctgtcgccgctctaggaatacagacattgaagtttgggacaagatatttatctaacttctgtgtcaaaattagcgacctgctatggcaatgaagaaagaaactgaatttgtcattttcacctgaagaaaaatgatagacaaaaatcaaacctgtggtgtaggacaggattctgtgccctatatgatttgtctgattcacatactcgaagaatggtttggtgtggagcagttggaggactatttgaattttgcaaactatctcttgtgggtttttacaccactaatacttttaatacttccttactttactatctttcttctctaccttactattattttcttacacatttataagagaaagaatgtattgaaagaagcctactctcataatttatgggatggtgcaaggaaaacagtggcaactctgtgggatggacatgcagccgtttggcatggtaagcaaggatactttcacctttgtgttgccattcatgtgtgctgcattggaactgtgttaccattccattttattgattgagaagatactgaaaaatataatagaagtgatatttactattccctgttacctgtttgcatgcattgtgcatatgtatgtgtctttcttaaaatgagttttcccatagacgttggtttccattaaacaaagaaccacgcagcactgtagactataagttgaaataagaaaatttatatttaaaacatctaaaagagtaagagactaaataaagctgtagaaaactgctttaaaaatgcttcaattatttagcatttacttctgttcaaaataagtttgactctaccagtgtggatttaaaaaaatgaaatattaaataatattacattaaatataatttgcataccaaaatttatgcattttc

SEQ ID NO: 281522 - DNA, 1051 bp, Homo sapiens
aaaacttaggctaggtacgaggccgggtgttgatttcacacgggttgcttcggaggaatccgccgtgcaaatctgtccgcccccttggccactgatcccccgaagagcttctgtcgccgctctagggtaaaggagagctgcccctgcccctgcccccgcctatccgagaatacagacattgaagtttgggacaagatatttatctaacttctgtgtcaaaattagcgacctgctatggcaatgaagaaagaaactgaatttgtcattttcacctgaagaaaaatgatagacaaaaatcaaacctgtggtgtaggacaggattctgtgccctatatgatttgtctgattcacatactcgaagaatggtttggtgtggagcagttggaggactatttgaattttgcaaactatctcttgtgggtttttacaccactaatacttttaatacttccttactttactatctttcttctctaccttactattattttcttacacatttataagagaaagaatgtattgaaagaagcctactctcataatttatgggatggtgcaaggaaaacagtggcaactctgtgggatggacatgcagccgtttggcatggtaagcaaggatactttcacctttgtgttgccattcatgtgtgctgcattggaactgtgttaccattccattttattgattgagaagatactgaaaaatataatagaagtgatatttactattccctgttacctgtttgcatgcattgtgcatatgtatgtgtctttcttaaaatgagttttcccatagacgttggtttccattaaacaaagaaccacgcagcactgtagactataagttgaaataagaaaatttatatttaaaacatctaaaagagtaagagactaaataaagctgtagaaaactgctttaaaaatgcttcaattatttagcatttacttctgttcaaaataagtttgactctaccagtgtggatttaaaaaaatgaaatattaaataatattacattaaatataatttgcataccaaaatttatgcattttc

SEQ ID NO: 281523 - DNA, 1724 bp, Homo sapiens
  misc_feature (1322)..(1322): n is a, c, g, or t
  misc_feature (1325)..(1325): n is a, c, g, or t
  misc_feature (1330)..(1330): n is a, c, g, or t
  misc_feature (1351)..(1351): n is a, c, g, or t
gcggcccgggctggcagcctccgcttggcttctttcacacgggttgcttcggaggaatccgccgtgcaaatctgtccgcccccttggccactgatcccccgaagagcttctgtcgccgctctaggaatacagacattgaagtttgggacaagatatttatctaacttctgtgtcaaaattagcgacctgctatggcaatgaagaaagaaactgaatttgtcattttcacctgaagaaaaatgatagacaaaaatcaaacctgtggtgtaggacaggattctgtgccctatatgatttgtctgattcacatactcgaagaatggtttggtgtggagcagttggaggactatttgaattttgcaaactatctcttgtgggtttttacaccactaatacttttaatacttccttactttactatctttcttctctaccttactattattttcttacacatttataagagaaagaatgtattgaaagaagcctactctcataatttatgggatggtgcaaggaaaacagtggcaactctgtgggatggacatgcagccgtttggcatggttatgaagttcatggaatggaaaaaataccagaagatggaccagcacttataattttttatcatggagctattcctatagatttttactatttcatggctaaaatatttatacacaaaggcagaacttgccgagtagtagctgatcactttgtctttaaaattccagggtttagtttattactggatgtgttttgtgctctacatggaccaagagaaaaatgtgttgaaattctgaggagtggccacttgttagctatctcaccaggtggagttcgagaagccctaattagtgatgaaacttataacatcgtatggggtcatcgcagaggctttgctcaggttgcaattgatgcaaaagtgcccattattcctatgtttacacaaaatattcgagaaggatttagatcacttggaggaacaaggttatttaggtggctttatgaaaaattccgctatccatttgctccaatgtatggaggttttccagtgaagttacggacctatttaggcgaccccattccgtatgacccacagataacagcggaagaattagctgaaaagacgaagaatgctgttcaagctttgattgataagcaccaaagaataccaggaaacattatgagtgcttgttagaacgttttcattgataacaaagggtcaactagaagatgatttagtacatttatattaaatgttgtatctaaggtacgtcttctgaatttgtaggtcctataattagtatttttaaaaaaatcntgntaatnagcatctttcacagaattcgnttctttaaaatagtcaattttgtttttgcaattgtgtcaaatactaacaaattacacacctagtaattcagaaaaagatgtcttatttgtaaattcctaaacaaatttatgctaaaacatattagattcttaaggtttattaataacagcccgtttacgtttaacaaaacatttctggattaatgcgttaaattctggtatctggtggaccggagctggttttgaacgggagggctagcaggggtagggatacgctggtccaggttgaacaccggtgtgtgtggcccaatcctagacctgggcagcacgtatgtgtggggcccacccttttcaccccctgggagaggatgggaaatcggggacacggccccaa

SEQ ID NO: 281524 - DNA, 1016 bp, Homo sapiens
gcggcccgggctggcagcctccgcttggcttctttcacacgggttgcttcggaggaatccgccgtgcaaatctgtccgcccccttggccactgatcccccgaagagcttctgtcgccgctctaggaatacagacattgaagtttgggacaagatatttatctaacttctgtgtcaaaattagcgacctgctatggcaatgaagaaagaaactgaatttgtcattttcacctgaagaaaaatgatagacaaaaatcaaacctgtggtgtaggacaggattctgtgccctatatgatttgtctgattcacatactcgaagaatggtttggtgtggagcagttggaggactatttgaattttgcaaactatctcttgtgggtttttacaccactaatacttttaatacttccttactttactatctttcttctctaccttactattattttcttacacatttataagagaaagaatgtattgaaagaagcctactctcataatttatgggatggtgcaaggaaaacagtggcaactctgtgggatggacatgcagccgtttggcatggttatgaagttcatggaatggaaaaaataccagaagatggaccagcacttataattttttatcatggagctattcctatagatttttactatttcatggctaaaatatttatacacaaaggcagaacttgccgagtagtagctgatcactttgtctttaaaattccagggtttagtttattactggatgtgttttgtgctctacatggaccaagagaaaaatgtgttgaaattctgaggagtggccacttgttagctatctcaccaggtggagttcgagaagccctaattagtgatgaaacttataacatcgtatggggtcatcgcagaggctttgctcaggttgcaattgatgcaaaagtggtgagttatataaaattaattattgaagtaaagcttagtcaaatttaaaataaatggttaagtaatgagccaaattgtataagaacttag

SEQ ID NO: 281525 - DNA, 1767 bp, Homo sapiens
  misc_feature (1365)..(1365): n is a, c, g, or t
  misc_feature (1368)..(1368): n is a, c, g, or t
  misc_feature (1373)..(1373): n is a, c, g, or t
  misc_feature (1394)..(1394): n is a, c, g, or t
aaaacttaggctaggtacgaggccgggtgttgatttcacacgggttgcttcggaggaatccgccgtgcaaatctgtccgcccccttggccactgatcccccgaagagcttctgtcgccgctctagggtaaaggagagctgcccctgcccctgcccccgcctatccgagaatacagacattgaagtttgggacaagatatttatctaacttctgtgtcaaaattagcgacctgctatggcaatgaagaaagaaactgaatttgtcattttcacctgaagaaaaatgatagacaaaaatcaaacctgtggtgtaggacaggattctgtgccctatatgatttgtctgattcacatactcgaagaatggtttggtgtggagcagttggaggactatttgaattttgcaaactatctcttgtgggtttttacaccactaatacttttaatacttccttactttactatctttcttctctaccttactattattttcttacacatttataagagaaagaatgtattgaaagaagcctactctcataatttatgggatggtgcaaggaaaacagtggcaactctgtgggatggacatgcagccgtttggcatggttatgaagttcatggaatggaaaaaataccagaagatggaccagcacttataattttttatcatggagctattcctatagatttttactatttcatggctaaaatatttatacacaaaggcagaacttgccgagtagtagctgatcactttgtctttaaaattccagggtttagtttattactggatgtgttttgtgctctacatggaccaagagaaaaatgtgttgaaattctgaggagtggccacttgttagctatctcaccaggtggagttcgagaagccctaattagtgatgaaacttataacatcgtatggggtcatcgcagaggctttgctcaggttgcaattgatgcaaaagtgcccattattcctatgtttacacaaaatattcgagaaggatttagatcacttggaggaacaaggttatttaggtggctttatgaaaaattccgctatccatttgctccaatgtatggaggttttccagtgaagttacggacctatttaggcgaccccattccgtatgacccacagataacagcggaagaattagctgaaaagacgaagaatgctgttcaagctttgattgataagcaccaaagaataccaggaaacattatgagtgcttgttagaacgttttcattgataacaaagggtcaactagaagatgatttagtacatttatattaaatgttgtatctaaggtacgtcttctgaatttgtaggtcctataattagtatttttaaaaaaatcntgntaatnagcatctttcacagaattcgnttctttaaaatagtcaattttgtttttgcaattgtgtcaaatactaacaaattacacacctagtaattcagaaaaagatgtcttatttgtaaattcctaaacaaatttatgctaaaacatattagattcttaaggtttattaataacagcccgtttacgtttaacaaaacatttctggattaatgcgttaaattctggtatctggtggaccggagctggttttgaacgggagggctagcaggggtagggatacgctggtccaggttgaacaccggtgtgtgtggcccaatcctagacctgggcagcacgtatgtgtggggcccacccttttcaccccctgggagaggatgggaaatcggggacacggccccaa

SEQ ID NO: 281526 - DNA, 1331 bp, Homo sapiens
  misc_feature (929)..(929): n is a, c, g, or t
  misc_feature (932)..(932): n is a, c, g, or t
  misc_feature (937)..(937): n is a, c, g, or t
  misc_feature (958)..(958): n is a, c, g, or t
aaaacttaggctaggtacgaggccgggtgttgatttcacacgggttgcttcggaggaatccgccgtgcaaatctgtccgcccccttggccactgatcccccgaagagcttctgtcgccgctctaggaatacagacattgaagtttgggacaagatatttatctaacttctggttatgaagttcatggaatggaaaaaataccagaagatggaccagcacttataattttttatcatggagctattcctatagatttttactatttcatggctaaaatatttatacacaaaggcagaacttgccgagtagtagctgatcactttgtctttaaaattccagggtttagtttattactggatgtgttttgtgctctacatggaccaagagaaaaatgtgttgaaattctgaggagtggccacttgttagctatctcaccaggtggagttcgagaagccctaattagtgatgaaacttataacatcgtatggggtcatcgcagaggctttgctcaggttgcaattgatgcaaaagtgcccattattcctatgtttacacaaaatattcgagaaggatttagatcacttggaggaacaaggttatttaggtggctttatgaaaaattccgctatccatttgctccaatgtatggaggttttccagtgaagttacggacctatttaggcgaccccattccgtatgacccacagataacagcggaagaattagctgaaaagacgaagaatgctgttcaagctttgattgataagcaccaaagaataccaggaaacattatgagtgcttgttagaacgttttcattgataacaaagggtcaactagaagatgatttagtacatttatattaaatgttgtatctaaggtacgtcttctgaatttgtaggtcctataattagtatttttaaaaaaatcntgntaatnagcatctttcacagaattcgnttctttaaaatagtcaattttgtttttgcaattgtgtcaaatactaacaaattacacacctagtaattcagaaaaagatgtcttatttgtaaattcctaaacaaatttatgctaaaacatattagattcttaaggtttattaataacagcccgtttacgtttaacaaaacatttctggattaatgcgttaaattctggtatctggtggaccggagctggttttgaacgggagggctagcaggggtagggatacgctggtccaggttgaacaccggtgtgtgtggcccaatcctagacctgggcagcacgtatgtgtggggcccacccttttcaccccctgggagaggatgggaaatcggggacacggccccaa

SEQ ID NO: 281527 - DNA, 1009 bp, Homo sapiens
aaaacttaggctaggtacgaggccgggtgttgatttcacacgggttgcttcggaggaatccgccgtgcaaatctgtccgcccccttggccactgatcccccgaagagcttctgtcgccgctctaggaatacagacattgaagtttgggacaagatatttatctaacttctgtgtcaaaattagcgacctgctatggcaatgaagaaagaaactgaatttgtcattttcacctgaagaaaaatgatagacaaaaatcaaacctgtggtgtaggacaggattctgtgccctatatgatttgtctgattcacatactcgaagaatggtttggtgtggagcagttggaggactatttgaattttgcaaactatctcttgtgggtttttacaccactaatacttttaatacttccttactttactatctttcttctctaccttactattattttcttacacatttataagagaaagaatgtattgaaagaagcctactctcataatttatgggatggtgcaaggaaaacagtggcaactctgtgggatggacatgcagccgtttggcatggtaagcaaggatactttcacctttgtgttgccattcatgtgtgctgcattggaactgtgttaccattccattttattgattgagaagatactgaaaaatataatagaagtgatatttactattccctgttacctgtttgcatgcattgtgcatatgtatgtgtctttcttaaaatgagttttcccatagacgttggtttccattaaacaaagaaccacgcagcactgtagactataagttgaaataagaaaatttatatttaaaacatctaaaagagtaagagactaaataaagctgtagaaaactgctttaaaaatgcttcaattatttagcatttacttctgttcaaaataagtttgactctaccagtgtggatttaaaaaaatgaaatattaaataatattacattaaatataatttgcataccaaaatttatgcattttc

SEQ ID NO: 281528 - DNA, 942 bp, Homo sapiens
atacgaccctggaggcggatacattccaggtcttgaagagcttctgtcgccgctctaggaatacagacattgaagtttgggacaagatatttatctaacttctgtgtcaaaattagcgacctgctatggcaatgaagaaagaaactgaatttgtcattttcacctgaagaaaaatgatagacaaaaatcaaacctgtggtgtaggacaggattctgtgccctatatgatttgtctgattcacatactcgaagaatggtttggtgtggagcagttggaggactatttgaattttgcaaactatctcttgtgggtttttacaccactaatacttttaatacttccttactttactatctttcttctctaccttactattattttcttacacatttataagagaaagaatgtattgaaagaagcctactctcataatttatgggatggtgcaaggaaaacagtggcaactctgtgggatggacatgcagccgtttggcatggtaagcaaggatactttcacctttgtgttgccattcatgtgtgctgcattggaactgtgttaccattccattttattgattgagaagatactgaaaaatataatagaagtgatatttactattccctgttacctgtttgcatgcattgtgcatatgtatgtgtctttcttaaaatgagttttcccatagacgttggtttccattaaacaaagaaccacgcagcactgtagactataagttgaaataagaaaatttatatttaaaacatctaaaagagtaagagactaaataaagctgtagaaaactgctttaaaaatgcttcaattatttagcatttacttctgttcaaaataagtttgactctaccagtgtggatttaaaaaaatgaaatattaaataatattacattaaatataatttgcataccaaaatttatgcattttc

SEQ ID NO: 281529 - DNA, 1662 bp, Homo sapiens
  misc_feature (1260)..(1260): n is a, c, g, or t
  misc_feature (1263)..(1263): n is a, c, g, or t
  misc_feature (1268)..(1268): n is a, c, g, or t
  misc_feature (1289)..(1289): n is a, c, g, or t
gcggcccgggctggcagcctccgcttggcttctttcacacgggttgcttcggaggaatccgccgtgcaaatctgtccgcccccttggccactgatcccccgaagagcttctgtcgccgctctaggaatacagacattgaagtttgggacaagatatttatctaacttctgtgtcaaaattagcgacctgctatggcaatgaagaaagaaactgaatttgtcattttcacctgaagaaaaatgatagacaaaaatcaaacctgtggtgtaggacaggattctgtgccctatatgatttgtctgattcacatactcgaagaatggtttggtgtggagcagttggaggactatttgaattttgcaaactatctcttgtgggtttttacaccactaatacttttaatacttccttactttactatctttcttctctaccttactattattttcttacacatttataagagaaagaatgtattgaaagaagcctactctcataatttatgggatggtgcaaggaaaacagtggcaactctgtgggatggacatgcagccgtttggcatggttatgaagttcatggaatggaaaaaataccagaagatggaccagcacttataattttttatcatggagctattcctatagatttttactatttcatggctaaaatatttatacacaaaggcagaacttgccgagtagtagctgatcactttgtctttaaaattccagggtttagtttattactggatgtgttttgtgctctacatggaccaagagaaaaatgtgttgaaattctgaggagtggccacttgttagctatctcaccaggtggagttcgagaagccctaattagtgatgaaacttataacatcgtatggggtcatcgcagaggctttgctcaggttgcaattgatgcaaaagtggttatttaggtggctttatgaaaaattccgctatccatttgctccaatgtatggaggttttccagtgaagttacggacctatttaggcgaccccattccgtatgacccacagataacagcggaagaattagctgaaaagacgaagaatgctgttcaagctttgattgataagcaccaaagaataccaggaaacattatgagtgcttgttagaacgttttcattgataacaaagggtcaactagaagatgatttagtacatttatattaaatgttgtatctaaggtacgtcttctgaatttgtaggtcctataattagtatttttaaaaaaatcntgntaatnagcatctttcacagaattcgnttctttaaaatagtcaattttgtttttgcaattgtgtcaaatactaacaaattacacacctagtaattcagaaaaagatgtcttatttgtaaattcctaaacaaatttatgctaaaacatattagattcttaaggtttattaataacagcccgtttacgtttaacaaaacatttctggattaatgcgttaaattctggtatctggtggaccggagctggttttgaacgggagggctagcaggggtagggatacgctggtccaggttgaacaccggtgtgtgtggcccaatcctagacctgggcagcacgtatgtgtggggcccacccttttcaccccctgggagaggatgggaaatcggggacacggccccaa

SEQ ID NO: 281530 - DNA, 1751 bp, Homo sapiens
  misc_feature (1349)..(1349): n is a, c, g, or t
  misc_feature (1352)..(1352): n is a, c, g, or t
  misc_feature (1357)..(1357): n is a, c, g, or t
  misc_feature (1378)..(1378): n is a, c, g, or t
atccccagtctcttcgcgggcaggctcggcttcccgccggcctcagtgttgcgccccagcgccagagtggccgggtgtggagatcctccctcctctgggtcaaagagcctgctctccccgcccctcttctcccctggcgctctaaaccttcgaatacagacattgaagtttgggacaagatatttatctaacttctgtgtcaaaattagcgacctgctatggcaatgaagaaagaaactgaatttgtcattttcacctgaagaaaaatgatagacaaaaatcaaacctgtggtgtaggacaggattctgtgccctatatgatttgtctgattcacatactcgaagaatggtttggtgtggagcagttggaggactatttgaattttgcaaactatctcttgtgggtttttacaccactaatacttttaatacttccttactttactatctttcttctctaccttactattattttcttacacatttataagagaaagaatgtattgaaagaagcctactctcataatttatgggatggtgcaaggaaaacagtggcaactctgtgggatggacatgcagccgtttggcatggttatgaagttcatggaatggaaaaaataccagaagatggaccagcacttataattttttatcatggagctattcctatagatttttactatttcatggctaaaatatttatacacaaaggcagaacttgccgagtagtagctgatcactttgtctttaaaattccagggtttagtttattactggatgtgttttgtgctctacatggaccaagagaaaaatgtgttgaaattctgaggagtggccacttgttagctatctcaccaggtggagttcgagaagccctaattagtgatgaaacttataacatcgtatggggtcatcgcagaggctttgctcaggttgcaattgatgcaaaagtgcccattattcctatgtttacacaaaatattcgagaaggatttagatcacttggaggaacaaggttatttaggtggctttatgaaaaattccgctatccatttgctccaatgtatggaggttttccagtgaagttacggacctatttaggcgaccccattccgtatgacccacagataacagcggaagaattagctgaaaagacgaagaatgctgttcaagctttgattgataagcaccaaagaataccaggaaacattatgagtgcttgttagaacgttttcattgataacaaagggtcaactagaagatgatttagtacatttatattaaatgttgtatctaaggtacgtcttctgaatttgtaggtcctataattagtatttttaaaaaaatcntgntaatnagcatctttcacagaattcgnttctttaaaatagtcaattttgtttttgcaattgtgtcaaatactaacaaattacacacctagtaattcagaaaaagatgtcttatttgtaaattcctaaacaaatttatgctaaaacatattagattcttaaggtttattaataacagcccgtttacgtttaacaaaacatttctggattaatgcgttaaattctggtatctggtggaccggagctggttttgaacgggagggctagcaggggtagggatacgctggtccaggttgaacaccggtgtgtgtggcccaatcctagacctgggcagcacgtatgtgtggggcccacccttttcaccccctgggagaggatgggaaatcggggacacggccccaa

SEQ ID NO: 281531 - DNA, 495 bp, Homo sapiens
gaggcagatggtaggaaatggagacggagaaatggcactaatggcccagccacctgagatgggatacctgggagggacatcttttcaagtagaggctgtgttggggcatggtgagagagggtcttagcaggtaaccttcctttcctctccagactgaggaatcagagttctgattgtggagtgcctctctctaggacggggctgcagcataggagtctcagctgcttacatccaggtccaggattatgtctgctaacagacgctggtgggtaccacctgacgatgaagactgtgtgtctgagaagctcctgaggaagactcgggaatctccactggtgcctataggtgctgtgtacacaatgtacagcgattacgtcaagaggatggcacaggatgctggagagaagtaggactcctataggagccggggctgtccaactcccctaactcaatccctggtacattcctaataaagcagttttgaggaaaatcaac

SEQ ID NO: 281532 - DNA, 509 bp, Homo sapiens
  misc_feature (1)..(1): n is a, c, g, or t
  misc_feature (12)..(12): n is a, c, g, or t
nattcggcacgnggtggggaagaggcagatgactgaggaatcagagttctgattgtggagtgcctctctctaggacggggctgcagcataggagtctcagctgcttacatccaggtccaggattatgtctgctaacagacgctggtgggtaccacctgacgatgaagactgtgtgtctgagaagctcctgaggaagactcgggaatctccactggtgcctataggcttaggaggctgcttggtggtagcagcatacaggatttaccggctgaggtctcgtggttccaccaagatgtccatacacctgattcacacccgagtggcagcgcaggcctgtgcagtgggtgcaatcatgctaggtgctgtgtacacaatgtacagcgattacgtcaagaggatggcacaggatgctggagagaagtaggactcctataggagccggggctgtccaactcccctaactcaatccctggtacattcctaataaagcagttttgaggaaaatcaac

SEQ ID NO: 281533 - DNA, 630 bp, Homo sapiens
gaggcagatggtaggaaatggagacggagaaatggcactaatggcccagccacctgagatgggatacctgggagggacatcttttcaagtagaggctgtgttggggcatggtgagagagggtcttagcaggtaaccttcctttcctctccagactgaggaatcagagttctgattgtggagtgcctctctctaggacggggctgcagcataggagtctcagctgcttacatccaggtccaggattatgtctgctaacagacgctggtgggtaccacctgacgatgaagactgtgtgtctgagaagctcctgaggaagactcgggaatctccactggtgcctataggcttaggaggctgcttggtggtagcagcatacaggatttaccggctgaggtctcgtggttccaccaagatgtccatacacctgattcacacccgagtggcagcgcaggcctgtgcagtgggtgcaatcatgctaggtgctgtgtacacaatgtacagcgattacgtcaagaggatggcacaggatgctggagagaagtaggactcctataggagccggggctgtccaactcccctaactcaatccctggtacattcctaataaagcagttttgaggaaaatcaac

SEQ ID NO: 281534 - DNA, 657 bp, Homo sapiens
  misc_feature (1)..(1): n is a, c, g, or t
  misc_feature (12)..(12): n is a, c, g, or t
nattcggcacgnggtggggaagaggcagatgactgaggaatcagagttctgattgtggagtgcctctctctaggacggggctgcagcataggagtctcagctgcttacatccaggtccaggattatgtctgctaacagacgctggtgggtaccacctgacgatgaagactgtgtgtctgagaagctcctgaggaagactcgggaatctccactggtgcctataggtcccccgcaacgcccaccccccgccaccagatgctgcataaaaccagctgtttatccagatgcccagcctgcctggtaaggtatctctcatcaggggagtgctgtgcattgtggctgtggcccaggggctgtgttctctgcccacaggcttaggaggctgcttggtggtagcagcatacaggatttaccggctgaggtctcgtggttccaccaagatgtccatacacctgattcacacccgagtggcagcgcaggcctgtgcagtgggtgcaatcatgctaggtgctgtgtacacaatgtacagcgattacgtcaagaggatggcacaggatgctggagagaagtaggactcctataggagccggggctgtccaactcccctaactcaatccctggtacattcctaataaagcagttttgaggaaaatcaac

SEQ ID NO: 281535 - DNA, 660 bp, Homo sapiens
aaatcccggttagattgcaggcaccgccggacgctggctcccggaggttttagttttccctctaccaggagtgtgaagacacagagacttattgcgctggcgaagatggctgaggcgaaggcgtgtccgacttgtcctcggagttctgagggtttcagtgaccccagaaggctgagaagtggaatccgaactcgaggctgcccgaagcctcgggctgtttgagtgtagagccggtaggggagggctttcaaagtgtggccgcgagggcgagcgtgggggatcggttatgagctcccgagggcggggactctgctctgtgtcccctgaggaagtccagtcttgttataaggaagcctattccaggccgggggctgtggctcacgcctacaatacctgcattttgggaggctgaggccgggggatgatgaggtcaagagatcaagactatcgtggtcaacatggtgaaaccccgtctctactaaaaatacaaaaattagctgggcgtggtggcgcgcgcctgtagtcccagctatccaaatagcttaggcctgaaaaagggttttaacccaggagttgccaggtttaatggatccattattaccccactgtaaccttatctgggataatattgaaacttcctgttttattatttaaatatat

SEQ ID NO: 281536 - DNA, 814 bp, Homo sapiens
aaatcccggttagattgcaggcaccgccggacgctggctcccggaggttttagttttccctctaccaggagtgtgaagacacagagacttattgcgctggcgaagatggctgaggcgaaggcgtgtccgacttgtcctcggagttctgagggtttcagtgaccccagaaggctgagaagtggaatccgaactcgaggctgcccgaagcctcgggctgtttgagtgtagagccggtaggggagggctttcaaagtgtggccgcgagggcgagcgtgggggatcggttatgagctcccgagggcggggactctgctctgtgtcccctgaggaagtccagtcttgttataaggtatgagaaaagtaactttttaaaaatggacaaataataattgtatgttttatatactgatagggtacaatatgctgttttgatctatgtttacaatgcgaaatgattaaatcaagctaattaaatccatcacctcacttttttgtggtgaaaacatttaaaatctacttttagcaattttgaaacatgcaacacattatttatgtagttgctattctatgcaatcgattaacaaagtttatttctcctgactaactgaaattttgtactgttttaattaacatctcccttttccccatttttcagtctctggtaaacaccattctttgcctcttaagagttagacttttttagattccacaaataccacttatgtggtatttggtatttatctttctgttactggcttctctcacttagcataatgtcctcctggtttatccatgttgtcacagatgacagaat

SEQ ID NO: 281537 - DNA, 367 bp, Homo sapiens
gtttgctacagccttggtactgatcatcaaaagaacctggtgcgaagtcgaagtcgattttaattgcaacctgtaaaaaaagaaaaatcttgagtttaatttttcaaatcagatggtgaatgtggttgcagatttgctgtactctataagggtgctgccacacaatgggacagcatgggtggatccatggacagtctcagaagaagattgataagtgactagaacatggactcttgaataagacatctcagttcaattcctggtgctccttcttcctaaatgtgtgatcttggacaagctacttaacctctctgtctctctgtttcctcatgtgttgaatggagataataatagtaccaacttcatt

SEQ ID NO: 281538 - DNA, 1845 bp, Homo sapiens
gtgtttatgtataagattggtcaatgggttcagtccaatcggttcatgtgtagtctgttttttaaaaatctggaataagtttgtgtgtatcctgctaaatgtcatcttatttgctttagcccatcatcccattgtttggttcccatgtctgccaccaaatgtctccttcttagattcatatcatctgaaaatttgttaagcctgttaactttgtattcatccaaatccacataaacatgttgaacaggatagagctgaggacagagccctgtggcatgctactaaagactttcctccagactgacatggatcaagcatttttggggtatggtaactcaaccagttctgaatccacttagtatgataacacaatccacaatttctcatgttcttcatcgaaatatcattagagagagacagagatatctagttttcagttagaaagataagattatagtttaatagagagataagggctggagagaaatttggaagcaatctgtatcaggttttgtcacctggctaccacagaatcccctggggaacttcctggcttcacctggagattctgattctgtagtctggagtgggactaagaatctgtgttcttactaagttccccaggtgattcaaatgcagctggtctgatgactgatgttgggggaccacagatctgtatcactgggatagctggggcagagagaatggataagttctctgaggagagtgtttcatggggcgggaggagggctaaggataacactgaggagtgcgcatgggagaaaaggaaagagagccaaagacaaggaacccttggagaagcagtggcaggtggtgcctcaggcctggggcagaaagagggctggatgctgcgcagaggcctggccagcacctaggcagagcccacagcactggtgaccagcaagaaggcagcactgtggagttgtggaccctggagttgcatttctggtttttaaggaaatagtgggtaggagagaaagtgtcagaatcaaattataaaagtgtagcagcaaaagggagacaatggtgttcaagggaagactttctttaaggaggcaagggcaggagcttgaaaacagaggggagggagccaagtggtgaggtaaggagtgaagatacaggagagtggaggaataggaggcagcaggaactgctggaggcaggaaggagggaactgagcaatgtggaggccggggctgggcagcaatgagccttgtgaaggagatggaccccttctccccaggagagagggtacctcctggtgcataggtagatgaggagggcagatggaagacttgaagggggctcttagaactggttcagggaagcagaaaatatgagataaagggaccagacttgggatttgaggcaagataagatgatttggcaggcactgggaagcatttcaggggattaccactagatgatgaaaaggtgctaagcaaggagggtagaggcagaggcagtctaggtgagtgtgtagcgggcttggtgttgataagagttaaaaagagcatggccaggcgcagtggctcatgcctgtaatcccaggactttgggaggccaaggcaggcagatcacttgaggtcaggagttcgagactagcctggcaacatggtgaaaccctgtctctactaaaaatacaaaaattggccgggtgtgatggcaggcacctgtaatcccagctactcgggaggctgaggcaggagaattgcttgaaccccagaggcgggggttgcagtgagcagagatcgtgccattgcactccagcctgggtgacaagagcaaaactccgtctcaaaaaaaagaaaaaaaaaagcagat

SEQ ID NO: 281539 - DNA, 3430 bp, Homo sapiens
gtggcggacgggcggacgcgggccggcggccgctgcggtgccgggagggcggctgggcaggcggcaggaatgctgcgcgccgccctgtccctgctcgcgctgcccctggcgggggcggccgaagagcccacccagaagccagagtccccgggcgagcctcccccaggcttagagctcttccgctggcagtggcacgaggtggaggcgccctacctggtggccctgtggatcctggtggccagtctggccaaaatcgcccctagggtgcaggctggcttactggacttcctgctgtttgggagcctcatctcggcggtggaccccgtggccgtgctagctgtctttgaggaggtgcacgtcaatgagactctctttatcatcgtctttggcgagtccctgctcaacgatgctgtcaccgtggtgctgtacaaggtctgcaactcctttgtggagatgggctctgccaatgtgcaggccactgactacctgaagggagtcgcgggtccgcatcatcgagccgctgctggtcttcctcctcgcctacgcagcctacctcactgctgaaatggcctcgctctccgccattcttgcggtgaccatgtgtggcctgggctgtaagaagtacgtggaggccaacatctcccataagtcacgcacaactgtcaaatatacaatgaagactctagccagctgtgctgagaccgtgatcttcatgctgcttggcatctcagccgtggactcttctaagtgggcctgggattctgggctggtgctgggcaccctcatcttcatcctgttcttccgagccctcggcgtagtcctgcagacctgggtgctgaatcagttccggctagtccctctggacaagattgaccaagtggtgatgtcctatgggggcctgcggggggctgtggcctttgctctcgtcatcctactggataggaccaaggtccctgccaaggactactttgtagccaccactattgtagtggtcttcttcacagtcatcgtgcagggcttgaccatcaagccactggtcaaatggctgaaggtgaagaggagtgagcatcacaaacccaccctgaaccaggagctgcatgaacacacttttgaccacattctggctgcagtggaggacgttgtggggcaccatggctaccactactggagggacaggtgggagcagtttgacaagaaatacctgagtcagctgctgatgcgacgatcagcctaccgcatccgggaccagatctgggatgtgtactacaggcttaacatccgggatgccatcagctttgtggaccagggaggccacgtcttgtcttccacaggtctcactctgccttctatgcccagccgcaattctgtggcagaaacttctgtcaccaacctgctgagggagagtggcagtggagcgtgtctggatctgcaggtgattgacacagtacgcagcggccgggatcgtgaggatgctgtgatgcatcatctgctctgcggaggcctctacaagccgcgccgtagggatagagctgaggacagagccctgtggcatgctactaaagactttcctccagactgacatggatcaagcatttttgggtacaaagccagctgcagtcgccacttcatctcagaggatgcgcaggagcggcaggacaaggaggtcttccagcagaacatgaagcggcggctggagtcctttaagtccaccaagcacaacatctgcttcaccaagagcaagccacgaccccgcaagactggccgcaggaagaaggatggtgtggcgaatgctgaggctacaaatgggaaacatcgaggcctgggctttcaggacacagctgctgtgatattaaccgtggagtctgaggaggaggaggaggagagcgacagttcagagacagagaaggaggacgatgaggggatcatctttgtggctcgtgccaccagtgaggttctccaagagggcaaggtctcaggaagccttgaggtgtgcccaagcccacgaatcattcccccctccccaacctgtgcagaaaaggagctcccctggaagagtgggcagggggacctggcagtgtacgtgtcctcggaaaccaccaagattgtgcctgtggacatgcagacgggttggaaccagagcatctcatccctggagagcctagcgtcccctccctgtaaccaggccccaattctgacctgcctgcctccccatccacggggcactgaagagccccaggtccctctccacctaccttctgatccacgctctagcttcgccttcccaccgagcctggccaaggctggccgctctcgcagtgagagcagcgctgacctcccccagcagcaggagctgcagcccctcatgggccacaaggaccacacccatctcagcccaggcaccgctacctcccactggtgcatccagttcaacagaggcagccggctgtagctcaaggcctcggggaggagcaggaggtggaatccctgtgggaagtgctccctgggtgatgggtagagccctcgaaacttgacatggggccagaagggcctgggttgaagtagtaattgggcttccttggagctagtcagaggggtcacctaagctggtcctcacaggggcctttctcaccacctccctgctcctaacccctgccactttctgtttcattaaggcctctactctggctcaggacccagtccaggccttctacgggctaggcccagagacttgggttgctggtcccccttccctagtgggttttcccggggactctataggcagctgctcctgcccgcaaagcaagagcatcattcctattcttcagtggatgccagccttccctgccccaactccctccccagcactgggtcagtggtgtcctggcagtgaggctccgtgaggggctggcccttagaggaactggggtgggaggtggggcaggcctcacccttgggctttgctgccctgttgggtcagctacccatagtccatttttttagggcagtgggaacctctgcctccacttcctgctttagccccttccctttgctgccaggtattggggtaatatttcctccttttccaagaccaaggccaagaggctgggccaggcttcagttcaggcctgttgcttaactggggtcaccctgggatctgctgctctgggtctaagtctagacctttctgatccttgggtctgggttttttgaggaggggacatagtggcctctgggctgccatgtcaccacctgaacattccccaaacagagaaggaacccagcatctcagggccactgctccattgctctgggggctgggatgcctggctaagcaggggctgacagggtggcaggtgactttctagggatcagcacctgccctgtgttttgtaccttgaacctaagatatattaaacatctctcagatgga

SEQ ID NO: 281540 - DNA, 2719 bp, Homo sapiens
ctggcagaccgacggcgagtggaactcgagcacctccccaggtgcgcctaattcgaagggcagtcagaatggcggagccaagttcctggcacccctcttcagtttcccctcaacttgagaggggactcccccgcaggcggggcagagtggaccctgggaccccagcccaagacttttccggagaagaacactcgctccagcctcttcccgcggagcacctcccaccagttttcatggcgcccaccctgaacccccgatcgccccaacctttctccggcctccctcaccttgagcggcgctcccagcaggcggtgcaccgcgggtatctgcgcgcccaagggcagcgccccgtccaggctgcaggtgggggcccggcgcggctccggaaagttggcacatgcgaaggggtcggtgtcttccagtgtttcacctgtctcggaaagtaacatctctggtccctgagagctgcctgctgattttgctgggcctggtgctagggggaattgttttggctgtggccaagaaagctgagtaccagctggagccaggcaccttcttcctcttcctgctgcctcctattgtgttggactcaggctatttcatgcctagcaggctgttctttgacaacttgggtgccatcctcacctatgccgtggtaggcacactctggaatgccttcacaacaggcgctgccctctggggcttgcagcaggctggacttgtagcccctagggtgcaggctggcttactggacttcctgctgtttgggagcctcatctcggcggtggaccccgtggccgtgctagctgtctttgaggaggtgcacgtcaatgagactctctttatcatcgtctttggcgagtccctgctcaacgatgctgtcaccgtgtacaaagccagctgcagtcgccacttcatctcagaggatgcgcaggagcggcaggacaaggaggtcttccagcagaacatgaagcggcggctggagtcctttaagtccaccaagcacaacatctgcttcaccaagagcaagccacgaccccgcaagactggccgcaggaagaaggatggtgtggcgaatgctgaggctacaaatgggaaacatcgaggcctgggctttcaggacacagctgctgtgatattaaccgtggagtctgaggaggaggaggaggagagcgacagttcagagacagagaaggaggacgatgaggggatcatctttgtggctcgtgccaccagtgaggttctccaagagggcaaggtctcaggaagccttgaggtgtgcccaagcccacgaatcattcccccctccccaacctgtgcagaaaaggagctcccctggaagagtgggcagggggacctggcagtgtacgtgtcctcggaaaccaccaagattgtgcctgtggacatgcagacgggttggaaccagagcatctcatccctggagagcctagcgtcccctccctgtaaccaggccccaattctgacctgcctgcctccccatccacggggcactgaagagccccaggtccctctccacctaccttctgatccacgctctagcttcgccttcccaccgagcctggccaaggctggccgctctcgcagtgagagcagcgctgacctcccccagcagcaggagctgcagcccctcatgggccacaaggaccacacccatctcagcccaggcaccgctacctcccactggtgcatccagttcaacagaggcagccggctgtagctcaaggcctcggggaggagcaggaggtggaatccctgtgggaagtgctccctgggtgatgggtagagccctcgaaacttgacatggggccagaagggcctgggttgaagtagtaattgggcttccttggagctagtcagaggggtcacctaagctggtcctcacaggggcctttctcaccacctccctgctcctaacccctgccactttctgtttcattaaggcctctactctggctcaggacccagtccaggccttctacgggctaggcccagagacttgggttgctggtcccccttccctagtgggttttcccggggactctataggcagctgctcctgcccgcaaagcaagagcatcattcctattcttcagtggatgccagccttccctgccccaactccctccccagcactgggtcagtggtgtcctggcagtgaggctccgtgaggggctggcccttagaggaactggggtgggaggtggggcaggcctcacccttgggctttgctgccctgttgggtcagctacccatagtccatttttttagggcagtgggaacctctgcctccacttcctgctttagccccttccctttgctgccaggtattggggtaatatttcctccttttccaagaccaaggccaagaggctgggccaggcttcagttcaggcctgttgcttaactggggtcaccctgggatctgctgctctgggtctaagtctagacctttctgatccttgggtctgggttttttgaggaggggacatagtggcctctgggctgccatgtcaccacctgaacattccccaaacagagaaggaacccagcatctcagggccactgctccattgctctgggggctgggatgcctggctaagcaggggctgacagggtggcaggtgactttctagggatcagcacctgccctgtgttttgtaccttgaacctaagatatattaaacatctctcagatgga

SEQ ID NO: 281541 - DNA, 3868 bp, Homo sapiens
gtggcggacgggcggacgcgggccggcggccgctgcggtgccgggagggcggctgggcaggcggcaggaatgctgcgcgccgccctgtccctgctcgcgctgcccctggcgggggcggccgaagagcccacccagaagccagagtccccgggcgagcctcccccaggcttagagctcttccgctggcagtggcacgaggtggaggcgccctacctggtggccctgtggatcctggtggccagtctggccaaaatcgcccctagggtgcaggctggcttactggacttcctgctgtttgggagcctcatctcggcggtggaccccgtggccgtgctagctgtctttgaggaggtgcacgtcaatgagactctctttatcatcgtctttggcgagtccctgctcaacgatgctgtcaccgtggtgctgtacaaggtctgcaactcctttgtggagatgggctctgccaatgtgcaggccactgactacctgaagggagtcgcgggtccgcatcatcgagccgctgctggtcttcctcctcgcctacgcagcctacctcactgctgaaatggcctcgctctccgccattcttgcggtgaccatgtgtggcctgggctgtaagaagtacgtggaggccaacatctcccataagtcacgcacaactgtcaaatatacaatgaagactctagccagctgtgctgagaccgtgatcttcatgctgcttggcatctcagccgtggactcttctaagtgggcctgggattctgggctggtgctgggcaccctcatcttcatcctgttcttccgagccctcggcgtagtcctgcagacctgggtgctgaatcagttccggctagtccctctggacaagattgaccaagtggtgatgtcctatgggggcctgcggggggctgtggcctttgctctcgtcatcctactggataggaccaaggtccctgccaaggactactttgtagccaccactattgtagtggtcttcttcacagtcatcgtgcagggcttgaccatcaagccactggtcaaatggctgaaggtgaagaggagtgagcatcacaaacccaccctgaaccaggagctgcatgaacacacttttgaccacattctggctgcagtggaggacgttgtggggcaccatggctaccactactggagggacaggtgggagcagtttgacaagaaatacctgagtcagctgctgatgcgacgatcagcctaccgcatccgggaccagatctgggatgtgtactacaggcttaacatccgggatgccatcagctttgtggaccagggaggccacgtcttgtcttccacaggtctcactctgccttctatgcccagccgcaattctgtggcagaaacttctgtcaccaacctgctgagggagagtggcagtggagcgtgtctggatctgcaggtgattgacacagtacgcagcggccgggatcgtgaggatgctgtgatgcatcatctgctctgcggaggcctctacaagccgcgccgtaggtacaaagccagctgcagtcgccacttcatctcagaggatgcgcaggagcggcaggacaaggaggtcttccagcagaacatgaagcggcggctggagtcctttaagtccaccaagcacaacatctgcttcaccaagagcaagccacgaccccgcaagactggccgcaggaaggcatgtcttccctcagggactcctcttgggagctggaggctgacagcaagcagttttgagccccctagtgttaggatccagcttagggggaacccagttgggacagtcctcaggggcttgatgactacagcagtttgggttcccttttagatgttcctggagtcccagaagggtaaggtgagaccttcagagggggagcagcctcttggccatgtggtcacctgctgggaggcagcagggccgcctaccaaagatgaaaaaggcaggagaaaaggagattcctttgaggggcaactccatgagctcctaagtcagcccacgctgatgcatccagatttcttactggggcatgggtcactcttgcctggttggccaagggatggtagaaccactgggactgacataaattccctcccctgctgggttaggaaaacttgtcctgttgaccccaccagatgacagggttggggtgggaagccggggccagaggctcaggttttctttcttggtcctcagaaggatggtgtggcgaatgctgaggctacaaatgggaaacatcgaggcctgggctttcaggacacagctgctgtgatattaaccgtggagtctgaggaggaggaggaggagagcgacagttcagagacagagaaggaggacgatgaggggatcatctttgtggctcgtgccaccagtgaggttctccaagagggcaaggtctcaggaagccttgaggtgtgcccaagcccacgaatcattcccccctccccaacctgtgcagaaaaggagctcccctggaagagtgggcagggggacctggcagtgtacgtgtcctcggaaaccaccaagattgtgcctgtggacatgcagacgggttggaaccagagcatctcatccctggagagcctagcgtcccctccctgtaaccaggccccaattctgacctgcctgcctccccatccacggggcactgaagagccccaggtccctctccacctaccttctgatccacgctctagcttcgccttcccaccgagcctggccaaggctggccgctctcgcagtgagagcagcgctgacctcccccagcagcaggagctgcagcccctcatgggccacaaggaccacacccatctcagcccaggcaccgctacctcccactggtgcatccagttcaacagaggcagccggctgtagctcaaggcctcggggaggagcaggaggtggaatccctgtgggaagtgctccctgggtgatgggtagagccctcgaaacttgacatggggccagaagggcctgggttgaagtagtaattgggcttccttggagctagtcagaggggtcacctaagctggtcctcacaggggcctttctcaccacctccctgctcctaacccctgccactttctgtttcattaaggcctctactctggctcaggacccagtccaggccttctacgggctaggcccagagacttgggttgctggtcccccttccctagtgggttttcccggggactctataggcagctgctcctgcccgcaaagcaagagcatcattcctattcttcagtggatgccagccttccctgccccaactccctccccagcactgggtcagtggtgtcctggcagtgaggctccgtgaggggctggcccttagaggaactggggtgggaggtggggcaggcctcacccttgggctttgctgccctgttgggtcagctacccatagtccatttttttagggcagtgggaacctctgcctccacttcctgctttagccccttccctttgctgccaggtattggggtaatatttcctccttttccaagaccaaggccaagaggctgggccaggcttcagttcaggcctgttgcttaactggggtcaccctgggatctgctgctctgggtctaagtctagacctttctgatccttgggtctgggttttttgaggaggggacatagtggcctctgggctgccatgtcaccacctgaacattccccaaacagagaaggaacccagcatctcagggccactgctccattgctctgggggctgggatgcctggctaagcaggggctgacagggtggcaggtgactttctagggatcagcacctgccctgtgttttgtaccttgaacctaagatatattaaacatctctcagatgga

SEQ ID NO: 281542 - DNA, 2824 bp, Homo sapiens
ctggcagaccgacggcgagtggaactcgagcacctccccaggtgcgcctaattcgaagggcagtcagaatggcggagccaagttcctggcacccctcttcagtttcccctcaacttgagaggggactcccccgcaggcggggcagagtggaccctgggaccccagcccaagacttttccggagaagaacactcgctccagcctcttcccgcggagcacctcccaccagttttcatggcgcccaccctgaacccccgatcgccccaacctttctccggcctccctcaccttgagcggcgctcccagcaggcggtgcaccgcgggtatctgcgcgcccaagggcagcgccccgtccaggctgcaggtgggggcccggcgcggctccggaaagttggcacatgcgaaggggtcggtgtcttccagtgtttcacctgtctcggaaagtaacatctctggtccctgagagctgcctgctgattttgctgggcctggtgctagggggaattgttttggctgtggccaagaaagctgagtaccagctggagccaggcaccttcttcctcttcctgctgcctcctattgtgttggactcaggctatttcatgcctagcaggctgttctttgacaacttgggtgccatcctcacctatgccgtggtaggcacactctggaatgccttcacaacaggcgctgccctctggggcttgcagcaggctggacttgtaggtctcactctgccttctatgcccagccgcaattctgtggcagaaacttctgtcaccaacctgctgagggagagtggcagtggagcgtgtctggatctgcaggtgattgacacagtacgcagcggccgggatcgtgaggatgctgtgatgcatcatctgctctgcggaggcctctacaagccgcgccgtagggatagagctgaggacagagccctgtggcatgctactaaagactttcctccagactgacatggatcaagcatttttgggtacaaagccagctgcagtcgccacttcatctcagaggatgcgcaggagcggcaggacaaggaggtcttccagcagaacatgaagcggcggctggagtcctttaagtccaccaagcacaacatctgcttcaccaagagcaagccacgaccccgcaagactggccgcaggaagaaggatggtgtggcgaatgctgaggctacaaatgggaaacatcgaggcctgggctttcaggacacagctgctgtgatattaaccgtggagtctgaggaggaggaggaggagagcgacagttcagagacagagaaggaggacgatgaggggatcatctttgtggctcgtgccaccagtgaggttctccaagagggcaaggtctcaggaagccttgaggtgtgcccaagcccacgaatcattcccccctccccaacctgtgcagaaaaggagctcccctggaagagtgggcagggggacctggcagtgtacgtgtcctcggaaaccaccaagattgtgcctgtggacatgcagacgggttggaaccagagcatctcatccctggagagcctagcgtcccctccctgtaaccaggccccaattctgacctgcctgcctccccatccacggggcactgaagagccccaggtccctctccacctaccttctgatccacgctctagcttcgccttcccaccgagcctggccaaggctggccgctctcgcagtgagagcagcgctgacctcccccagcagcaggagctgcagcccctcatgggccacaaggaccacacccatctcagcccaggcaccgctacctcccactggtgcatccagttcaacagaggcagccggctgtagctcaaggcctcggggaggagcaggaggtggaatccctgtgggaagtgctccctgggtgatgggtagagccctcgaaacttgacatggggccagaagggcctgggttgaagtagtaattgggcttccttggagctagtcagaggggtcacctaagctggtcctcacaggggcctttctcaccacctccctgctcctaacccctgccactttctgtttcattaaggcctctactctggctcaggacccagtccaggccttctacgggctaggcccagagacttgggttgctggtcccccttccctagtgggttttcccggggactctataggcagctgctcctgcccgcaaagcaagagcatcattcctattcttcagtggatgccagccttccctgccccaactccctccccagcactgggtcagtggtgtcctggcagtgaggctccgtgaggggctggcccttagaggaactggggtgggaggtggggcaggcctcacccttgggctttgctgccctgttgggtcagctacccatagtccatttttttagggcagtgggaacctctgcctccacttcctgctttagccccttccctttgctgccaggtattggggtaatatttcctccttttccaagaccaaggccaagaggctgggccaggcttcagttcaggcctgttgcttaactggggtcaccctgggatctgctgctctgggtctaagtctagacctttctgatccttgggtctgggttttttgaggaggggacatagtggcctctgggctgccatgtcaccacctgaacattccccaaacagagaaggaacccagcatctcagggccactgctccattgctctgggggctgggatgcctggctaagcaggggctgacagggtggcaggtgactttctagggatcagcacctgccctgtgttttgtaccttgaacctaagatatattaaacatctctcagatgga

SEQ ID NO: 281543 - DNA, 1926 bp, Homo sapiens
gtggcggacgggcggacgcgggccggcggccgctgcggtgccgggagggcggctgggcaggcggcaggaatgctgcgcgccgccctgtccctgctcgcgctgcccctggcgggggcggccgaagagcccacccagaagccagagtccccgggcgagcctcccccaggcttagagctcttccgctggcagtggcacgaggtggaggcgccctacctggtggccctgtggatcctggtggccagtctggccaaaatcgcccctagggtgcaggctggcttactggacttcctgctgtttgggagcctcatctcggcggtggaccccgtggccgtgctagctgtctttgaggaggtgcacgtcaatgagactctctttatcatcgtctttggcgagtccctgctcaacgatgctgtcaccgtggtgctgtacaaggtctgcaactcctttgtggagatgggctctgccaatgtgcaggccactgactacctgaagggagtcgcgggtccgcatcatcgagccgctgctggtcttcctcctcgcctacgcagcctacctcactgctgaaatggcctcgctctccgccattcttgcggtgaccatgtgtggcctgggctgtaagaagtacgtggaggccaacatctcccataagtcacgcacaactgtcaaatatacaatgaagactctagccagctgtgctgagaccgtgatcttcatgctgcttggcatctcagccgtggactcttctaagtgggcctgggattctgggctggtgctgggcaccctcatcttcatcctgttcttccgagccctcggcgtagtcctgcagacctgggtgctgaatcagttccggctagtccctctggacaagattgaccaagtggtgatgtcctatgggggcctgcggggggctgtggcctttgctctcgtcatcctactggataggaccaaggtccctgccaaggactactttgtagccaccactattgtagtggtcttcttcacagtcatcgtgcagggcttgaccatcaagccactggtcaaatggctgaaggtgaagaggagtgagcatcacaaacccaccctgaaccaggagctgcatgaacacacttttgaccacattctggctgcagtggaggacgttgtggggcaccatggctaccactactggagggacaggtgggagcagtttgacaagaaatacctgagtcagctgctgatgcgacgatcagcctaccgcatccgggaccagatctgggatgtgtactacaggcttaacatccgggatgccatcagctttgtggaccagggaggccacgtcttgtcttccacaggtctcactctgccttctatgcccagccgcaattctgtggcagaaacttctgtcaccaacctgctgagggagagtggcagtggagcgtgtctggatctgcaggtgattgacacagtacgcagcggccgggatcgtgaggatgctgtgatgcatcatctgctctgcggaggcctctacaagccgcgccgtagggatagagctgaggacagagccctgtggcatgctactaaagactttcctccagactgacatggatcaagcatttttgggtacaaagccagctgcagtcgccacttcatctcagaggatgcgcaggagcggcaggacaaggaggtcttccagcagaacatgaagcggcggctggagtcctttaagtccaccaagcacaacatctgcttcaccaagagcaagccacgaccccgcaagactggccgcaggaagaaggatggtgtggcgaatgctgaggctacaaatgggaaacatcgaggcctgggctttcaggacacagctgctgtgatattagaccatggaatgtgagatgagaacacaaaggagcatcaaatcacaaagagagaatgacacaccaaagggggatg

SEQ ID NO: 281544 - DNA, 3741 bp, Homo sapiens
gtggcggacgggcggacgcgggccggcggccgctgcggtgccgggagggcggctgggcaggcggcaggaatgctgcgcgccgccctgtccctgctcgcgctgcccctggcgggggcggccgaagagcccacccagaagccagagtccccgggcgagcctcccccaggcttagagctcttccgctggcagtggcacgaggtggaggcgccctacctggtggccctgtggatcctggtggccagtctggccaaaatcgtgtttcacctgtctcggaaagtaacatctctggtccctgagagctgcctgctgattttgctgggcctggtgctagggggaattgttttggctgtggccaagaaagctgagtaccagctggagccaggcaccttcttcctcttcctgctgcctcctattgtgttggactcaggctatttcatgcctagcaggctgttctttgacaacttgggtgccatcctcacctatgccgtggtaggcacactctggaatgccttcacaacaggcgctgccctctggggcttgcagcaggctggacttgtagcccctagggtgcaggctggcttactggacttcctgctgtttgggagcctcatctcggcggtggaccccgtggccgtgctagctgtctttgaggaggtgcacgtcaatgagactctctttatcatcgtctttggcgagtccctgctcaacgatgctgtcaccgtggtgctgtacaaggtctgcaactcctttgtggagatgggctctgccaatgtgcaggccactgactacctgaagggagtcgcctccctgtttgtggtcagtctgggcggggcagccgtgggcttagtctttgccttcctcctggccctgaccacacgcttcaccaagcgggtccgcatcatcgagccgctgctggtcttcctcctcgcctacgcagcctacctcactgctgaaatggcctcgctctccgccattcttgcggtgaccatgtgtggcctgggctgtaagaagtacgtggaggccaacatctcccataagtcacgcacaactgtcaaatatacaatgaagactctagccagctgtgctgagaccgtgatcttcatgctgcttggcatctcagccgtggactcttctaagtgggcctgggattctgggctggtgctgggcaccctcatcttcatcctgttcttccgagccctcggcgtagtcctgcagacctgggtgctgaatcagttccggctagtccctctggacaagattgaccaagtggtgatgtcctatgggggcctgcggggggctgtggcctttgctctcgtcatcctactggataggaccaaggtccctgccaaggactactttgtagccaccactattgtagtggtcttcttcacagtcatcgtgcagggcttgaccatcaagccactggtcaaatggctgaaggtgaagaggagtgagcatcacaaacccaccctgaaccaggagctgcatgaacacacttttgaccacattctggctgcagtggaggacgttgtggggcaccatggctaccactactggagggacaggtgggagcagtttgacaagaaatacctgagtcagctgctgatgcgacgatcagcctaccgcatccgggaccagatctgggatgtgtactacaggcttaacatccgggatgccatcagctttgtggaccagggaggccacgtcttgtcttccacaggtctcactctgccttctatgcccagccgcaattctgtggcagaaacttctgtcaccaacctgctgagggagagtggcagtggagcgtgtctggatctgcaggtgattgacacagtacgcagcggccgggatcgtgaggatgctgtgatgcatcatctgctctgcggaggcctctacaagccgcgccgtaggtacaaagccagctgcagtcgccacttcatctcagaggatgcgcaggagcggcaggacaaggaggtcttccagcagaacatgaagcggcggctggagtcctttaagtccaccaagcacaacatctgcttcaccaagagcaagccacgaccccgcaagactggccgcaggaagaaggatggtgtggcgaatgctgaggctacaaatgggaaacatcgaggcctgggctttcaggacacagctgctgtgatattaaccgtggagtctgaggaggaggaggaggagagcgacagttcagagacagagaaggaggacgatgaggggatcatctttgtggctcgtgccaccagtgaggttctccaagagggcaaggtctcaggaagccttgaggtgtgcccaagcccacgaatcattcccccctccccaacctgtgcagaaaaggagctcccctggaagagtgggcagggggacctggcagtgtacgtgtcctcggaaaccaccaagattgtgcctgtggacatgcagacgggttggaaccagagcatctcatccctggagagcctagcgtcccctccctgtaaccaggccccaattctgacctgcctgcctccccatccacggggcactgaagagccccaggtccctctccacctaccttctgatccacgctctagcttcgccttcccaccgagcctggccaaggctggccgctctcgcagtgagagcagcgctgacctcccccagcagcaggagctgcagcccctcatgggccacaaggaccacacccatctcagcccaggcaccgctacctcccactggtgcatccagttcaacagaggcagccggctgtagctcaaggcctcggggaggagcaggaggtggaatccctgtgggaagtgctccctgggtgatgggtagagccctcgaaacttgacatggggccagaagggcctgggttgaagtagtaattgggcttccttggagctagtcagaggggtcacctaagctggtcctcacaggggcctttctcaccacctccctgctcctaacccctgccactttctgtttcattaaggcctctactctggctcaggacccagtccaggccttctacgggctaggcccagagacttgggttgctggtcccccttccctagtgggttttcccggggactctataggcagctgctcctgcccgcaaagcaagagcatcattcctattcttcagtggatgccagccttccctgccccaactccctccccagcactgggtcagtggtgtcctggcagtgaggctccgtgaggggctggcccttagaggaactggggtgggaggtggggcaggcctcacccttgggctttgctgccctgttgggtcagctacccatagtccatttttttagggcagtgggaacctctgcctccacttcctgctttagccccttccctttgctgccaggtattggggtaatatttcctccttttccaagaccaaggccaagaggctgggccaggcttcagttcaggcctgttgcttaactggggtcaccctgggatctgctgctctgggtctaagtctagacctttctgatccttgggtctgggttttttgaggaggggacatagtggcctctgggctgccatgtcaccacctgaacattccccaaacagagaaggaacccagcatctcagggccactgctccattgctctgggggctgggatgcctggctaagcaggggctgacagggtggcaggtgactttctagggatcagcacctgccctgtgttttgtaccttgaacctaagatatattaaacatctctcagatgga

SEQ ID NO: 281545 - DNA, 2389 bp, Homo sapiens
gtggcggacgggcggacgcgggccggcggccgctgcggtgccgggagggcggctgggcaggcggcaggaatgctgcgcgccgccctgtccctgctcgcgctgcccctggcgggggcggccgaagagcccacccagaagccagagtccccgggcgagcctcccccaggcttagagctcttccgctggcagtggcacgaggtggaggcgccctacctggtggccctgtggatcctggtggccagtctggccaaaatcgtgtttcacctgtctcggaaagtaacatctctggtccctgagagctgcctgctgattttgctgggcctggtgctagggggaattgttttggctgtggccaagaaagctgagtaccagctggagccaggcaccttcttcctcttcctgctgcctcctattgtgttggactcaggctatttcatgcctagcaggctgttctttgacaacttgggtgccatcctcacctatgccgtggtaggcacactctggaatgccttcacaacaggcgctgccctctggggcttgcagcaggctggacttgtagtacaaagccagctgcagtcgccacttcatctcagaggatgcgcaggagcggcaggacaaggaggtcttccagcagaacatgaagcggcggctggagtcctttaagtccaccaagcacaacatctgcttcaccaagagcaagccacgaccccgcaagactggccgcaggaagaaggatggtgtggcgaatgctgaggctacaaatgggaaacatcgaggcctgggctttcaggacacagctgctgtgatattaaccgtggagtctgaggaggaggaggaggagagcgacagttcagagacagagaaggaggacgatgaggggatcatctttgtggctcgtgccaccagtgaggttctccaagagggcaaggtctcaggaagccttgaggtgtgcccaagcccacgaatcattcccccctccccaacctgtgcagaaaaggagctcccctggaagagtgggcagggggacctggcagtgtacgtgtcctcggaaaccaccaagattgtgcctgtggacatgcagacgggttggaaccagagcatctcatccctggagagcctagcgtcccctccctgtaaccaggccccaattctgacctgcctgcctccccatccacggggcactgaagagccccaggtccctctccacctaccttctgatccacgctctagcttcgccttcccaccgagcctggccaaggctggccgctctcgcagtgagagcagcgctgacctcccccagcagcaggagctgcagcccctcatgggccacaaggaccacacccatctcagcccaggcaccgctacctcccactggtgcatccagttcaacagaggcagccggctgtagctcaaggcctcggggaggagcaggaggtggaatccctgtgggaagtgctccctgggtgatgggtagagccctcgaaacttgacatggggccagaagggcctgggttgaagtagtaattgggcttccttggagctagtcagaggggtcacctaagctggtcctcacaggggcctttctcaccacctccctgctcctaacccctgccactttctgtttcattaaggcctctactctggctcaggacccagtccaggccttctacgggctaggcccagagacttgggttgctggtcccccttccctagtgggttttcccggggactctataggcagctgctcctgcccgcaaagcaagagcatcattcctattcttcagtggatgccagccttccctgccccaactccctccccagcactgggtcagtggtgtcctggcagtgaggctccgtgaggggctggcccttagaggaactggggtgggaggtggggcaggcctcacccttgggctttgctgccctgttgggtcagctacccatagtccatttttttagggcagtgggaacctctgcctccacttcctgctttagccccttccctttgctgccaggtattggggtaatatttcctccttttccaagaccaaggccaagaggctgggccaggcttcagttcaggcctgttgcttaactggggtcaccctgggatctgctgctctgggtctaagtctagacctttctgatccttgggtctgggttttttgaggaggggacatagtggcctctgggctgccatgtcaccacctgaacattccccaaacagagaaggaacccagcatctcagggccactgctccattgctctgggggctgggatgcctggctaagcaggggctgacagggtggcaggtgactttctagggatcagcacctgccctgtgttttgtaccttgaacctaagatatattaaacatctctcagatgga

SEQ ID NO: 281546 - DNA, 2516 bp, Homo sapiens
tctctggctgggttcctgttgtattttttgttttgtttttcaatccattgttaattctggaaaagctgggctggcaggtcctgtggtgaatatgttggggctgtggcctggggttcttgtgggaggccaaggcatccatcctcatagccaggcggggctgtcattgccagtacaaagccagctgcagtcgccacttcatctcagaggatgcgcaggagcggcaggacaaggaggtcttccagcagaacatgaagcggcggctggagtcctttaagtccaccaagcacaacatctgcttcaccaagagcaagccacgaccccgcaagactggccgcaggaaggcatgtcttccctcagggactcctcttgggagctggaggctgacagcaagcagttttgagccccctagtgttaggatccagcttagggggaacccagttgggacagtcctcaggggcttgatgactacagcagtttgggttcccttttagatgttcctggagtcccagaagggtaaggtgagaccttcagagggggagcagcctcttggccatgtggtcacctgctgggaggcagcagggccgcctaccaaagatgaaaaaggcaggagaaaaggagattcctttgaggggcaactccatgagctcctaagtcagcccacgctgatgcatccagatttcttactggggcatgggtcactcttgcctggttggccaagggatggtagaaccactgggactgacataaattccctcccctgctgggttaggaaaacttgtcctgttgaccccaccagatgacagggttggggtgggaagccggggccagaggctcaggttttctttcttggtcctcagaaggatggtgtggcgaatgctgaggctacaaatgggaaacatcgaggcctgggctttcaggacacagctgctgtgatattaaccgtggagtctgaggaggaggaggaggagagcgacagttcagagacagagaaggaggacgatgaggggatcatctttgtggctcgtgccaccagtgaggttctccaagagggcaaggtctcaggaagccttgaggtgtgcccaagcccacgaatcattcccccctccccaacctgtgcagaaaaggagctcccctggaagagtgggcagggggacctggcagtgtacgtgtcctcggaaaccaccaagattgtgcctgtggacatgcagacgggttggaaccagagcatctcatccctggagagcctagcgtcccctccctgtaaccaggccccaattctgacctgcctgcctccccatccacggggcactgaagagccccaggtccctctccacctaccttctgatccacgctctagcttcgccttcccaccgagcctggccaaggctggccgctctcgcagtgagagcagcgctgacctcccccagcagcaggagctgcagcccctcatgggccacaaggaccacacccatctcagcccaggcaccgctacctcccactggtgcatccagttcaacagaggcagccggctgtagctcaaggcctcggggaggagcaggaggtggaatccctgtgggaagtgctccctgggtgatgggtagagccctcgaaacttgacatggggccagaagggcctgggttgaagtagtaattgggcttccttggagctagtcagaggggtcacctaagctggtcctcacaggggcctttctcaccacctccctgctcctaacccctgccactttctgtttcattaaggcctctactctggctcaggacccagtccaggccttctacgggctaggcccagagacttgggttgctggtcccccttccctagtgggttttcccggggactctataggcagctgctcctgcccgcaaagcaagagcatcattcctattcttcagtggatgccagccttccctgccccaactccctccccagcactgggtcagtggtgtcctggcagtgaggctccgtgaggggctggcccttagaggaactggggtgggaggtggggcaggcctcacccttgggctttgctgccctgttgggtcagctacccatagtccatttttttagggcagtgggaacctctgcctccacttcctgctttagccccttccctttgctgccaggtattggggtaatatttcctccttttccaagaccaaggccaagaggctgggccaggcttcagttcaggcctgttgcttaactggggtcaccctgggatctgctgctctgggtctaagtctagacctttctgatccttgggtctgggttttttgaggaggggacatagtggcctctgggctgccatgtcaccacctgaacattccccaaacagagaaggaacccagcatctcagggccactgctccattgctctgggggctgggatgcctggctaagcaggggctgacagggtggcaggtgactttctagggatcagcacctgccctgtgttttgtaccttgaacctaagatatattaaacatctctcagatgga

SEQ ID NO: 281547 - DNA, 518 bp, Homo sapiens
gcttttgtgtggcctttctcctgtgcaaatgcttctgtattgtattctgtccatttacatttctctctccattgggccacagcccccttgaggctgttccctgtctcctgtgcctaaactattaaattaatcctttgtgatttctccaaatgaaatgaggcagacctactcccattcacttcatatttcaaatactttataacttgttctgaacaagtgtttcacttgaactccattgcccacagcattttgctgctttgaaagcctgctaataggctctcagattttaactgtgaagatcttccaatgcttgagagttggtggcagtgtactagggagtgactattgctttccaaactgatgagagctcctgagtagaaattgagggtgttggtaatgaaagggggtgtcttacttgtaaaggcaaatgaaataatataacatgttttgagtaatctttactgccattgcagtcagtggttttgttttttttccttagcatcaagaaatcgccagga

SEQ ID NO: 281548 - DNA, 1118 bp, Homo sapiens
ctcctcctctggtcctatacatgggtgcacacagatgtttgggttgaagtaaacaactcattcttcccttctagattcccagaagtcactgttgggtatatgaccctctgtttagccaacttgaaattgaagtccttaacacccttggtgtgactgttctcagtgagaacgaggtaagtggtttaaaggggagcagacagaactgtaaaaatcctgaccagactcaccccaggccctgcctgtggacaccagcattctttgcagtggcagccattcctctcttaccgcctgctcacttttgtagtgcctgaacgatgtaaccagccaatcagttacctacattttggcttgtgttgtgcccatcagaaaaaaattacacagatagcatgaaccagaacatgttaggtctgcaccacttttttgagaattatttgtctggaaattatgctaacttggtatttgctgttgctactgaaacataaaagtctaggtgcctcaagtgaggtctttgtggttggattttatcctgtcccagggaggtaataaaaggggatgcagcattcctctttgatgctataacccagtcaaacccatagcacctggctgtgagttgtggattaattctctgcccatgtttgcaccccccaaaatagctgggatttgacatttctgagacctgtggaataaagaaatgcatccctaaagcacagggccaaagccagtatgagcaaatccctccgatttcggttttgtattgtcttggggattagaatcttttgattcctgtgtgtgtgctgaaactgccatcttattgcttattatgtatgaaaatttggctcagttgagagaagagtcattccctgatattggcaaggtcctaaaacactgtcactcagttcagatcatctttctgggtgcctgttctgtgctaggcagggagctttggggagaccaagaaaaatgggagccagtccctgtgttcagggagcccatggtcaacaagtgaatgaggaatgaaatactgaggcagaaccttgtactacgacaggtgttcggagggatggaggaaggattcctgggtctgagctgggctttgaaggtctaccaggagtttgcta

SEQ ID NO: 281549 - DNA, 1565 bp, Homo sapiens
agcgggtccgagaccaatggctgcggccgcagctgcggcgctggaatcctggcaggcggcggctccgcggaagaggcgctccgcggctcgacggccgcggcggagggaggcggcgccccgggggagagaggcggcgccccgggggagagaggcggcgccccggggccccgaggcggagttcgagtctgacagcggagtcgtgcttcgtcgcatctgggaggctgagaaggacctgtttatctctgatttctggagttcagcactagaaaccatcaatagatgtctcacaaaacatctggaacaactgaagacccctgtggggactctttcagacatctttggaaacctgcatcttgactcattgccagaggagtcagatgtggccactgattctatcccaagagagatcttggtcacaggaacctgccatttgaagtgtgtgtgttacggcattgggaactttgccacctgcatcgtagctagaaaccagctaacgtttttgctgcttttgttggaaaagtgccagattcccagaagtcactgttgggtatatgaccctctgtttagccaacttgaaattgaagtccttaacacccttggtgtgactgttctcagtgagaacgaggaagggaaacggagtattcgcggggagcctaccatcttttacatgctccattgtgggacggccttgtacaacaatcttttatggagtaactggtcagtagatgccctttctaagatggtcatcattgggaacagtttcaaaggacttgaggagaggttgttggcaaggattctgcagaaaaattatccctacattgcaaagattttaaaaggactggaggagcttgagtttcctcagacttcacaatacatggacatatttaatgatacctctgtccactggttccctgtgcaaaagctagaacagctctccatagatatttgggagtttcgggaagaaccagattatcaggactgtgaggaccttgaaatcatcaggaacaagagagaagatccttctgctactgactgaactcgttgtgaggtactcagtgttggctgaggtagaagctgccaccagagactaaagggaaggctgctatggaggaactacagagaactcctttgccaggaaagaacatcaacttggctgtcctgttttgaggacgataccccacatgaggacttggtataaagattcctgccctacgtggcattgtcccattttacatccttccctcatgacctggcctgatgtggagtagctcctgagtaaagaagttacccttttgaaaaaaaaaaaaaaaaaagaacaaaggggggggagcataaagaataccccggggggcgcagtttacggctacgacggttttttgtcaaaggggcctaatagggagcgatataaaaacagagagggcgcgcgttaaaacgtgctgcggcaaccggtcgctgggcatttgggaggacccctctttgcggggtggcatgtggagaccccagagataaggctagggaaatacaatgggggtatggtaccccgttgtggtgaatggtcggcttta

SEQ ID NO: 281550 - DNA, 1572 bp, Homo sapiens
  misc_feature (738)..(738): n is a, c, g, or t
  misc_feature (756)..(756): n is a, c, g, or t
  misc_feature (773)..(774): n is a, c, g, or t
ggcccccatggcccgggggatagacccgaaccgacatcgatgtggggccggaatttgactcgaagccgacatcgaattttttttttttccttgcccggctgatttttgtatttttagtagagatggggttttaccatgttggccatgctggtcttgaactcctgacctcaaatgatccgcccgcctcagtctcctgaagtgctgggattacctgcgcctggcccacattttcaactatttaactggtttactccacatcttgagttttttcctgaattcttactatgcttcaatcatcttgcccttctatgtgtcttaaaagttgaatgaaactatcctcatacctcctaatcatggtgtttttttttgtttttttggttttttttaatttctaggttgttggcaaggattctgcagaaaaattatccctacattgcaaaggtatctatctgaataaaggggctgggatggaaaagggtgtgaaactgtgaagaattctatctttctttacaggcgtaggaggaaactcatgggctaagtggcgctagtgtactgtcagctctctccatgggtctgtgttccagaaagctatgactctttaatgcatctcttagttttttccttatttcctttattcttagtatcacagtccatgatatccactgtccttggggcgcccaattcattgtgcaaaagcatttaaatcaaaataccctatttgttatttttttaaaaagnaaagtggggatgacaagnaaagtggaaatttatcnnagaagagtggggattactgtgactatctgaagtttttatacttgaatttttctgctcagattttaaaaggactggaggagcttgagtttcctcagacttcacaatacatggacatatttaatgatacctctgtccactggttccctgtgcaaaagctagaacagctctccatagatatttgggagtttcgggaagaaccagattatcaggactgtgaggaccttgaaatcatcaggaacaagagagaagatccttctgctactgactgaactcgttgtgaggtactcagtgttggctgaggtagaagctgccaccagagactaaagggaaggctgctatggaggaactacagagaactcctttgccaggaaagaacatcaacttggctgtcctgttttgaggacgataccccacatgaggacttggtataaagattcctgccctacgtggcattgtcccattttacatccttccctcatgacctggcctgatgtggagtagctcctgagtaaagaagttacccttttgaaaaaaaaaaaaaaaaaagaacaaaggggggggagcataaagaataccccggggggcgcagtttacggctacgacggttttttgtcaaaggggcctaatagggagcgatataaaaacagagagggcgcgcgttaaaacgtgctgcggcaaccggtcgctgggcatttgggaggacccctctttgcggggtggcatgtggagaccccagagataaggctagggaaatacaatgggggtatggtaccccgttgtggtgaatggtcggcttta

SEQ ID NO: 281551 - DNA, 1373 bp, Homo sapiens
agcgggtccgagaccaatggctgcggccgcagctgcggcgctggaatcctggcaggcggcggctccgcggaagaggcgctccgcggctcgacggccgcggcggagggaggcggcgccccgggggagagaggcggcgccccgggggagagaggcggcgccccggggccccgaggcggagttcgagtctgacagcggagtcgtgcttcgtcgcatctgggaggctgaaggaacctgccatttgaagtgtgtgtgttacggcattgggaactttgccacctgcatcgtagctagaaaccagctaacgtttttgctgcttttgttggaaaagtgccagattcccagaagtcactgttgggtatatgaccctctgtttagccaacttgaaattgaagtccttaacacccttggtgtgactgttctcagtgagaacgaggaagggaaacggagtattcgcggggagcctaccatcttttacatgctccattgtgggacggccttgtacaacaatcttttatggagtaactggtcagtagatgccctttctaagatggtcatcattgggaacagtttcaaaggacttgaggagaggttgttggcaaggattctgcagaaaaattatccctacattgcaaagattttaaaaggactggaggagcttgagtttcctcagacttcacaatacatggacatatttaatgatacctctgtccactggttccctgtgcaaaagctagaacagctctccatagatatttgggagtttcgggaagaaccagattatcaggactgtgaggaccttgaaatcatcaggaacaagagagaagatccttctgctactgactgaactcgttgtgaggtactcagtgttggctgaggtagaagctgccaccagagactaaagggaaggctgctatggaggaactacagagaactcctttgccaggaaagaacatcaacttggctgtcctgttttgaggacgataccccacatgaggacttggtataaagattcctgccctacgtggcattgtcccattttacatccttccctcatgacctggcctgatgtggagtagctcctgagtaaagaagttacccttttgaaaaaaaaaaaaaaaaaagaacaaaggggggggagcataaagaataccccggggggcgcagtttacggctacgacggttttttgtcaaaggggcctaatagggagcgatataaaaacagagagggcgcgcgttaaaacgtgctgcggcaaccggtcgctgggcatttgggaggacccctctttgcggggtggcatgtggagaccccagagataaggctagggaaatacaatgggggtatggtaccccgttgtggtgaatggtcggcttta

SEQ ID NO: 281552 - DNA, 1236 bp, Homo sapiens
tttttttttgagatggagtctcactctgtccccccggctggagtgcagtggtatggtctcagctcactgcaacctctgtctcctgggttcaagcgatactcctacctcagcctaatgagtagctgggattacagatgcacaccaggacgcccggctgatttttgtatttttagtagagatggggttttaccatgttggccatgctggtcttgaactcctgacctcaaatgatccgcccgcctcagtctcctgaagtgctgggattacctgcgcctggcccacattttcaactatttaactggtttactccacatcttgagttttttcctgaattcttactatgcttcaatcatcttgcccttctatgtgtcttaaaagttgaatgaaactatcctcatacctcctaatcatggtgtttttttttgtttttttggttttttttaatttctaggttgttggcaaggattctgcagaaaaattatccctacattgcaaagattttaaaaggactggaggagcttgagtttcctcagacttcacaatacatggacatatttaatgatacctctgtccactggttccctgtgcaaaagctagaacagctctccatagatatttgggagtttcgggaagaaccagattatcaggactgtgaggaccttgaaatcatcaggaacaagagagaagatccttctgctactgactgaactcgttgtgaggtactcagtgttggctgaggtagaagctgccaccagagactaaagggaaggctgctatggaggaactacagagaactcctttgccaggaaagaacatcaacttggctgtcctgttttgaggacgataccccacatgaggacttggtataaagattcctgccctacgtggcattgtcccattttacatccttccctcatgacctggcctgatgtggagtagctcctgagtaaagaagttacccttttgaaaaaaaaaaaaaaaaaagaacaaaggggggggagcataaagaataccccggggggcgcagtttacggctacgacggttttttgtcaaaggggcctaatagggagcgatataaaaacagagagggcgcgcgttaaaacgtgctgcggcaaccggtcgctgggcatttgggaggacccctctttgcggggtggcatgtggagaccccagagataaggctagggaaatacaatgggggtatggtaccccgttgtggtgaatggtcggcttta

SEQ ID NO: 281553 - DNA, 1544 bp, Homo sapiens
agcgggtccgagaccaatggctgcggccgcagctgcggcgctggaatcctggcaggcggcggctccgcggaagaggcgctccgcggctcgacggccgcggcggagggaggcggcgccccgggggagagaggcggcgccccggggccccgaggcggagttcgagtctgacagcggagtcgtgcttcgtcgcatctgggaggctgagaaggacctgtttatctctgatttctggagttcagcactagaaaccatcaatagatgtctcacaaaacatctggaacaactgaagacccctgtggggactctttcagacatctttggaaacctgcatcttgactcattgccagaggagtcagatgtggccactgattctatcccaagagagatcttggtcacaggaacctgccatttgaagtgtgtgtgttacggcattgggaactttgccacctgcatcgtagctagaaaccagctaacgtttttgctgcttttgttggaaaagtgccagattcccagaagtcactgttgggtatatgaccctctgtttagccaacttgaaattgaagtccttaacacccttggtgtgactgttctcagtgagaacgaggaagggaaacggagtattcgcggggagcctaccatcttttacatgctccattgtgggacggccttgtacaacaatcttttatggagtaactggtcagtagatgccctttctaagatggtcatcattgggaacagtttcaaaggacttgaggagaggttgttggcaaggattctgcagaaaaattatccctacattgcaaagattttaaaaggactggaggagcttgagtttcctcagacttcacaatacatggacatatttaatgatacctctgtccactggttccctgtgcaaaagctagaacagctctccatagatatttgggagtttcgggaagaaccagattatcaggactgtgaggaccttgaaatcatcaggaacaagagagaagatccttctgctactgactgaactcgttgtgaggtactcagtgttggctgaggtagaagctgccaccagagactaaagggaaggctgctatggaggaactacagagaactcctttgccaggaaagaacatcaacttggctgtcctgttttgaggacgataccccacatgaggacttggtataaagattcctgccctacgtggcattgtcccattttacatccttccctcatgacctggcctgatgtggagtagctcctgagtaaagaagttacccttttgaaaaaaaaaaaaaaaaaagaacaaaggggggggagcataaagaataccccggggggcgcagtttacggctacgacggttttttgtcaaaggggcctaatagggagcgatataaaaacagagagggcgcgcgttaaaacgtgctgcggcaaccggtcgctgggcatttgggaggacccctctttgcggggtggcatgtggagaccccagagataaggctagggaaatacaatgggggtatggtaccccgttgtggtgaatggtcggcttta

SEQ ID NO: 281554 - DNA, 1549 bp, Homo sapiens
agcgggtccgagaccaatggctgcggccgcagctgcggcgctggaatcctggcaggcggcggctccgcggaagaggcgctccgcggctcgacggccgcggcggagggaggcggcgccccgggggagagaggcggcgccccggggccccgaggcggagttcgagtctgacagcggagtcgtgcttcgtcgcatctgggaggctgagaaggacctgtttatctctgatttctggagttcagcactagaaaccatcaatagatgtctcacaaaacatctggaacaactgaagacccctgtggggactctttcagacatctttggaaacctgcatcttgactcattgccagaggagtcagatgtggccactgattctatcccaagagagatcttggtcacaggaacctgccatttgaagtgtgtgtgttacggcattgggaactttgccacctgcatcgtagctagaaaccagctaacgtttttgctgcttttgttggaaaagtgccagattcccagaagtcactgttgggtatatgaccctctgtttagccaacttgaaattgaagtccttaacacccttggtgtgactgttctcagtgagaacgaggtaagtggtttaaaggggagcagacagaactgtaaaaatcctgaccagactcaccccaggccctgcctgtggacaccagcattctttgcagtggcagccattcctctcttaccgcctgctcacttttgtagtgcctgaacgatgtaaccagccaatcagttacctacattttggcttgtgttgtgcccatcagaaaaaaattacacagatagcatgaaccagaacatgttaggtctgcaccacttttttgagaattatttgtctggaaattatgctaacttggtatttgctgttgctactgaaacataaaagtctaggtgcctcaagtgaggtctttgtggttggattttatcctgtcccagggaggtaataaaaggggatgcagcattcctctttgatgctataacccagtcaaacccatagcacctggctgtgagttgtggattaattctctgcccatgtttgcaccccccaaaatagctgggatttgacatttctgagacctgtggaataaagaaatgcatccctaaagcacagggccaaagccagtatgagcaaatccctccgatttcggttttgtattgtcttggggattagaatcttttgattcctgtgtgtgtgctgaaactgccatcttattgcttattatgtatgaaaatttggctcagttgagagaagagtcattccctgatattggcaaggtcctaaaacactgtcactcagttcagatcatctttctgggtgcctgttctgtgctaggcagggagctttggggagaccaagaaaaatgggagccagtccctgtgttcagggagcccatggtcaacaagtgaatgaggaatgaaatactgaggcagaaccttgtactacgacaggtgttcggagggatggaggaaggattcctgggtctgagctgggctttgaaggtctaccaggagtttgcta

SEQ ID NO: 281555 - DNA, 936 bp, Homo sapiens
cttgtgccacttgctgtaccagctgtcctcatcggtgacgagcgggaggtaaagaaattgatggtccaagaggttgactgatctgttcggagtcacatggcttatgagtagtcaagcaggaacatccctcccaggactcactcacacctattctccaactctgcctacctgctcaattcacctgatgctctgccagtggattgctgatgtctctacattgattcagatttgcacccacatctgaaaatggtcagcaggcagggaccctctgtcaccacaggtggaggaagaggagatgaaagagccttgtctgacaccctggagactgtgggttcctgataagaggttgaggatcaggcccctttctctctccctcatgctctcttgcctttccacctaccaccattggatgatgcagcaagaaggcccttgccagatgtgggcccctccatcttggacttcccagctagcctccagaactggaaactacccagactgtgtcctctccctcttactctcctaaaggaagacaaggaagacaatgacaaatggcgtttgcagcaaagcaacaccaacagccaacttgatgctcaagagagaacgctatgcctcttcctcatggtttccagtgctctacacattctgagaaacttttctggtaataaactatagaaacaatgagactgtgcccatgggagagaccccatctctacaaaaaatacaaaaattagccaggcgtagtggtgtgcacctggattccccagctacttggaaggctgagatgggaagatcacttgagccccggaggttgagactgcagtgcgccatgatcacgccactgtacttcagcctcagtgacaaagcgaaagcctgtttcaaaaaaaaaaaaagacagagagaaacgggctggggacggtggttcacacctgtaatccc

SEQ ID NO: 281556 - DNA, 783 bp, Homo sapiens
cttgtgccacttgctgtaccagctgtcctcatcggtgacgagcgggaggtaaagaaattgatggtccaagaggttgactgatctgttcggagtcacatggcttatgagtagtcaagcaggaacatccctcccaggactcactcacacctattctccaactctgcctacctgctcaattcacctgatgctctgccagtggattgctgatgtctctacattgattcagatttgcacccacatctgaaaatggtcagcaggcagggaccctctgtcaccacaggtggaggaagaggagatgaaagagccttgtctgacaccctggagactgggaaactacccagactgtgtcctctccctcttactctcctaaaggaagacaaggaagacaatgacaaatggcgtttgcagcaaagcaacaccaacagccaacttgatgctcaagagagaacgctatgcctcttcctcatggtttccagtgctctacacattctgagaaacttttctggtaataaactatagaaacaatgagactgtgcccatgggagagaccccatctctacaaaaaatacaaaaattagccaggcgtagtggtgtgcacctggattccccagctacttggaaggctgagatgggaagatcacttgagccccggaggttgagactgcagtgcgccatgatcacgccactgtacttcagcctcagtgacaaagcgaaagcctgtttcaaaaaaaaaaaaagacagagagaaacgggctggggacggtggttcacacctgtaatccc

SEQ ID NO: 281557 - DNA, 846 bp, Homo sapiens
cttgtgccacttgctgtaccagctgtcctcatcggtgacgagcgggaggtaaagaaattgatggtccaagaggttgactgatctgttcggagtcacatggcttatgagtagtcaagcaggaacatccctcccaggactcactcacacctattctccaactctgcctacctgctcaattcacctgatgctctgccagtggattgctgatgtctctacattgattcagatttgcacccacatctgaaaatggtcagcaggcagggaccctctgtcaccacaggtggaggaagaggagatgaaagagccttgtctgacaccctggagactgcaagaaggcccttgccagatgtgggcccctccatcttggacttcccagctagcctccagaactggaaactacccagactgtgtcctctccctcttactctcctaaaggaagacaaggaagacaatgacaaatggcgtttgcagcaaagcaacaccaacagccaacttgatgctcaagagagaacgctatgcctcttcctcatggtttccagtgctctacacattctgagaaacttttctggtaataaactatagaaacaatgagactgtgcccatgggagagaccccatctctacaaaaaatacaaaaattagccaggcgtagtggtgtgcacctggattccccagctacttggaaggctgagatgggaagatcacttgagccccggaggttgagactgcagtgcgccatgatcacgccactgtacttcagcctcagtgacaaagcgaaagcctgtttcaaaaaaaaaaaaagacagagagaaacgggctggggacggtggttcacacctgtaatccc

SEQ ID NO: 281558 - DNA, 415 bp, Homo sapiens
aggctctggagccaggccgagccctgcgcctcctcgtgaggatgcctgagccccctcccagggtacttcaggcagagacagtggcccctgggggccctacccctctccccctcctcacactgtctctaaggccctagctattgacagatgtggccacatccactttccctcctccacagaagtgactttcctgagtttctctctgtcctgggaagagatgttttatgcacagaaatgtcactgcttcctggctgacatcatcatggattccatcaggcaaaaggaccccaaagccatcacagccaaggtggtctccctggccaatcggctgtgggtatgtgtgacaggcctcaggccctggggcaccctgtaccttctccacctcttcccctgccccacaataagtggtgcaagg

SEQ ID NO: 281559 - DNA, 750 bp, Homo sapiens
ggcaccctgaaggactggagcaagcagaggaccaaggagagagaaagccctgcccctgagcagcctctgcccgaggccagtgaggtggacagcctaggggttatcctcaaagtgactcacccccccgtggtgggcagcgatggcttctgcatgttctttgaggacagcatcatctataccacggagatggacaacctcaggcacacaacacccacagccagtccccagccccaagaagtgactttcctgagtttctctctgtcctgggaagagatgttttatgcacagaaatgtcactgcttcctggctgacatcatcatggattccatcaggcaaaaggaccccaaagccatcacagccaaggtggtctccctggccaatcggctgtggaccctgcacatcagccccaagcagtttgtggtagatttgctggccatcaccggcttcaaggatgaccggcacacccaggagcgcctgtacagctgggtggagcttacactgcccttcgccaggaaatatggccgatgcatggacctgctcatccagaggggcctgtctaggtctgtctcttactccatcctgggaaagtacctacaagaggactagggtgcccagagatgcagcccctcatgccccacccgccaagtctcattttaattggagatagcccagaatgcatgtgcccatcagagggtacatatcagtctattttttattataaacaaataaaagattaaatcacacatcaaa

SEQ ID NO: 281560 - DNA, 524 bp, Homo sapiens
atttaatccacagaacaactcctggtggagccatcgttagcccaattttacagctgaggaaaccgacatgcacagaagttacgcacattggatcaggccacacagctggaaacccagatgagcaggaagacacgcgctcggggctggagacgtgcacacctggggaaggaggtgcacagcccgcgtcctcagttcctccgcaaagtcagcttcgccgcagcccacctcccacccaggaccggccccaaagcccttctcgattacctcgaaaggatctccggcactgaagtcgaaggagaggatgaggtgaacctcccgcgtcgggggcagcacgagtgggaagggagtgttgatggctaaaccagcatccaccaggtggaggtgcttccggctgctcattatcttgtcccggatgccacctgtggtgcccaggaagaaagaggatcagctgcttctggggactgaaagcaagacttggaaatggaaggcagagagggggatgggaaaatgatcgttgtcagtgt

SEQ ID NO: 281561 - DNA, 236 bp, Homo sapiens
atatgttctcactcagcaaacatttattgagggccactatttgcccaggaaacccagatgagcaggaagacacgcgctcggggctggagacgtgcacacctggggaaggaggtgcacaggtgaggagctaggctgttgcagttcaaactggtatgaatgggcaggcaggacgcagaagcggggagagtcatctgccaggaagaggggcccgggaaggtctgggatggctttggatc

SEQ ID NO: 281562 - DNA, 452 bp, Homo sapiens
aactcttctagacaaagccaggtccagctggggagtgacggggaggccactctgctggccaggctgaccgagggctgcagggcacagcagagcctggcagggctggggtcacaggcactgcccagggctccttgggcctcccttccacagctgagaagacctctccacggagctccggacggctggggtctggctctgaggagccatgagcacagagggccccagcctcgccagctccccagccatcagccccctcgcctttctctcagctcccgtcactcccgggacccttgcagaggcaactgaccccctccccatgctcatcgccctggcctgcatcttcctcctgctggccacctgtctgctgttcatgacgctctgcaagccggccgcgctggacccgagccgccgcagggctcacgagtgcatgccccaccaccctgggagcccca

SEQ ID NO: 281563 - DNA, 539 bp, Homo sapiens
cttgattcccaggctggagtgcagtggcacgatcttggctcactgcagtcgccacctcccggattcaagcaattctcctgccccagcctctcaagtagctgggattacaggcgcccaccaccacacccggcaaattttgtatttttagtagagacggggtttcatcatgttggtcaggctggtctcgaactcctgacctcaggtgatccatccacctcggcctcccagagagctgggattacaggcgtgagacaccgtgcccggcaaaaatattttaaaataagtcagaggtgcaggtttaatccaaatcccccatcagcctcctggtcctgggacaaatattgtctgcaccgtgctcacacacacagacacccaccggacacactcgcttggaggcccaggacatggggaagttgggcccagctgtgtcaaaggccaatcctgcccctccttgctgtgtgacctcaggcaagcaactgtcctctctgagcccgagcctgcctgaccccctgcttttcactctagcaagaatgctgtgg

SEQ ID NO: 281564 - DNA, 1344 bp, Homo sapiens
acacttaacaggacttcggcattcccctgaatacagactagatcagagattttatttttttaattgaaaagtaacttgggttctctttagaaacccttatttggtgtgcgcatctggctatttcacagagatttcagttttgcaaagaagtcggagttgatttcttccctcagacaagctattggttgttggtgggcaacagaagttgctcagcatagacaggggaaaaaacggttacggatgagactgaaagaaaacctcaaaggagaactctgagaattcatctcaggatgaagctgcaagggcaaaggagaagtacttgtgacacaagcaaatgggtccattgatcaacagatgcaagaagattcttctcccaactactgtacctcctgcaacgatgagaatctggctccttggaggcctgctgccattcctgctgctcctctctggcctgcagagacccacagagggttctgaggttgcaattaaaatcgacttcgacttcgcaccaggttcttttgatgatcagtaccaaggctgtagcaaacaggttatggagaaactaactcaaggggattatttcacaaaagacatagaagcccagaagaattattttaggatgtggcaaaaagcccacttagcctggcttaaccaaggaaaagttctaccccagaacatgactaccacacacgctgtggctattttgttttatacattgaacagcaatgttcattctgactttactagagccatggcctctgttgccaggactccacagcagtatgaacgttcattccacttcaaatatttacactactacctcacctcagcaatccagctgctgaggaaagacagcatcatggagaatggcactctgtgctatgaggtgcattataggacgaaggatgtccactttaatgcctacacaggggccaccattcgatttggccaattcctctccacatccctcctgaaagaagaggcacaggagtttgggaaccagacactatttaccatattcacctgcctgggtgcacctgtacagtacttctccctcaagaaggaagtcttgatccctccctatgagctgtttaaagttataaatatgagctaccacccaagaggagactggttgcagttgaggtcaactgggaacctgagcacatataactgtcagctgctaaaagcttccagcaagaaatgcatccctgatcctatagctattgcatctctctcctttttgaccagtgtcatcatcttttccaaaagcagagtataaagaaatcttgtggctccttttatttaaaaaaaatatttaaataaaatcttttttattggcttttg

SEQ ID NO: 281565 - DNA, 1533 bp, Homo sapiens
aaacgacgctagctgcccacccctcttagttttccgcctccgacttccctaagggcatttccggttccggctgcgggccggtgaagatatggcggcgtctgcgtctgcagctgcaggggaggaggactgggtccttccctctgaagttgaagtattggagtccatctatctagatgaactacaggtgattaaaggaaatggcagaacttcaccatgggagatctacatcactttgcatcctgccactgcagaggaccaggattcacagtatgtctgcttcactctggtgcttcaggtcccagcagagtatccccatgaggtgccacagatctctatccgaaatccccgaggactttcagatgaacagatccacacgatcttacaggtgctgggccacgtggccaaggctgggctgggcactgccatgctgtatgaactcattgagaaagggaaggaaattctcacagataacaacatccctcatggccagtgtgtcatctgcctctatggtttccaggagaaggaggcctttaccaaaacaccctgttaccactacttccactgccactgccttgctcggtacatccagcacatggagcaagagctgaaggcacaaggacaggagcaggaacaggaacggcagcatgctacaaccaaacagaaggcagtcggtgtgcagtgtccagtgtgcagagagcccctcgtgtatgatcttgcctcactgaaagcagcccctgaaccccaacagcccatggagctgtaccagcccagtgcagagagcttgcgccagcaagaagaacgcaagcggctctaccagaggcagcaggagcgggggggaatcattgaccttgaggctgagcgaaaccgatacttcatcagccttcagcagcctcctgcccctgcggaacctgagtcagctgtagatgtctccaaaggatcccaaccacccagcacccttgcagcagaactatccacctcaccagccgtccaatccactttgccacctcctctgcctgtggcgacccagcacatatgtgagaagattccagggaccaggtcaaatcagcaaaggttgggcgaaacccagaaagctatgctagatccccccaagcccagtcgaggtccctggcgacagcccgaacggaggcacccaaagggaggggagtgccacgcccctaaaggtacccgtgacacccaggaactgccacctcctgaggggcccctcaaggagcccatggacctaaagccagaaccccatagccaaggagttgaaggtcctccacaagagaaggggcctggcagctggcaggggcccccaccccgcaggactcgggactgtgttcgctgggagcgctctaaaggccggacacccggttcttcctaccctcgcctgcctcggggccagggagcataccggcctggtactcggagggagtccctgggcctggaatctaaggatggttcctagcaggacttggtggggggaacagggaattggggatgggagggaggcaataaagatatttggccttc

SEQ ID NO: 281566 - DNA, 1796 bp, Homo sapiens
aaacgacgctagctgcccacccctcttagttttccgcctccgacttccctaagggcatttccggttccggctgcgggccggtgaagatatggcggcgtctgcgtctgcagctgcaggggaggaggactgggtccttccctctgaagttgaagtattggagtccatctatctagatgaactacaggtgattaaaggaaatggcaggtatgtattcaaccagtggtgggcaggagtccccctagtaatgaggagaggttctatgctgaatttgggtcttaagacattgtgagccttgattcagagataatatttctcttgtgtagacaaaagctattcctttaatcctaccccaaaagaaagagtccaatgtgtacttcctttgcccacttcactgtctcagccccatcctccccagcccccaagcccctacccagtcacatctgcgtgtccacttgatccacctgcagaacttcaccatgggagatctacatcactttgcatcctgccactgcagaggaccaggattcacagtatgtctgcttcactctggtgcttcaggtcccagcagagtatccccatgaggtgccacagatctctatccgaaatccccgaggactttcagatgaacagatccacacgatcttacaggtgctgggccacgtggccaaggctgggctgggcactgccatgctgtatgaactcattgagaaagggaaggaaattctcacagataacaacatccctcatggccagtgtgtcatctgcctctatggtttccaggagaaggaggcctttaccaaaacaccctgttaccactacttccactgccactgccttgctcggtacatccagcacatggagcaagagctgaaggcacaaggacaggagcaggaacaggaacggcagcatgctacaaccaaacagaaggcagtcggtgtgcagtgtccagtgtgcagagagcccctcgtgtatgatcttgcctcactgaaagcagcccctgaaccccaacagcccatggagctgtaccagcccagtgcagagagcttgcgccagcaagaagaacgcaagcggctctaccagaggcagcaggagcgggggggaatcattgaccttgaggctgagcgaaaccgatacttcatcagccttcagcagcctcctgcccctgcggaacctgagtcagctgtagatgtctccaaaggatcccaaccacccagcacccttgcagcagaactatccacctcaccagccgtccaatccactttgccacctcctctgcctgtggcgacccagcacatatgtgagaagattccagggaccaggtcaaatcagcaaaggttgggcgaaacccagaaagctatgctagatccccccaagcccagtcgaggtccctggcgacagcccgaacggaggcacccaaagggaggggagtgccacgcccctaaaggtacccgtgacacccaggaactgccacctcctgaggggcccctcaaggagcccatggacctaaagccagaaccccatagccaaggagttgaaggtcctccacaagagaaggggcctggcagctggcaggggcccccaccccgcaggactcgggactgtgttcgctgggagcgctctaaaggccggacacccggttcttcctaccctcgcctgcctcggggccagggagcataccggcctggtactcggagggagtccctgggcctggaatctaaggatggttcctagcaggacttggtggggggaacagggaattggggatgggagggaggcaataaagatatttggccttc

SEQ ID NO: 281567 - DNA, 1493 bp, Homo sapiens
aaacgacgctagctgcccacccctcttagttttccgcctccgacttccctaagggcatttccggttccggctgcgggccggtgaagatatggcggcgtctgcgtctgcagctgcaggggaggaggactgggtccttccctctgaagttgaagtattggagtccatctatctagatgaactacaggtgattaaaggaaatggcagaacttcaccatgggagatctacatcactttgcatcctgccactgcagaggaccaggattcacatatccccatgaggtgccacagatctctatccgaaatccccgaggactttcagatgaacagatccacacgatcttacaggtgctgggccacgtggccaaggctgggctgggcactgccatgctgtatgaactcattgagaaagggaaggaaattctcacagataacaacatccctcatggccagtgtgtcatctgcctctatggtttccaggagaaggaggcctttaccaaaacaccctgttaccactacttccactgccactgccttgctcggtacatccagcacatggagcaagagctgaaggcacaaggacaggagcaggaacaggaacggcagcatgctacaaccaaacagaaggcagtcggtgtgcagtgtccagtgtgcagagagcccctcgtgtatgatcttgcctcactgaaagcagcccctgaaccccaacagcccatggagctgtaccagcccagtgcagagagcttgcgccagcaagaagaacgcaagcggctctaccagaggcagcaggagcgggggggaatcattgaccttgaggctgagcgaaaccgatacttcatcagccttcagcagcctcctgcccctgcggaacctgagtcagctgtagatgtctccaaaggatcccaaccacccagcacccttgcagcagaactatccacctcaccagccgtccaatccactttgccacctcctctgcctgtggcgacccagcacatatgtgagaagattccagggaccaggtcaaatcagcaaaggttgggcgaaacccagaaagctatgctagatccccccaagcccagtcgaggtccctggcgacagcccgaacggaggcacccaaagggaggggagtgccacgcccctaaaggtacccgtgacacccaggaactgccacctcctgaggggcccctcaaggagcccatggacctaaagccagaaccccatagccaaggagttgaaggtcctccacaagagaaggggcctggcagctggcaggggcccccaccccgcaggactcgggactgtgttcgctgggagcgctctaaaggccggacacccggttcttcctaccctcgcctgcctcggggccagggagcataccggcctggtactcggagggagtccctgggcctggaatctaaggatggttcctagcaggacttggtggggggaacagggaattggggatgggagggaggcaataaagatatttggccttc

SEQ ID NO: 281568 - DNA, 1233 bp, Homo sapiens
tcggctaggtggaggctggtgtgaatcggccgaggcccgaaatccccgaggactttcagatgaacagatccacacgatcttacaggtgctgggccacgtggccaaggctgggctgggcactgccatgctgtatgaactcattgagaaagggaaggaaattctcacagataacaacatccctcatggccagtgtgtcatctgcctctatggtttccaggagaaggaggcctttaccaaaacaccctgttaccactacttccactgccactgccttgctcggtacatccagcacatggagcaagagctgaaggcacaaggacaggagcaggaacaggaacggcagcatgctacaaccaaacagaaggcagtcggtgtgcagtgtccagtgtgcagagagcccctcgtgtatgatcttgcctcactgaaagcagcccctgaaccccaacagcccatggagctgtaccagcccagtgcagagagcttgcgccagcaagaagaacgcaagcggctctaccagaggcagcaggagcgggggggaatcattgaccttgaggctgagcgaaaccgatacttcatcagccttcagcagcctcctgcccctgcggaacctgagtcagctgtagatgtctccaaaggatcccaaccacccagcacccttgcagcagaactatccacctcaccagccgtccaatccactttgccacctcctctgcctgtggcgacccagcacatatgtgagaagattccagggaccaggtcaaatcagcaaaggttgggcgaaacccagaaagctatgctagatccccccaagcccagtcgaggtccctggcgacagcccgaacggaggcacccaaagggaggggagtgccacgcccctaaaggtacccgtgacacccaggaactgccacctcctgaggggcccctcaaggagcccatggacctaaagccagaaccccatagccaaggagttgaaggtcctccacaagagaaggggcctggcagctggcaggggcccccaccccgcaggactcgggactgtgttcgctgggagcgctctaaaggccggacacccggttcttcctaccctcgcctgcctcggggccagggagcataccggcctggtactcggagggagtccctgggcctggaatctaaggatggttcctagcaggacttggtggggggaacagggaattggggatgggagggaggcaataaagatatttggccttc

SEQ ID NO: 281569 - DNA, 1913 bp, Homo sapiens
aaacgacgctagctgcccacccctcttagttttccgcctccgacttccctaagggcatttccggttccggctgcgggccggtgaagatatggcggcgtctgcgtctgcagctgcaggggaggaggactgggtccttccctctgaagttgaagtattggagtccatctatctagatgaactacaggtgattaaaggaaatggcaggtatgtattcaaccagtggtgggcaggagtccccctagtaatgaggagaggttctatgctgaatttgggtcttaagacattgtgagccttgattcagagataatatttctcttgtgtagacaaaagctattcctttaatcctaccccaaaagaaagagtccaatgtgtacttcctttgcccacttcactgtctcagccccatcctccccagcccccaagcccctacccagtcacatctgcgtgtccacttgatccacctgcagaacttcaccatgggagatctacatcactttgcatcctgccactgcagaggaccaggattcacagtatgtctgcttcactctggtgcttcaggtcccagcagaggtgaagcccctactgtgtggcagcaaagggaggaaggggagagtccctggggtggatcacttcagcagtaacttgttatttgcccccactagtatccccatgaggtgccacagatctctatccgaaatccccgaggactttcagatgaacagatccacacgatcttacaggtgctgggccacgtggccaaggctgggctgggcactgccatgctgtatgaactcattgagaaagggaaggaaattctcacagataacaacatccctcatggccagtgtgtcatctgcctctatggtttccagtgccctacatctgccttccctctaggagaaggaggcctttaccaaaacaccctgttaccactacttccactgccactgccttgctcggtacatccagcacatggagcaagagctgaaggcacaaggacaggagcaggaacaggaacggcagcatgctacaaccaaacagaaggcagtcggtgtgcagtgtccagtgtgcagagagcccctcgtgtatgatcttgcctcactgaaagcagcccctgaaccccaacagcccatggagctgtaccagcccagtgcagagagcttgcgccagcaagaagaacgcaagcggctctaccagaggcagcaggagcgggggggaatcattgaccttgaggctgagcgaaaccgatacttcatcagccttcagcagcctcctgcccctgcggaacctgagtcagctgtagatgtctccaaaggatcccaaccacccagcacccttgcagcagaactatccacctcaccagccgtccaatccactttgccacctcctctgcctgtggcgacccagcacatatgtgagaagattccagggaccaggtcaaatcagcaaaggttgggcgaaacccagaaagctatgctagatccccccaagcccagtcgaggtccctggcgacagcccgaacggaggcacccaaagggaggggagtgccacgcccctaaaggtacccgtgacacccaggaactgccacctcctgaggggcccctcaaggagcccatggacctaaagccagaaccccatagccaaggagttgaaggtcctccacaagagaaggggcctggcagctggcaggggcccccaccccgcaggactcgggactgtgttcgctgggagcgctctaaaggccggacacccggttcttcctaccctcgcctgcctcggggccagggagcataccggcctggtactcggagggagtccctgggcctggaatctaaggatggttcctagcaggacttggtggggggaacagggaattggggatgggagggaggcaataaagatatttggccttc

SEQ ID NO: 281570 - DNA, 1008 bp, Homo sapiens
aaacgacgctagctgcccacccctcttagttttccgcctccgacttccctaagggcatttccggttccggctgcgggccggtgaagatatggcggcgtctgcgtctgcagctgcaggggaggaggactgggtccttccctctgaagttgaagtattggagtccatctatctagatgaactacaggtgattaaaggaaatggcagaacttcaccatgggagatctacatcactttgcatcctgccactgcagaggaccaggattcacagtatgtctgcttcactctggtgcttcaggtcccagcagagtatccccatgaggtgccacagatctctatccgaaatccccgaggactttcagatgaacagatccacacgatcttacaggtgctgggccacgtggccaaggctgggctgggcactgccatgctgtatgaactcattgagaaagggaaggaaattctcacagataacaacatccctcatggccagtgtgtcatctgcctctatggtttccaggagaaggaggcctttaccaaaacaccctgttaccactacttccactgccactgccttgctcggtacatccagcacatggagcaagagctgaaggcacaaggacaggagcaggaacaggaacggcagcatgctacaaccaaacagaaggcagtcggtgtgcagtgtccagtgtgcagagagcccctcgtgtatgatcttgcctcactgaaagcagcccctgaaccccaacagcccatggagctgtaccagcccagtgcagagagcttgcgccagcaagaagaacgcaagcggctctaccagaggcagcaggagcgggggggaatcattgaccttgaggctgagcgaaaccgatacttcatcagccttcagcagcctcctgcccctgcggaacctgagtcagctgtagatgtctccaaaggatcccaaccacccagcacaccgtcacgaacgtatacaccgtcgacatcgcttccacctaggggatcctctaa

SEQ ID NO: 281571 - DNA, 165 bp, Homo sapiens
gttagtctactcctgtctctctagggtccttccctctgaagttgaagtattggagtccatctatctagatgaactacaggtgattaaaggaaatggcaggtatgtattcaaccagtggtgggcaggagtccccctagtaatgaggagaggttctatgctgaattt

SEQ ID NO: 281572 - DNA, 1566 bp, Homo sapiens
aaacgacgctagctgcccacccctcttagttttccgcctccgacttccctaagggcatttccggttccggctgcgggccggtgaagatatggcggcgtctgcgtctgcagctgcaggggaggaggactgggtccttccctctgaagttgaagtattggagtccatctatctagatgaactacaggtgattaaaggaaatggcagaacttcaccatgggagatctacatcactttgcatcctgccactgcagaggaccaggattcacagtatgtctgcttcactctggtgcttcaggtcccagcagagtatccccatgaggtgccacagatctctatccgaaatccccgaggactttcagatgaacagatccacacgatcttacaggtgctgggccacgtggccaaggctgggctgggcactgccatgctgtatgaactcattgagaaagggaaggaaattctcacagataacaacatccctcatggccagtgtgtcatctgcctctatggtttccaggagaaggaggcctttaccaaaacaccctgttaccactacttccactgccactgccttgctcggtacatccagcacatggagcaagagctgaaggcacaaggacaggagcaggaacaggaacggcagcatgctacaaccaaacagaaggcagtcggtgtgcagtgtccagtgtgcagagagcccctcgtgtatgatcttgcctcactgaaagcagcccctgaaccccaacagcccatggagctgtaccagcccagtgcagagagcttgcgccagcaagaagaacgcaagcggctctaccagaggcagcaggagcgggggggaatcattgaccttgaggctgagcgaaaccgatacttcatcagccttcagcagcctcctgcccctgcggaacctgagtcagctgtagatgtctccaaaggatcccaaccacccagcacccttgcagcagaactatccacctcaccagccgtccaatccactttgccacctcctctgcctgtggcgacccagcacatatgtgagaagattccagggaccaggtcaaatcagcaaaggttgggcgaaacccagaaagctatgctagatccccccaagcccagtcgaggtccctggcgacagcccgaacggaggcacccaaagggaggggagtgccacgcccctaaaggtacccgtgacacccaggaactgccacctcctgaggggcccctcaaggagcccatggacctaaagccagaaccccatagccaaggagttgaaggtcctccacaagagaaggggcctggcagctggcaggggcccccaccccgcaggactcgggactgtgttcgctgggagcgctctaaaggccggacacccggttcttcctaccctcgcctgcctcggggccagggagcataccggcctggtactcggagggagtccctgggcctggaatctaaggatggttcctagcaggacttggtggggggaacagggaattggggatgggagggaggcaataaagatatttggccttctttggctttctttgcttagcagcgcctagcctg

SEQ ID NO: 281573 - DNA, 1888 bp, Homo sapiens
aaacgacgctagctgcccacccctcttagttttccgcctccgacttccctaagggcatttccggttccggctgcgggccggtgaagatatggcggcgtctgcgtctgcagctgcaggggaggaggactgggtccttccctctgaagttgaagtattggagtccatctatctagatgaactacaggtgattaaaggaaatggcaggtatgtattcaaccagtggtgggcaggagtccccctagtaatgaggagaggttctatgctgaatttgggtcttaagacattgtgagccttgattcagagataatatttctcttgtgtagacaaaagctattcctttaatcctaccccaaaagaaagagtccaatgtgtacttcctttgcccacttcactgtctcagccccatcctccccagcccccaagcccctacccagtcacatctgcgtgtccacttgatccacctgcagaacttcaccatgggagatctacatcactttgcatcctgccactgcagaggaccaggattcacagtatgtctgcttcactctggtgcttcaggtcccagcagaggtgaagcccctactgtgtggcagcaaagggaggaaggggagagtccctggggtggatcacttcagcagtaacttgttatttgcccccactagtatccccatgaggtgccacagatctctatccgaaatccccgaggactttcagatgaacagatccacacgatcttacaggtgctgggccacgtggccaaggctgggctgggcactgccatgctgtatgaactcattgagaaagggaaggaaattctcacagataacaacatccctcatggccagtgtgtcatctgcctctatggtttccaggagaaggaggcctttaccaaaacaccctgttaccactacttccactgccactgccttgctcggtacatccagcacatggagcaagagctgaaggcacaaggacaggagcaggaacaggaacggcagcatgctacaaccaaacagaaggcagtcggtgtgcagtgtccagtgtgcagagagcccctcgtgtatgatcttgcctcactgaaagcagcccctgaaccccaacagcccatggagctgtaccagcccagtgcagagagcttgcgccagcaagaagaacgcaagcggctctaccagaggcagcaggagcgggggggaatcattgaccttgaggctgagcgaaaccgatacttcatcagccttcagcagcctcctgcccctgcggaacctgagtcagctgtagatgtctccaaaggatcccaaccacccagcacccttgcagcagaactatccacctcaccagccgtccaatccactttgccacctcctctgcctgtggcgacccagcacatatgtgagaagattccagggaccaggtcaaatcagcaaaggttgggcgaaacccagaaagctatgctagatccccccaagcccagtcgaggtccctggcgacagcccgaacggaggcacccaaagggaggggagtgccacgcccctaaaggtacccgtgacacccaggaactgccacctcctgaggggcccctcaaggagcccatggacctaaagccagaaccccatagccaaggagttgaaggtcctccacaagagaaggggcctggcagctggcaggggcccccaccccgcaggactcgggactgtgttcgctgggagcgctctaaaggccggacacccggttcttcctaccctcgcctgcctcggggccagggagcataccggcctggtactcggagggagtccctgggcctggaatctaaggatggttcctagcaggacttggtggggggaacagggaattggggatgggagggaggcaataaagatatttggccttc

SEQ ID NO: 281574 - DNA, 1100 bp, Homo sapiens
aaacgacgctagctgcccacccctcttagttttccgcctccgacttccctaagggcatttccggttccggctgcgggccggtgaagatatggcggcgtctgcgtctgcagctgcaggggaggaggactgggtccttccctctgaagttgaagtattggagtccatctatctagatgaactacaggtgattaaaggaaatggcagaacttcaccatgggagatctacatcactttgcatcctgccactgcagaggaccaggattcacagtatgtctgcttcactctggtgcttcaggtcccagcagagtatccccatgaggtgccacagatctctatccgaaatccccgaggactttcagatgaacagatccacacgatcttacaggtgctgggccacgtggccaaggctgggctgggcactgccatgctgtatgaactcattgagaaagggaaggaaattctcacagataacaacatccctcatggccagtgtgtcatctgcctctatggtttccaggagaaggaggcctttaccaaaacaccctgttaccactacttccactgccactgccttgctcggtacatccagcacatggagcaagagctgaaggcacaaggacaggagcaggaacaggaacggcagcatgctacaaccaaacagaaggcagtcggtgtgcagtgtccagtgtgcagagagcccctcgtgtatgatcttgcctcactgaaagcagcccctgaaccccaacagcccatggagctgtaccagcccagtgcagagagcttgcgccagcaagaagaacgcaagcggctctaccagaggcagcaggagcgggggggaatcattgaccttgaggctgagcgaaaccgatacttcatcagccttcagcagcctcctgcccctgcggaacctgagtcagctgtagatgtctccaaaggatcccaaccacccagcacccttgcagcagaactatccacctcaccagccgtccaatccactttgccacctcctctgcctgtggcgacccagcacatatgtgagaagattccagggaccaggtcaaatcagcaaagttacccactccacttcctccagaacccct

SEQ ID NO: 281575 - DNA, 1558 bp, Homo sapiens
aaacgacgctagctgcccacccctcttagttttccgcctccgacttccctaagggcatttccggttccggctgcgggccggtgaagatatggcggcgtctgcgtctgcagctgcaggggaggaggactgggtccttccctctgaagttgaagtattggagtccatctatctagatgaactacaggtgattaaaggaaatggcagaacttcaccatgggagatctacatcactttgcatcctgccactgcagaggaccaggattcacagtatgtctgcttcactctggtgcttcaggtcccagcagagtatccccatgaggtgccacagatctctatccgaaatccccgaggactttcagatgaacagatccacacgatcttacaggtgctgggccacgtggccaaggctgggctgggcactgccatgctgtatgaactcattgagaaagggaaggaaattctcacagataacaacatccctcatggccagtgtgtcatctgcctctatggtttccagtgccctacatctgccttccctctaggagaaggaggcctttaccaaaacaccctgttaccactacttccactgccactgccttgctcggtacatccagcacatggagcaagagctgaaggcacaaggacaggagcaggaacaggaacggcagcatgctacaaccaaacagaaggcagtcggtgtgcagtgtccagtgtgcagagagcccctcgtgtatgatcttgcctcactgaaagcagcccctgaaccccaacagcccatggagctgtaccagcccagtgcagagagcttgcgccagcaagaagaacgcaagcggctctaccagaggcagcaggagcgggggggaatcattgaccttgaggctgagcgaaaccgatacttcatcagccttcagcagcctcctgcccctgcggaacctgagtcagctgtagatgtctccaaaggatcccaaccacccagcacccttgcagcagaactatccacctcaccagccgtccaatccactttgccacctcctctgcctgtggcgacccagcacatatgtgagaagattccagggaccaggtcaaatcagcaaaggttgggcgaaacccagaaagctatgctagatccccccaagcccagtcgaggtccctggcgacagcccgaacggaggcacccaaagggaggggagtgccacgcccctaaaggtacccgtgacacccaggaactgccacctcctgaggggcccctcaaggagcccatggacctaaagccagaaccccatagccaaggagttgaaggtcctccacaagagaaggggcctggcagctggcaggggcccccaccccgcaggactcgggactgtgttcgctgggagcgctctaaaggccggacacccggttcttcctaccctcgcctgcctcggggccagggagcataccggcctggtactcggagggagtccctgggcctggaatctaaggatggttcctagcaggacttggtggggggaacagggaattggggatgggagggaggcaataaagatatttggccttc

SEQ ID NO: 281576 - DNA, 806 bp, Homo sapiens
agcctccgtggcctccagcagcccatggagctgtaccagcccagtgcagagagcttgcgccagcaagaagaacgcaagcggctctaccagaggcagcaggagcgggggggaatcattgaccttgaggctgagcgaaaccgatacttcatcagccttcagcagcctcctgcccctgcggaacctgagtcagctgtagatgtctccaaaggatcccaaccacccagcacccttgcagcagaactatccacctcaccagccgtccaatccactttgccacctcctctgcctgtggcgacccagcacatatgtgagaagattccagggaccaggtcaaatcagcaaaggttgggcgaaacccagaaagctatgctagatccccccaagcccagtcgaggtccctggcgacagcccgaacggaggcacccaaagggaggggagtgccacgcccctaaaggtacccgtgacacccaggaactgccacctcctgaggggcccctcaaggagcccatggacctaaagccagaaccccatagccaaggagttgaaggtcctccacaagagaaggggcctggcagctggcaggggcccccaccccgcaggactcgggactgtgttcgctgggagcgctctaaaggccggacacccggttcttcctaccctcgcctgcctcggggccagggagcataccggcctggtactcggagggagtccctgggcctggaatctaaggatggttcctagcaggacttggtggggggaacagggaattggggatgggagggaggcaataaagatatttggccttc

SEQ ID NO: 281577 - DNA, 2810 bp, Homo sapiens
aattcccagaccacaggaatacctaatgccttttttctcttcctgtctttgtccctcacactacagcggcccctcccttccctcttcaacctcatcctccctccccacaggcccagagaaccagttgggctttgttctcctgcaggctatggttcatcatgcaaatagctcctgtgtcagaaatgctttttggcttcaaataacagaaaagctaacaccagctttatcaataataatatcggtggtttacttaaggtgtccagagatggtggagaacaggattggtttcctcctcaatgtcaaggactcaaagactctttctgtggtagggccacatcctaaaccctgtatcctgtgattatttacccgacagggcaaaagagattttgcagatgcaattaaggttaaggaccttgacgtgggaagattgtgattatttacctgacagggcaaaagagattttgcagatgcaattaaggttaaggaccttgacgtgggaagattattctggattatctaggtgggcgcaatttgatcacatgggtccccagaagtggagaacctttcccacctgtagaaagccagagagctggcacctgagaaggacagaactgtcattgcaggatttgaagatgaaggggcccatgagccaaggaatgccagtgacctatagaggctaaaaaacagcaaggaaatggactctccccagagcctccagaggaatgcagccctgttgatcacatgatcaccagatggctgccccagagccaaatgtcgcttcctgagcaccatactcaaaggcaggggaagtggatggagggcaggagctccattcttgtttgccactctccttttgtcaattgggaaaaaattccagaaactctgggagccctccccttacatttcctgggtcatggggccagccctagctgctggagggactgagaacagctgttgagcagtttacctgacggcatctgccatggcttggcaggaactctggctttgggagagagcagcagcaaggtattcaagcaccacctccacccagcccctcccacatttcactcaggactgagtaaaggagacactcagatgctactcagatgctggcttcagctaagtattttgcaaagcctctcgtgtcttacaagtttgtggctatcatgacaaaatggagcagcctactatatctacatatacaactatgggggacctagttttatctcatttaccacaatgttttcaatcattttttggatgacataatttttagcctcttctctaaatgcttcctcaagctttccttgccttccagccactgcaaatgacttgcagtttcccctacatggcacctgacccttgtgcctccctccctctgcccatgcccagaaagccctttcctgtgccctctggcttcctgataaactcctatcatcttcaagagccagttcccatgccagctctccccaagtgctccactgaggcttccgtaacacctctgttcccacatcgggttgactgtctttgttttgtcattgcttgctctggctgtgtctccctcattagactgggatgccttcaaggtagggaccctatctgggtcagcttggcaccccaaagcgtaccacagcacctgattctgaggaggctctcagtagatatctgttgagtaaccagaatgtagggtggtcctgatggtttctgacattgaatagaaaacagctccctatttgatcttaaaataatcactataacctggacatactgtactagatgctgtttttgtctgacttctactctgtcaatctctttgcacctccatttgttcatctgtgaaatgaagaaaatgctcatggagttcagtgaagattaaatgaatgaatataggtagactgcctaatctggcacttgccacgcagctgacttcaatatagtagctctaatattatggtccttgaggatcttactgtcttatggcccagaactgcatttgattaaagaaggctcccctaaaaaaagagtcatacatattccatttgtcctttcagaaggccgtgaagcatttacactctttaagacaaattcccatccaaaaatagttaagatttctaaaatattttgatgctgaaagaggtgtgcttcagttgggtggcaaatttgcttctatggaagatttttaatacaggttgtttctattttactttttctggctgaaaggattttacatttattcaaagtcaaaagggaaaagaaatccaagaactacagaagagcagttgaagtgatttatgcttgatttctaaatgcaacttatgtttatacataatttaaaactcaaagaaagcatgcttatacaatcatgtgcaactttaaactttaagaactctggatgaatacatggtggcaacagtccatgacacctgaaaacatcatttgtggagtggcgtagagttcagtgttcgcagtcgcatattacaaccatgtttcacacagccctgctcggtttgattttctccacgtggttgataattgtcttcagttgctgctaagtgattttgcaaatttcatttataatcctcgccctacaattacctaagtactgtttctgcaggttaacctgtatgctacgctcagtcatatacctttcaaagttactaatgcaactgccaaagagggacagtgtcaatatcattgtcttcattagaaggacggctgccccacactgtgagaacactgctgttcctaacagtagtttacttttagagggatgtgagaattagtttgaccttaattccagatgtgcatgc

SEQ ID NO: 281578 - DNA, 691 bp, Homo sapiens
aattcccagaccacaggaatacctaatgccttttttctcttcctgtctttgtccctcacactacagcggcccctcccttccctcttcaacctcatcctccctccccacaggcccagagaaccagttgggctttgttctcctgcaggctatggttcatcatgcaaatagctcctgtgtcagaaatgctttttggcttcaaataacagaaaagctaacaccagctttatcaataataatatcggtggtttacttaaggtgtccagagatggtggagaacaggattggtttcctcctcaatgtcaaggactcaaagactctttctgtggtagggccacatcctaaaccctgtatcctgtgattatttacccgacagggcaaaagagattttgcagatgcaattaaggttaaggaccttgacgtgggaagattgtgattatttacctgacagggcaaaagagattttgcagatgcaattaaggttaaggaccttgacgtgggaagattattctggattatctaggtgggcgcaatttgatcacatgggtccccagaagtggagaacctttcccacctgtagaaagccagagagctggcacctgagaaggacagaactgtcattgcaggatttgaagatgaaggggcccatgagccaaggaatgccagtgacccccttctgtcgtcttttggcagc

SEQ ID NO: 281579 - DNA, 642 bp, Homo sapiens
ggactatgtttgaggggtgttgtatgaccccgttttccatacccagccaacttgtcatgtgacaagtccacagaaagatgttatatgacaggaatctatgaactagtcttccctgaaatgtacctgactacagctaacatcatatcacatgatgaaagaccgcgttgttttcccctgaggttggcatggggacctattgctcacaggaagaaaaaaacatcgtccttattttgtgacttctggcaactgtctttttccgaggaagccccttcccttctgccctgcctctgagttcaagccgggatgcagctcctagtgttttcaagcgtcttacagatggagatcagccccgtcttcctccaacgtccccaccccgcatcggagtcaggactccacggtgctgtggtcagcacggctgcatggtcctgcgaccctgagccccagtgggctctgactgtggttaccagcgccttaggagacagagtaacagtctggaagcagaaacagagactgtccatttcataaacagccacatccgcaaggtttattcctggatcacaaaccaaccccactgaccaaactcccaagtcactttatattaaacttgttatcaaatcacccacataaatatatataataaaa

SEQ ID NO: 281580 - DNA, 6980 bp, Homo sapiens
ctcttgtgctctcctctagttttactgaactgccagtactttgaacacactttgtgctttttctcctccaggtctttgtgcatactgtttcctctgcctggaatactcttctttctctttacctgactcgtttctgctcttacttcaagtctcagattctaggaagctttccatcaacctgctatcactgggacgagttggccatcccctgtgcttctgtagctcctatgaaatcataatagttgaaatgtgatgtttaaatgtttacttggcattctcctctactgaactctaagctttgtgagggtagtgatggtggctttgcctattgttttgtttcccttaaatctaaacgcagtgcctggcacatagtagcctccagtaaatgcttgtttaatgaacaaacaaacctgtgaagtgagtgatagagtgcttagtccccttcagttttcaggatggagagatggagaataaggacctcacacaaaatcacacagtacttggtggaagaagctgagctatgacctgccttccttcagaggaatgcactttgctttggaagatatgaagaaattcccagtacattgtctttcctattgggtctgtgtgagaacaggctgatagatgcctctgtgtcaagctgagctcccagactctgatacaggctggggatgatgagaagaaccagaggacgatcactgtcaaccctgcccacatggggaaagcattcaaggttatgaatgaactgcggagtaaacagctgttgtgtgacgtgatgattgtggcagaagatgtcgagatagaagcccaccgtgtggtcctggcagcctgcagcccctacttctgtgcgatgttcacaggtgacatgtctgagagtaaagccaaaaagatagaaatcaaggacgtggatgggcagacgctgagtaagctgattgactacatctatactgctgaaatcgaggtgactgaagagaatgtccaggtgctgctcccggcagccagcttgctgcagctcatggatgttcggcagaactgctgtgacttcctgcagtctcagttgcatcccaccaattgcctgggcatccgtgcgtttgcagatgtacacacctgcactgaccttctgcagcaggccaatgcctacgcagagcagcactttccagaggtgatgctaggagaagaatttcttagcctgagtctggaccaggtgtgcagcttgatatccagcgacaagctgaccgtttcttcagaagagaaggtgtttgaagctgtgatctcatggatcaattatgagaaagaaaaccgtttagagcacatggcaaagctgatggaacatgtccgacttcctctcttacctagggactacctagtccaaacggttgaagaagaagctttgataaagaataacaacacctgtaaagacttcctcattgaggccatgaaataccatctcctccctctggatcagagactattgattaagaacccaaggaccaagcccaggactccagtcagccttcccaaggtcatgattgtggttggcggccaggcacccaaggcaatccgcagtgtggagtgctatgatttcgaggaggaccggtgggatcagattgctgagcttccttccagaagatgcagagcaggtgtggtgttcatggctggccacgtgtatgccgtgggagggtttaatggctcactgcgggtgcggacagtggatgtgtatgacggcgtgaaggaccagtggacgtccattgccagcatgcaggagcgccggagcacactgggcgcagcggtgctcaatgacttgctctacgcagtgggaggctttgatggcagtactggcctagcatcggtggaagcctacagctacaagaccaacgagtggttctttgtggccccgatgaacacgcggcagagcagtgtgggtgtgggcgttgtggaggggaagctatatgctgttgggggttatgatggagcttcccgccagtgtctgagcactgtggaacagtacaacccagcgaccaatgaatggatatacgtggcggacatgagcacccgccgcagtggcgcaggggttggagtgcttagcggacagctgtacgccacaggtgggcatgatgggcctttggtgaggaagagcgttgaggtttacgatcctggaacaaatacctggaagcaagtggcagacatgaacatgtgccggcgcaacgcaggggtctgtgcagtaaatgggctcctgtatgtggttggaggggatgatggatcctgcaacttggcttcggtggagtactacaatcctgtcactgacaaatggacgctgcttccaacgaacatgagcacggggcggagctatgcaggtgttgccgtgattcacaagtccttgtgacccaaactcctactgccaggaggtggaggaaggagcaggtgctgcctgtgactctgaacagcaggaccttggtgactggattcaacttgcttgggagggtctgtgctgctgtgagaaccgctctcctctgacttggcagactggtgttgttcatcgcagtgtggacaccattacccacccccgttcccctgaggtgctctggcctatgccctgagcaaggggggtcttgacatccccaggcagcacctttgggctttgttttggtgtttctacagggacaatacagaccctggagtgtgtgtgtgtgtgtgtgtgtgtagaccatggtgtttctctatgtttctctaagttggggggtgagcgtgtgtgacagtctactggatttctttactactgatcctttcgctgtgttaaaaatcaagtcacagagacctctcttctggatttgtcccatggggaccctgagactactaaagctgctttcttctgaaggtccagttggacagtctgggaatgtccagaaataaccagtgagaggggcagttctctggccacacccacttatgtactttaactactgtgactttgtctgcagaagagctggaaaattctcgaagctgcaccgtgtcctctgtgtgctagaataagggacaaatgggttccctgtgcttctcagctcactgtttttccttgagttctcctacaggaagcagatgagaactgcccagtcttcaggtttaggccattggtctttgatgtcatagattccaggcctgggaggtgttatgtctcttcagctgggaaaactagctcttcagagaagcctcgggtaacactgaaaaacaaaacaaaacaaaacaaaaacaggaaaaaaacaaaaaaccaaagtggtaaggattcagttcctgcctataatggtctcagagagggtcctacttttaggttttcccaggacaggacagtccccatttatacttattatcccagtttaattattcacagcaccccattttactcagaagtgttctggtctggaggataaataagaggtcaccctcctccagacccaaagatagatttgtgcctgtgttggatggggtcgtgtgtgattcagatggacattggatggcttcaaaggaatataccactagagctggcccttggcactttgtgacagtggtcaagtctgtctaatgtccttgtcttctttttcttgtgctttccccctattccagggtgtgcaccctctccccaacccccaagaaccccactactgctttccctgtgaggtaggagatatcagtgggtcttggatttgaggcttcctaagatgtgcttgcattttaaaaagggagcttggtgagagctttgctaattcacaggtaaaaattattaacaatagaacttcaagcatcttgaggagcgggcatttgagggggcatggagtaatttgtatttaaaaaaccttaaagttgtgctgttcctaaactagcaaattgctcatgctgaaatttctggcataagcaggggaagtcttgtgtctggagaatagtctcataccttgcagtctgggacaccctccctactttgagaatccacctacaggaagccaaggaactttataaatcctgatgttggacttctgatacgactgggctacttccaagcaggtgctgcaggagattggcatcccccagcccctgcagttagaaaccccgaagtcttcccagccagtgagccactttgtgtatttactgtatatttattgtgccctaaatgtgcaactctcctaaagacaaaacttctctttctgatgttaagcacatgttacttcaacaagatgcttggagaacaacaaggtacccagaatttttagaagccttcagaagaggctaaaatatccagctttgggggacctggaagaaatgtctccaaaggaagcaaggcatgttttagttgagtgctctggtctcactatgaagtggggatgactgtggcttcataactctacctggctgtgggttggaagctgatggaatgagaaatgtcctttctccttctctgaggaaattttgagacttgtttcggtgtgtctgtgtgatggggatgaggctggggttgggatctgatgtatgccattcacagaagctctcaatttcagatgataggtgaattccctgcccctcccccaccactgagaagctagactttcatgcgggagaggctacttttatgtgtcgtcttccggggaagggtccctccactgaaagctagccagtcatgttttctgtttttggatttttgcaattggtttcacctcatgtctccctccctacaaagcactgcctctactgggcgtgctgccaaggccatgtgcactccatcctcatgtatcctttttcacggggaccagaacactggtacgtcatcaccaaagccaatctgctctagctgcccacagatgccaccaaaacctgctatctcttcatcaccaggtacgattctctttccacagtggacacagcaggctattttctagtttgtgctggtcacgtggtagatgaagcctcttactgccccacttagggtggccacggctgcttgtgaatgcagctttgccagtggcatatctgtcatctgattgcggtggtgaaatggaattgaggcccaaggttagaagcagccgagacgccacttggatactgatttgaacaatgtagaagtcagattctgaattccaaagttatttctcataagtacccaatggcatctctccatctacaaagttgcagtattatgcaaataaaactgacctcattttctgctatgcaataagaatacttaattctagttcccgacaagccagttgcaatatcccctaagatgctttttgagctgtcttactttgatatctgttgtgtaacgtttgtatatttctgagccagatcctttcaaagattgcctttttataaaattgaagctatagcttttaggctaaaattttaacgtagatatttttataagatatttttttcaagagtttgaatcgctttttattgtccatggtaatgaaatgttgtgttctttgcatcattcactctcaaacgtagttcatgcctgtagctctcttccttttgtttctcacccttcagaaacatatttttcagtagctccaggtagatgagcctttttttttttttttttaaataccatattcaagggagtctgctgaattttaaaacgcagtcactggtgtttcttgaattgctagggactgatgttatgttcgactcagcacttgcccgtctgtattgattgtgtctttttttttttttttggagtctgctttctgtgggggtgaggccgggctgtctcgtggtggctcccactgacgggcactgagcctggtaccctgtggcatggagaagcctcagggaaaggcctgcccccccagcacatactcccatagtgtcctaggtccagccgaccattccttattctcttctatctccttgttgatctgaagcttccaatagcttgaggcctttgctgctggatgatgccctttttgggagcatcttgtctctaacctttaaaagaggggtcaatcctcatgatccctgtgtgttaagcatatgctttgcaggtgctcacactacacttacaacttgcttcttgagctatgtctctactccaggctctgttttgtgtatttatctgccatttgcatcatggtttttaaaatttattattattattattattgttgggacaggtgccatttaaattgcctccatgctccccatttgcacctagctggatcaagttgggaggctgagcaaactcatattccagttagttggagtttttaaaggctctgtttgcctggagaagcaaggaggttagaatgtaatttttttaagcgtttgcactatttagagtcctaagcccctcatgttcagctgtgctgtgtttctactgaccaagcaggagagccagcagcacttccagcatttgggaatggaagagatttcttctgtagtggataattacagcctcatagcccctgtgcagccttcgtcatgggactcagtgactcatggatatagcatcagccatggcaggaatgcacaggactgtggcatttgcagcatcaaatcaccctagtgccatgtttggttatgagattgtaaattattcgctcccccgtcctcccctcccctcattttcagtggcaatagaggacccttgttgtacttcttgtttaatttgcatattatgtgtaaaatgctttcgttgaaagaaaactgaagacactgaatgtgtatgtctgtgtgggtgctctgtccctgtggttgtcatagccagtcagacttgatcactgacaccccgtacaacatattgcataggtaagatcctcgatctggtgttctctgcgtggctgttagggactgtatatcttgtaaaagaacacttgtcacatgcttgatcagttacagcaatagctgaagaaacatttcctcaaatgtattattttaacaggaatcatgttctaatttcccatcctttaattttaataaaagctgaactgtgtgaa

SEQ ID NO: 281581 - DNA, 788 bp, Homo sapiens
cggcgagctactcgacaagtcgtcagcgcggctgcgccgcaggagcccgggaggcctttcgcccgaggcgggctgcgggctgctggggtctggtgcggagggccaacttctgggaataacctggctgtgggcttaaaaatcgtagtcattcattatcacgggcttctctctctcgaatacctttaacatttatcgccttgttagtctccacatccacctccgtgaaagagatggagtctcgctatatttcccagtctggcctcaaactcctgatcttaagggatccccagctcaacctctcccagcagctgggactaccgggctgtcaaatttacattaactatgagaattaagcagagtctcgctcttttgcccaggctggagcgcagtggcgtgatcttggttcactgcaacctccgcctcccaggttcaaggaagtctcctgccacagcctcctgagtagctgggattacagaatccgaaagtcatctgagttggctatctgcacgttctctctgtaccagtgaacttgaactgtggctgtggcctggattccgcattcaaacatgaccaactgacctctggttgtagggatgtcttgaagatgctgaagaacaaacacagagttcagaggatggaagaaactgttataccatctacaatgatttgaaatgccatttgcaactgcagttgaccgtgggttattgaaaccacagaaagtgaaactggataacgaaagacaggatcttgccatgttgcccaggctggagtgcagtagctgttcatat

SEQ ID NO: 281582 - DNA, 740 bp, Homo sapiens
tttttagctcgtggcacaaaatcctgatggactccacgaaagaatccgaaagtcatctgagttggctatctgcacgttctctctgtaccagtgaacttgaactgtggctgtggcctggattccgcattcaaacatgaccaactgacctctggttgtagggatgtcttgaagatgctgaagaacaaacacagagttcagaggatggaagaaactgttataccatctacaatgatttgaaatgccatttgcaactgcagttgaccgtgggttattgaaaccacagaaagtgaaactggataacgaagggaaacactatcccagcctcaacaaggagcttgatttgggcacagaaacaggagaaagagacctgccttgcctcccttatccaaccggaagatgcttcctcttctctcaatatattctcacttatgggtataaagtgtcaagctgagctcccagactctgatacaggctggggatgatgagaagaaccagaggacgatcactgtcaaccctgcccacatggggaaagcattcaaggttatgaatgaactgcggagtaaacagctgttgtgtgacgtgatgattgtggcagaagatgtcgagatagaagcccaccgtgtggtcctggcagcctgcagcccctacttctgtgcgatgttcacaggtaaaaaccagaaactgtgggcaagcaaaaagtaaaaaattacgtgtactacaacatctaggtaagagtatgg

SEQ ID NO: 281583 - DNA, 353 bp, Homo sapiens
ggccaagtcttggatgcccaagcccaaattcctaaccgtgaccctacgctgctgctgctgctgctacttgcagaaactggttattaaccgagagctgttgctggaagtagcttccactcccctgcccccgtgatgtaaaaatagatgaaaaactctgcagtgattatgtgaaaggtcaggccgacacaggagtcctggggcccagacccacatctgacccagaagctttgcaaagatgagaaggttggtaaaccagctatagaaaaggccaaactaatttggctgtaaattaaggcagccaaaagccctccaggatgtaagaccaggacggattctcgtgttgataaaaagga

SEQ ID NO: 281584 - DNA, 7102 bp, Homo sapiens
cggcgagctactcgacaagtcgtcagcgcggctgcgccgcaggagcccgggaggcctttcgcccgaggcgggctgcgggctgctggggtctggtgcggagggccaacttctgggaataacctggctgtgggcttaaaaatcgtagtcattcattatcacgggcttctctctctcgaatacctttaacatttatcgccttgttagtctccacatccacctccgtgaaagagatggagtctcgctatatttcccagtctggcctcaaactcctgatcttaagggatccccagctcaacctctcccagcagctgggactaccgggctgtcaaatttacattaactatgagaattaagcagaatccgaaagtcatctgagttggctatctgcacgttctctctgtaccagtgaacttgaactgtggctgtggcctggattccgcattcaaacatgaccaactgacctctggttgtagggatgtcttgaagatgctgaagaacaaacacagagttcagaggatggaagaaactgttataccatctacaatgatttgaaatgccatttgcaactgcagttgaccgtgggttattgaaaccacagaaagtgaaactggataacgaagggaaacactatcccagcctcaacaaggagcttgatttgggcacagaaacaggagaaagagacctgccttgcctcccttatccaaccggaagatgcttcctcttctctcaatatattctcacttatgggtataaagtgtcaagctgagctcccagactctgatacaggctggggatgatgagaagaaccagaggacgatcactgtcaaccctgcccacatggggaaagcattcaaggttatgaatgaactgcggagtaaacagctgttgtgtgacgtgatgattgtggcagaagatgtcgagatagaagcccaccgtgtggtcctggcagcctgcagcccctacttctgtgcgatgttcacaggtgacatgtctgagagtaaagccaaaaagatagaaatcaaggacgtggatgggcagacgctgagtaagctgattgactacatctatactgctgaaatcgaggtgactgaagagaatgtccaggtgctgctcccggcagccagcttgctgcagctcatggatgttcggcagaactgctgtgacttcctgcagtctcagttgcatcccaccaattgcctgggcatccgtgcgtttgcagatgtacacacctgcactgaccttctgcagcaggccaatgcctacgcagagcagcactttccagaggtgatgctaggagaagaatttcttagcctgagtctggaccaggtgtgcagcttgatatccagcgacaagctgaccgtttcttcagaagagaaggtgtttgaagctgtgatctcatggatcaattatgagaaagaaaaccgtttagagcacatggcaaagctgatggaacatgtccgacttcctctcttacctagggactacctagtccaaacggttgaagaagaagctttgataaagaataacaacacctgtaaagacttcctcattgaggccatgaaataccatctcctccctctggatcagagactattgattaagaacccaaggaccaagcccaggactccagtcagccttcccaaggtcatgattgtggttggcggccaggcacccaaggcaatccgcagtgtggagtgctatgatttcgaggaggaccggtgggatcagattgctgagcttccttccagaagatgcagagcaggtgtggtgttcatggctggccacgtgtatgccgtgggagggtttaatggctcactgcgggtgcggacagtggatgtgtatgacggcgtgaaggaccagtggacgtccattgccagcatgcaggagcgccggagcacactgggcgcagcggtgctcaatgacttgctctacgcagtgggaggctttgatggcagtactggcctagcatcggtggaagcctacagctacaagaccaacgagtggttctttgtggccccgatgaacacgcggcagagcagtgtgggtgtgggcgttgtggaggggaagctatatgctgttgggggttatgatggagcttcccgccagtgtctgagcactgtggaacagtacaacccagcgaccaatgaatggatatacgtggcggacatgagcacccgccgcagtggcgcaggggttggagtgcttagcggacagctgtacgccacaggtgggcatgatgggcctttggtgaggaagagcgttgaggtttacgatcctggaacaaatacctggaagcaagtggcagacatgaacatgtgccggcgcaacgcaggggtctgtgcagtaaatgggctcctgtatgtggttggaggggatgatggatcctgcaacttggcttcggtggagtactacaatcctgtcactgacaaatggacgctgcttccaacgaacatgagcacggggcggagctatgcaggtgttgccgtgattcacaagtccttgtgacccaaactcctactgccaggaggtggaggaaggagcaggtgctgcctgtgactctgaacagcaggaccttggtgactggattcaacttgcttgggagggtctgtgctgctgtgagaaccgctctcctctgacttggcagactggtgttgttcatcgcagtgtggacaccattacccacccccgttcccctgaggtgctctggcctatgccctgagcaaggggggtcttgacatccccaggcagcacctttgggctttgttttggtgtttctacagggacaatacagaccctggagtgtgtgtgtgtgtgtgtgtgtgtagaccatggtgtttctctatgtttctctaagttggggggtgagcgtgtgtgacagtctactggatttctttactactgatcctttcgctgtgttaaaaatcaagtcacagagacctctcttctggatttgtcccatggggaccctgagactactaaagctgctttcttctgaaggtccagttggacagtctgggaatgtccagaaataaccagtgagaggggcagttctctggccacacccacttatgtactttaactactgtgactttgtctgcagaagagctggaaaattctcgaagctgcaccgtgtcctctgtgtgctagaataagggacaaatgggttccctgtgcttctcagctcactgtttttccttgagttctcctacaggaagcagatgagaactgcccagtcttcaggtttaggccattggtctttgatgtcatagattccaggcctgggaggtgttatgtctcttcagctgggaaaactagctcttcagagaagcctcgggtaacactgaaaaacaaaacaaaacaaaacaaaaacaggaaaaaaacaaaaaaccaaagtggtaaggattcagttcctgcctataatggtctcagagagggtcctacttttaggttttcccaggacaggacagtccccatttatacttattatcccagtttaattattcacagcaccccattttactcagaagtgttctggtctggaggataaataagaggtcaccctcctccagacccaaagatagatttgtgcctgtgttggatggggtcgtgtgtgattcagatggacattggatggcttcaaaggaatataccactagagctggcccttggcactttgtgacagtggtcaagtctgtctaatgtccttgtcttctttttcttgtgctttccccctattccagggtgtgcaccctctccccaacccccaagaaccccactactgctttccctgtgaggtaggagatatcagtgggtcttggatttgaggcttcctaagatgtgcttgcattttaaaaagggagcttggtgagagctttgctaattcacaggtaaaaattattaacaatagaacttcaagcatcttgaggagcgggcatttgagggggcatggagtaatttgtatttaaaaaaccttaaagttgtgctgttcctaaactagcaaattgctcatgctgaaatttctggcataagcaggggaagtcttgtgtctggagaatagtctcataccttgcagtctgggacaccctccctactttgagaatccacctacaggaagccaaggaactttataaatcctgatgttggacttctgatacgactgggctacttccaagcaggtgctgcaggagattggcatcccccagcccctgcagttagaaaccccgaagtcttcccagccagtgagccactttgtgtatttactgtatatttattgtgccctaaatgtgcaactctcctaaagacaaaacttctctttctgatgttaagcacatgttacttcaacaagatgcttggagaacaacaaggtacccagaatttttagaagccttcagaagaggctaaaatatccagctttgggggacctggaagaaatgtctccaaaggaagcaaggcatgttttagttgagtgctctggtctcactatgaagtggggatgactgtggcttcataactctacctggctgtgggttggaagctgatggaatgagaaatgtcctttctccttctctgaggaaattttgagacttgtttcggtgtgtctgtgtgatggggatgaggctggggttgggatctgatgtatgccattcacagaagctctcaatttcagatgataggtgaattccctgcccctcccccaccactgagaagctagactttcatgcgggagaggctacttttatgtgtcgtcttccggggaagggtccctccactgaaagctagccagtcatgttttctgtttttggatttttgcaattggtttcacctcatgtctccctccctacaaagcactgcctctactgggcgtgctgccaaggccatgtgcactccatcctcatgtatcctttttcacggggaccagaacactggtacgtcatcaccaaagccaatctgctctagctgcccacagatgccaccaaaacctgctatctcttcatcaccaggtacgattctctttccacagtggacacagcaggctattttctagtttgtgctggtcacgtggtagatgaagcctcttactgccccacttagggtggccacggctgcttgtgaatgcagctttgccagtggcatatctgtcatctgattgcggtggtgaaatggaattgaggcccaaggttagaagcagccgagacgccacttggatactgatttgaacaatgtagaagtcagattctgaattccaaagttatttctcataagtacccaatggcatctctccatctacaaagttgcagtattatgcaaataaaactgacctcattttctgctatgcaataagaatacttaattctagttcccgacaagccagttgcaatatcccctaagatgctttttgagctgtcttactttgatatctgttgtgtaacgtttgtatatttctgagccagatcctttcaaagattgcctttttataaaattgaagctatagcttttaggctaaaattttaacgtagatatttttataagatatttttttcaagagtttgaatcgctttttattgtccatggtaatgaaatgttgtgttctttgcatcattcactctcaaacgtagttcatgcctgtagctctcttccttttgtttctcacccttcagaaacatatttttcagtagctccaggtagatgagcctttttttttttttttttaaataccatattcaagggagtctgctgaattttaaaacgcagtcactggtgtttcttgaattgctagggactgatgttatgttcgactcagcacttgcccgtctgtattgattgtgtctttttttttttttttggagtctgctttctgtgggggtgaggccgggctgtctcgtggtggctcccactgacgggcactgagcctggtaccctgtggcatggagaagcctcagggaaaggcctgcccccccagcacatactcccatagtgtcctaggtccagccgaccattccttattctcttctatctccttgttgatctgaagcttccaatagcttgaggcctttgctgctggatgatgccctttttgggagcatcttgtctctaacctttaaaagaggggtcaatcctcatgatccctgtgtgttaagcatatgctttgcaggtgctcacactacacttacaacttgcttcttgagctatgtctctactccaggctctgttttgtgtatttatctgccatttgcatcatggtttttaaaatttattattattattattattgttgggacaggtgccatttaaattgcctccatgctccccatttgcacctagctggatcaagttgggaggctgagcaaactcatattccagttagttggagtttttaaaggctctgtttgcctggagaagcaaggaggttagaatgtaatttttttaagcgtttgcactatttagagtcctaagcccctcatgttcagctgtgctgtgtttctactgaccaagcaggagagccagcagcacttccagcatttgggaatggaagagatttcttctgtagtggataattacagcctcatagcccctgtgcagccttcgtcatgggactcagtgactcatggatatagcatcagccatggcaggaatgcacaggactgtggcatttgcagcatcaaatcaccctagtgccatgtttggttatgagattgtaaattattcgctcccccgtcctcccctcccctcattttcagtggcaatagaggacccttgttgtacttcttgtttaatttgcatattatgtgtaaaatgctttcgttgaaagaaaactgaagacactgaatgtgtatgtctgtgtgggtgctctgtccctgtggttgtcatagccagtcagacttgatcactgacaccccgtacaacatattgcataggtaagatcctcgatctggtgttctctgcgtggctgttagggactgtatatcttgtaaaagaacacttgtcacatgcttgatcagttacagcaatagctgaagaaacatttcctcaaatgtattattttaacaggaatcatgttctaatttcccatcctttaattttaataaaagctgaactgtgtgaa

SEQ ID NO: 281585 - DNA, 7520 bp, Homo sapiens
  misc_feature (7127)..(7136): n is a, c, g, or t
  misc_feature (7138)..(7138): n is a, c, g, or t
  misc_feature (7142)..(7142): n is a, c, g, or t
  misc_feature (7144)..(7144): n is a, c, g, or t
  misc_feature (7150)..(7151): n is a, c, g, or t
  misc_feature (7164)..(7164): n is a, c, g, or t
  misc_feature (7168)..(7169): n is a, c, g, or t
  misc_feature (7176)..(7176): n is a, c, g, or t
  misc_feature (7178)..(7179): n is a, c, g, or t
  misc_feature (7193)..(7194): n is a, c, g, or t
  misc_feature (7204)..(7204): n is a, c, g, or t
  misc_feature (7207)..(7208): n is a, c, g, or t
  misc_feature (7222)..(7224): n is a, c, g, or t
  misc_feature (7228)..(7229): n is a, c, g, or t
  misc_feature (7282)..(7282): n is a, c, g, or t
  misc_feature (7290)..(7290): n is a, c, g, or t
  misc_feature (7297)..(7297): n is a, c, g, or t
  misc_feature (7321)..(7321): n is a, c, g, or t
  misc_feature (7340)..(7340): n is a, c, g, or t
  misc_feature (7424)..(7424): n is a, c, g, or t
  misc_feature (7454)..(7454): n is a, c, g, or t
  misc_feature (7488)..(7488): n is a, c, g, or t
cggcgagctactcgacaagtcgtcagcgcggctgcgccgcaggagcccgggaggcctttcgcccgaggcgggctgcgggctgctggggtctggtgcggagggccaacttctgggaataacctggctgtgggcttaaaaatcgtagtcattcattatcacgggcttctctctctcgaatacctttaacatttatcgccttgttagtctccacatccacctccgtgaaagagatggagtctcgctatatttcccagtctggcctcaaactcctgatcttaagggatccccagctcaacctctcccagcagctgggactaccgggctgtcaaatttacattaactatgagaattaagcagaatccgaaagtcatctgagttggctatctgcacgttctctctgtaccagtgaacttgaactgtggctgtggcctggattccgcattcaaacatgaccaactgacctctggttgtagggatgtcttgaagatgctgaagaacaaacacagagttcagaggatggaagaaactgttataccatctacaatgatttgaaatgccatttgcaactgcagttgaccgtgggttattgaaaccacagaaagtgaaactggataacgaagggaaacactatcccagcctcaacaaggagcttgatttgggcacagaaacaggagaaagagacctgccttgcctcccttatccaaccggaagatgcttcctcttctctcaatatattctcacttatgggtataaagtgtcaagctgagctcccagactctgatacaggctggggatgatgagaagaaccagaggacgatcactgtcaaccctgcccacatggggaaagcattcaaggttatgaatgaactgcggagtaaacagctgttgtgtgacgtgatgattgtggcagaagatgtcgagatagaagcccaccgtgtggtcctggcagcctgcagcccctacttctgtgcgatgttcacaggtgacatgtctgagagtaaagccaaaaagatagaaatcaaggacgtggatgggcagacgctgagtaagctgattgactacatctatactgctgaaatcgaggtgactgaagagaatgtccaggtgctgctcccggcagccagcttgctgcagctcatggatgttcggcagaactgctgtgacttcctgcagtctcagttgcatcccaccaattgcctgggcatccgtgcgtttgcagatgtacacacctgcactgaccttctgcagcaggccaatgcctacgcagagcagcactttccagaggtgatgctaggagaagaatttcttagcctgagtctggaccaggtgtgcagcttgatatccagcgacaagctgaccgtttcttcagaagagaaggtgtttgaagctgtgatctcatggatcaattatgagaaagaaaaccgtttagagcacatggcaaagctgatggaacatgtccgacttcctctcttacctagggactacctagtccaaacggttgaagaagaagctttgataaagaataacaacacctgtaaagacttcctcattgaggccatgaaataccatctcctccctctggatcagagactattgattaagaacccaaggaccaagcccaggactccagtcagccttcccaaggtcatgattgtggttggcggccaggcacccaaggcaatccgcagtgtggagtgctatgatttcgaggaggaccggtgggatcagattgctgagcttccttccagaagatgcagagcaggtgtggtgttcatggctggccacgtgtatgccgtgggagggtttaatggctcactgcgggtgcggacagtggatgtgtatgacggcgtgaaggaccagtggacgtccattgccagcatgcaggagcgccggagcacactgggcgcagcggtgctcaatgacttgctctacgcagtgggaggctttgatggcagtactggcctagcatcggtggaagcctacagctacaagaccaacgagtggttctttgtggccccgatgaacacgcggcagagcagtgtgggtgtgggcgttgtggaggggaagctatatgctgttgggggttatgatggagcttcccgccagtgtctgagcactgtggaacagtacaacccagcgaccaatgaatggatatacgtggcggacatgagcacccgccgcagtggcgcaggggttggagtgcttagcggacagctgtacgccacaggtgggcatgatgggcctttggtgaggaagagcgttgaggtttacgatcctggaacaaatacctggaagcaagtggcagacatgaacatgtgccggcgcaacgcaggggtctgtgcagtaaatgggctcctgtatgtggttggaggggatgatggatcctgcaacttggcttcggtggagtactacaatcctgtcactgacaaatggacgctgcttccaacgaacatgagcacggggcggagctatgcaggtgttgccgtgattcacaagtccttgtgacccaaactcctactgccaggaggtggaggaaggagcaggtgctgcctgtgactctgaacagcaggaccttggtgactggattcaacttgcttgggagggtctgtgctgctgtgagaaccgctctcctctgacttggcagactggtgttgttcatcgcagtgtggacaccattacccacccccgttcccctgaggtgctctggcctatgccctgagcaaggggggtcttgacatccccaggcagcacctttgggctttgttttggtgtttctacagggacaatacagaccctggagtgtgtgtgtgtgtgtgtgtgtgtagaccatggtgtttctctatgtttctctaagttggggggtgagcgtgtgtgacagtctactggatttctttactactgatcctttcgctgtgttaaaaatcaagtcacagagacctctcttctggatttgtcccatggggaccctgagactactaaagctgctttcttctgaaggtccagttggacagtctgggaatgtccagaaataaccagtgagaggggcagttctctggccacacccacttatgtactttaactactgtgactttgtctgcagaagagctggaaaattctcgaagctgcaccgtgtcctctgtgtgctagaataagggacaaatgggttccctgtgcttctcagctcactgtttttccttgagttctcctacaggaagcagatgagaactgcccagtcttcaggtttaggccattggtctttgatgtcatagattccaggcctgggaggtgttatgtctcttcagctgggaaaactagctcttcagagaagcctcgggtaacactgaaaaacaaaacaaaacaaaacaaaaacaggaaaaaaacaaaaaaccaaagtggtaaggattcagttcctgcctataatggtctcagagagggtcctacttttaggttttcccaggacaggacagtccccatttatacttattatcccagtttaattattcacagcaccccattttactcagaagtgttctggtctggaggataaataagaggtcaccctcctccagacccaaagatagatttgtgcctgtgttggatggggtcgtgtgtgattcagatggacattggatggcttcaaaggaatataccactagagctggcccttggcactttgtgacagtggtcaagtctgtctaatgtccttgtcttctttttcttgtgctttccccctattccagggtgtgcaccctctccccaacccccaagaaccccactactgctttccctgtgaggtaggagatatcagtgggtcttggatttgaggcttcctaagatgtgcttgcattttaaaaagggagcttggtgagagctttgctaattcacaggtaaaaattattaacaatagaacttcaagcatcttgaggagcgggcatttgagggggcatggagtaatttgtatttaaaaaaccttaaagttgtgctgttcctaaactagcaaattgctcatgctgaaatttctggcataagcaggggaagtcttgtgtctggagaatagtctcataccttgcagtctgggacaccctccctactttgagaatccacctacaggaagccaaggaactttataaatcctgatgttggacttctgatacgactgggctacttccaagcaggtgctgcaggagattggcatcccccagcccctgcagttagaaaccccgaagtcttcccagccagtgagccactttgtgtatttactgtatatttattgtgccctaaatgtgcaactctcctaaagacaaaacttctctttctgatgttaagcacatgttacttcaacaagatgcttggagaacaacaaggtacccagaatttttagaagccttcagaagaggctaaaatatccagctttgggggacctggaagaaatgtctccaaaggaagcaaggcatgttttagttgagtgctctggtctcactatgaagtggggatgactgtggcttcataactctacctggctgtgggttggaagctgatggaatgagaaatgtcctttctccttctctgaggaaattttgagacttgtttcggtgtgtctgtgtgatggggatgaggctggggttgggatctgatgtatgccattcacagaagctctcaatttcagatgataggtgaattccctgcccctcccccaccactgagaagctagactttcatgcgggagaggctacttttatgtgtcgtcttccggggaagggtccctccactgaaagctagccagtcatgttttctgtttttggatttttgcaattggtttcacctcatgtctccctccctacaaagcactgcctctactgggcgtgctgccaaggccatgtgcactccatcctcatgtatcctttttcacggggaccagaacactggtacgtcatcaccaaagccaatctgctctagctgcccacagatgccaccaaaacctgctatctcttcatcaccaggtacgattctctttccacagtggacacagcaggctattttctagtttgtgctggtcacgtggtagatgaagcctcttactgccccacttagggtggccacggctgcttgtgaatgcagctttgccagtggcatatctgtcatctgattgcggtggtgaaatggaattgaggcccaaggttagaagcagccgagacgccacttggatactgatttgaacaatgtagaagtcagattctgaattccaaagttatttctcataagtacccaatggcatctctccatctacaaagttgcagtattatgcaaataaaactgacctcattttctgctatgcaataagaatacttaattctagttcccgacaagccagttgcaatatcccctaagatgctttttgagctgtcttactttgatatctgttgtgtaacgtttgtatatttctgagccagatcctttcaaagattgcctttttataaaattgaagctatagcttttaggctaaaattttaacgtagatatttttataagatatttttttcaagagtttgaatcgctttttattgtccatggtaatgaaatgttgtgttctttgcatcattcactctcaaacgtagttcatgcctgtagctctcttccttttgtttctcacccttcagaaacatatttttcagtagctccaggtagatgagcctttttttttttttttttaaataccatattcaagggagtctgctgaattttaaaacgcagtcactggtgtttcttgaattgctagggactgatgttatgttcgactcagcacttgcccgtctgtattgattgtgtctttttttttttttttggagtctgctttctgtgggggtgaggccgggctgtctcgtggtggctcccactgacgggcactgagcctggtaccctgtggcatggagaagcctcagggaaaggcctgcccccccagcacatactcccatagtgtcctaggtccagccgaccattccttattctcttctatctccttgttgatctgaagcttccaatagcttgaggcctttgctgctggatgatgccctttttgggagcatcttgtctctaacctttaaaagaggggtcaatcctcatgatccctgtgtgttaagcatatgctttgcaggtgctcacactacacttacaacttgcttcttgagctatgtctctactccaggctctgttttgtgtatttatctgccatttgcatcatggtttttaaaatttattattattattattattgttgggacaggtgccatttaaattgcctccatgctccccatttgcacctagctggatcaagttgggaggctgagcaaactcatattccagttagttggagtttttaaaggctctgtttgcctggagaagcaaggaggttagaatgtaatttttttaagcgtttgcactatttagagtcctaagcccctcatgttcagctgtgctgtgtttctactgaccaagcaggagagccagcagcacttccagcatttgggaatggaagagatttcttctgtagtggataattacagcctcatagcccctgtgcagccttcgtcatgggactcagtgactcatggatatagcatcagccatggcaggaatgcacaggactgtggcatttgcagcatcaaatcaccctagtgccatgtttggttatgagattgtaaattattcgctcccccgtcctcccctcccctcattttcagtggcaatagaggacccttgttgtacttcttgtttaatttgcatattatgtgtaaaatgctttcgttgaaagaaaactgaagacactgaatgtgtatgtctgtgtgggtgctctgtccctgtggttgtcatagccagtcagacttgatcactgacaccccgtacaacatattgcataggtaagatcctcgatctggtgttctctgcgtggctgttagggactgtatatcttgtaaaagaacacttgtcacatgcttgatcagttacagcaatagctgaagaaacatttcctcaaatgtattattttaacaggaatcatgttctaatttcccatcctttaattttaataaaagctgaactgtgtgaaaaaaaaaaaaaaaaaaaaacccccnnnnnnnnnntngggntntttttnnaataaaaaaaaanaaannaaaaaanannaaaaaacctacccnntcggatcctnccnnaaaaaacccatgtnnnttanncgctttgggtttaaaaaaaaggccaaggtaaaggcccgggcctttccggcccnctattttngggttcnctcgtactttttttggctcatggnccagccgcacaacttttgnaggctcgccggcccatgtggggtctttctggcggcgcgccgctgccagcctccctaaagcgcgggggctggagttgttgagcancccgccgctgtggtccatgtagccgctggncgcgcgcggactgcggctcggcgtgcgcgtgttnccggccgtcccgcctcggcgagctccctcatg

SEQ ID NO: 281586 - DNA, 1817 bp, Homo sapiens
cggcgagctactcgacaagtcgtcagcgcggctgcgccgcaggagcccgggaggcctttcgcccgaggcgggctgcgggctgctggggtctggtgcggagggccaacttctgggaataacctggctgtgggcttaaaaatcgtagtcattcattatcacgggcttctctctctcgaatacctttaacatttatcgccttgttagtctccacatccacctccgtgaaagagatggagtctcgctatatttcccagtctggcctcaaactcctgatcttaagggatccccagctcaacctctcccagcagctgggactaccgggctgtcaaatttacattaactatgagaattaagcagagtctcgctcttttgcccaggctggagcgcagtggcgtgatcttggttcactgcaacctccgcctcccaggttcaaggaagtctcctgccacagcctcctgagtagctgggattacaggaattctcaagggtctctttggaggcttaccaaggacatccagctgcacagtgaaggtggcttctcctgctctattcttggcaacacatgcataagcccctgcatctgaagctctgactacttcaaagatgagtgaatgaagacccttctcagacactatcattttgtgcaaatcatctgattgaactgttcttccatttagataccatgacacatcaggagctggcagtccactcacctagaaagaaaaacacaaggagatggcagaattttaaagtattgcatcactgaaacctatttgtccatatatgaatttaaacagttcccgtatctgagtgggtttgcgattgaaatgcaaagcaagagctcaaaagtatttataattttttaaacaaaacattggaaataagatccttgaaattaacatagtatttttagactgtctcaaaccataactcttttacatgcaacctcagtctctttatgaactcttaatttctatatttagaacattaatttatgttacattggtttccataaggaatatagaagtcattgcttttctggctaaatgtgactgcaaatgaagtcccagaggcacatatatatgaggcttcctgatctaatgcgtaatttttctaaaacagagtgttcttgagctatagtttggcatataaatggcaatttgttaagtgtttttacataaactgttaacagtggaatccaaagctttaacactaacttgagttcataaggaatctggaaaaaaaattttataaggaaaagttctccaaaatgaggataataaaaatataacctcttctaaagagcttttctagtctgagggactcttttaggccaagagaaagcagggtggcttgaatttcttgatagaggagaattggagagacattatactttaaggctgggcacagtggctcacgcctgtaatcccagcactttgggaagccaaggtgagtggatcgccttgaacccaggagttctagactagctgggcatggtggcacgcgtcttgcactccagcctggatgacagagtgagagtctgtctcaaagataaataaataaataaaaatatccaaattaagtttttgacgtttttctatagtggtggtgtgaacatgtatatagttatattcagagatgtggtatttcagttataccaacctccgcttcttgggttcaagtgattctcttacctcagcctcccgagtagctgggattacaggcatgtgccactacgcctggctaattttgtatttttagtagagatggggtttcactatgttggtcagcctggtcttgaactcctgacctcaggt

SEQ ID NO: 281587 - DNA, 1699 bp, Homo sapiens
cggcgagctactcgacaagtcgtcagcgcggctgcgccgcaggagcccgggaggcctttcgcccgaggcgggctgcgggctgctggggtctggtgcggagggccaacttctgggaataacctggctgtgggcttaaaaatcgtagtcattcattatcacgggcttctctctctcgaatacctttaacatttatcgccttgttagtctccacatccacctccgtgaaagagatggagtctcgctatatttcccagtctggcctcaaactcctgatcttaagggatccccagctcaacctctcccagcagctgggactaccgggctgtcaaatttacattaactatgagaattaagcaggaattctcaagggtctctttggaggcttaccaaggacatccagctgcacagtgaaggtggcttctcctgctctattcttggcaacacatgcataagcccctgcatctgaagctctgactacttcaaagatgagtgaatgaagacccttctcagacactatcattttgtgcaaatcatctgattgaactgttcttccatttagataccatgacacatcaggagctggcagtccactcacctagaaagaaaaacacaaggagatggcagaattttaaagtattgcatcactgaaacctatttgtccatatatgaatttaaacagttcccgtatctgagtgggtttgcgattgaaatgcaaagcaagagctcaaaagtatttataattttttaaacaaaacattggaaataagatccttgaaattaacatagtatttttagactgtctcaaaccataactcttttacatgcaacctcagtctctttatgaactcttaatttctatatttagaacattaatttatgttacattggtttccataaggaatatagaagtcattgcttttctggctaaatgtgactgcaaatgaagtcccagaggcacatatatatgaggcttcctgatctaatgcgtaatttttctaaaacagagtgttcttgagctatagtttggcatataaatggcaatttgttaagtgtttttacataaactgttaacagtggaatccaaagctttaacactaacttgagttcataaggaatctggaaaaaaaattttataaggaaaagttctccaaaatgaggataataaaaatataacctcttctaaagagcttttctagtctgagggactcttttaggccaagagaaagcagggtggcttgaatttcttgatagaggagaattggagagacattatactttaaggctgggcacagtggctcacgcctgtaatcccagcactttgggaagccaaggtgagtggatcgccttgaacccaggagttctagactagctgggcatggtggcacgcgtcttgcactccagcctggatgacagagtgagagtctgtctcaaagataaataaataaataaaaatatccaaattaagtttttgacgtttttctatagtggtggtgtgaacatgtatatagttatattcagagatgtggtatttcagttataccaacctccgcttcttgggttcaagtgattctcttacctcagcctcccgagtagctgggattacaggcatgtgccactacgcctggctaattttgtatttttagtagagatggggtttcactatgttggtcagcctggtcttgaactcctgacctcaggt

SEQ ID NO: 281588 - DNA, 1627 bp, Homo sapiens
cggcgagctactcgacaagtcgtcagcgcggctgcgccgcaggagcccgggaggcctttcgcccgaggcgggctgcgggctgctggggtctggtgcggagggccaacttctgggaataacctggctgtgggcttaaaaatcgtagtcattcattatcacgggcttctctctctcgaatacctttaacatttatcgccttgttagtctccacatccacctccgtgaaagagatggagtctcgctatatttcccagtctggcctcaaactcctgatcttaagggatccccagctcaacctctcccagcagctgggactaccgggctgtcaaatttacattaactatgagaattaagcagaatccgaaagtcatctgagttggctatctgcacgttctctctgtaccagtgaacttgaactgtggctgtggcctggattccgcattcaaacatgaccaactgacctctggttgtagggatgtcttgaagatgctgaagaacaaacacagagttcagaggatggaagaaactgttataccatctacaatgatttgaaatgccatttgcaactgcagttgaccgtgggttattgaaaccacagaaagtgaaactggataacgaagggaaacactatcccagcctcaacaaggagcttgatttgggcacagaaacaggagaaagagacctgccttgcctcccttatccaaccggaagatgcttcctcttctctcaatatattctcacttatgggtataaagtgtcaagctgagctcccagactctgatacaggctggggatgatgagaagaaccagaggacgatcactgtcaaccctgcccacatggggaaagcattcaaggttatgaatgaactgcggagtaaacagctgttgtgtgacgtgatgattgtggcagaagatgtcgagatagaagcccaccgtgtggtcctggcagcctgcagcccctacttctgtgcgatgttcacaggtgacatgtctgagagtaaagccaaaaagatagaaatcaaggacgtggatgggcagacgctgagtaagctgattgactacatctatactgctgaaatcgaggtgactgaagagaatgtccaggtgctgctcccggcagccagcttgctgcagctcatggatgttcggcagaactgctgtgacttcctgcagtctcagttgcatcccaccaattgcctgggcatccgtgcgtttgcagatgtacacacctgcactgaccttctgcagcaggccaatgcctacgcagagcagcactttccagaggtgatgctaggagaagaatttcttagcctgagtctggaccaggtgtgcagcttgatatccagcgacaagctgaccgtttcttcagaagagaagatggagtcttgctctgtcggccagggctagagtgcgatggtgtgatctcggctcactgcaacctccgcctcccagtagagacagggtttcaccatgttgaccagactggtcttgaactcctgacctcaggcaatccgcccgcctcagcctcccaaaatgctgggatgacaggtgtgagccaccatgcttggccaatcttttcttttctttcagagaaaaacaacagcttttttttttaatccctttaaaa

SEQ ID NO: 281589 - DNA, 835 bp, Homo sapiens
cggcgagctactcgacaagtcgtcagcgcggctgcgccgcaggagcccgggaggcctttcgcccgaggcgggctgcgggctgctggggtctggtgcggagggccaacttctgggaataacctggctgtgggcttaaaaatcgtagtcattcattatcacgggcttctctctctcgaatacctttaacatttatcgccttgttagtctccacatccacctccgtgaaagagatggagtctcgctatatttcccagtctggcctcaaactcctgatcttaagggatccccagctcaacctctcccagcagctgggactaccgggctgtcaaatttacattaactatgagaattaagcagaatccgaaagtcatctgagttggctatctgcacgttctctctgtaccagtgaacttgaactgtggctgtggcctggattccgcattcaaacatgaccaactgacctctggttgtagggatgtcttgaagatgctgaagaacaaacacagagttcagaggatggaagaaactgttataccatctacaatgatttgaaatgccatttgcaactgcagttgaccgtgggttattgaaaccacagaaagtgaaactggataacgaagtgagtactatgttgtaatttcttaagagccctgaattagggaacttgggccaaaatattaactctgccactggctgattgaagctggttataggaacttggaaaagactattaacttctctggaactcaggttctttgtctatgaaatagggctagcaaaatatgtggggttttgaggttcatttcacaaaggtctgaaaacttcctgtaaagag

SEQ ID NO: 281590 - DNA, 829 bp, Homo sapiens
tggctgtaaattaaggcagccaaaagccctccaggatgtaagaccaggacggattctcgtgttgataaaaaggaaaataaaatggaatccagtccaaaggccccagggaaacctgcaaagaaaaccactaaccagttttgaaagtaaaagataaagccacttttgttatttccctgaaagagatgtagactgctgtcgataaatgctgttttatgtgtagataaaaagcaaaacggccacacagtagtgagggtcaaaaactaccatcgatgagaggaacaggagaggcctcgcaaaaggctgacagccagtgaactagaagcccgagaggaaaaaaagctttagaatagttttaacaaaaggatttgggctttcctgtactgggactctcagctgttcacaaaattatgctttctaaagtaacagattatctgaaattgaaattattagaggaaaaacacccatatataggtaatcaaatttacataatttttttttttttagagatggagtctcgctatatttcccagtctggcctcaaactcctgatcttaagggatccccagctcaacctctcccagcagctgggactaccgggctgtcaaatttacattaactatgagaattaagcaggtaatctctagagactattcttattcctttgagcataacagactgaaaaatcctgaagaattagaaacctgtttggttaaaacaaaatcacaaattcagtagattcagtcatgatttaagttcttgtgattgcctttgaagtgcaaaccatggcaagtctagcttagtttctagaggaattggctgagctgtaagt

SEQ ID NO: 281591 - DNA, 6810 bp, Homo sapiens
tgcctgattctttgcagcctagacagaggaggcaggagccccaggggcgggctaatcgcctgggctggggatgcctgggcagatgcagaggaagctggaaaggtggcagtgcacctgggtcgctggagctgccgccgttcctaggagaccaaggagcagcaagcctgcgggggagggggagcaagtgggttgctgcttttagcagctgaaagggctgcagggagctctgggtaagacattttctgttgctgctgcttttgcggtagaagctgctgcgagtaagtcagaggaaggaggattgagaagggaggaggcttcacttgcagccatgctgaatcactgttgctgatcagatttcccactggtctgctgggagaatcaagaacagaactaggatccccgagtgcatacacagttcagcagctaccaccctggctgggcctcacacaatggagggtgaaagtgtcaagctgagctcccagactctgatacaggctggggatgatgagaagaaccagaggacgatcactgtcaaccctgcccacatggggaaagcattcaaggttatgaatgaactgcggagtaaacagctgttgtgtgacgtgatgattgtggcagaagatgtcgagatagaagcccaccgtgtggtcctggcagcctgcagcccctacttctgtgcgatgttcacaggtgacatgtctgagagtaaagccaaaaagatagaaatcaaggacgtggatgggcagacgctgagtaagctgattgactacatctatactgctgaaatcgaggtgactgaagagaatgtccaggtgctgctcccggcagccagcttgctgcagctcatggatgttcggcagaactgctgtgacttcctgcagtctcagttgcatcccaccaattgcctgggcatccgtgcgtttgcagatgtacacacctgcactgaccttctgcagcaggccaatgcctacgcagagcagcactttccagaggtgatgctaggagaagaatttcttagcctgagtctggaccaggtgtgcagcttgatatccagcgacaagctgaccgtttcttcagaagagaaggtgtttgaagctgtgatctcatggatcaattatgagaaagaaaaccgtttagagcacatggcaaagctgatggaacatgtccgacttcctctcttacctagggactacctagtccaaacggttgaagaagaagctttgataaagaataacaacacctgtaaagacttcctcattgaggccatgaaataccatctcctccctctggatcagagactattgattaagaacccaaggaccaagcccaggactccagtcagccttcccaaggtcatgattgtggttggcggccaggcacccaaggcaatccgcagtgtggagtgctatgatttcgaggaggaccggtgggatcagattgctgagcttccttccagaagatgcagagcaggtgtggtgttcatggctggccacgtgtatgccgtgggagggtttaatggctcactgcgggtgcggacagtggatgtgtatgacggcgtgaaggaccagtggacgtccattgccagcatgcaggagcgccggagcacactgggcgcagcggtgctcaatgacttgctctacgcagtgggaggctttgatggcagtactggcctagcatcggtggaagcctacagctacaagaccaacgagtggttctttgtggccccgatgaacacgcggcagagcagtgtgggtgtgggcgttgtggaggggaagctatatgctgttgggggttatgatggagcttcccgccagtgtctgagcactgtggaacagtacaacccagcgaccaatgaatggatatacgtggcggacatgagcacccgccgcagtggcgcaggggttggagtgcttagcggacagctgtacgccacaggtgggcatgatgggcctttggtgaggaagagcgttgaggtttacgatcctggaacaaatacctggaagcaagtggcagacatgaacatgtgccggcgcaacgcaggggtctgtgcagtaaatgggctcctgtatgtggttggaggggatgatggatcctgcaacttggcttcggtggagtactacaatcctgtcactgacaaatggacgctgcttccaacgaacatgagcacggggcggagctatgcaggtgttgccgtgattcacaagtccttgtgacccaaactcctactgccaggaggtggaggaaggagcaggtgctgcctgtgactctgaacagcaggaccttggtgactggattcaacttgcttgggagggtctgtgctgctgtgagaaccgctctcctctgacttggcagactggtgttgttcatcgcagtgtggacaccattacccacccccgttcccctgaggtgctctggcctatgccctgagcaaggggggtcttgacatccccaggcagcacctttgggctttgttttggtgtttctacagggacaatacagaccctggagtgtgtgtgtgtgtgtgtgtgtgtagaccatggtgtttctctatgtttctctaagttggggggtgagcgtgtgtgacagtctactggatttctttactactgatcctttcgctgtgttaaaaatcaagtcacagagacctctcttctggatttgtcccatggggaccctgagactactaaagctgctttcttctgaaggtccagttggacagtctgggaatgtccagaaataaccagtgagaggggcagttctctggccacacccacttatgtactttaactactgtgactttgtctgcagaagagctggaaaattctcgaagctgcaccgtgtcctctgtgtgctagaataagggacaaatgggttccctgtgcttctcagctcactgtttttccttgagttctcctacaggaagcagatgagaactgcccagtcttcaggtttaggccattggtctttgatgtcatagattccaggcctgggaggtgttatgtctcttcagctgggaaaactagctcttcagagaagcctcgggtaacactgaaaaacaaaacaaaacaaaacaaaaacaggaaaaaaacaaaaaaccaaagtggtaaggattcagttcctgcctataatggtctcagagagggtcctacttttaggttttcccaggacaggacagtccccatttatacttattatcccagtttaattattcacagcaccccattttactcagaagtgttctggtctggaggataaataagaggtcaccctcctccagacccaaagatagatttgtgcctgtgttggatggggtcgtgtgtgattcagatggacattggatggcttcaaaggaatataccactagagctggcccttggcactttgtgacagtggtcaagtctgtctaatgtccttgtcttctttttcttgtgctttccccctattccagggtgtgcaccctctccccaacccccaagaaccccactactgctttccctgtgaggtaggagatatcagtgggtcttggatttgaggcttcctaagatgtgcttgcattttaaaaagggagcttggtgagagctttgctaattcacaggtaaaaattattaacaatagaacttcaagcatcttgaggagcgggcatttgagggggcatggagtaatttgtatttaaaaaaccttaaagttgtgctgttcctaaactagcaaattgctcatgctgaaatttctggcataagcaggggaagtcttgtgtctggagaatagtctcataccttgcagtctgggacaccctccctactttgagaatccacctacaggaagccaaggaactttataaatcctgatgttggacttctgatacgactgggctacttccaagcaggtgctgcaggagattggcatcccccagcccctgcagttagaaaccccgaagtcttcccagccagtgagccactttgtgtatttactgtatatttattgtgccctaaatgtgcaactctcctaaagacaaaacttctctttctgatgttaagcacatgttacttcaacaagatgcttggagaacaacaaggtacccagaatttttagaagccttcagaagaggctaaaatatccagctttgggggacctggaagaaatgtctccaaaggaagcaaggcatgttttagttgagtgctctggtctcactatgaagtggggatgactgtggcttcataactctacctggctgtgggttggaagctgatggaatgagaaatgtcctttctccttctctgaggaaattttgagacttgtttcggtgtgtctgtgtgatggggatgaggctggggttgggatctgatgtatgccattcacagaagctctcaatttcagatgataggtgaattccctgcccctcccccaccactgagaagctagactttcatgcgggagaggctacttttatgtgtcgtcttccggggaagggtccctccactgaaagctagccagtcatgttttctgtttttggatttttgcaattggtttcacctcatgtctccctccctacaaagcactgcctctactgggcgtgctgccaaggccatgtgcactccatcctcatgtatcctttttcacggggaccagaacactggtacgtcatcaccaaagccaatctgctctagctgcccacagatgccaccaaaacctgctatctcttcatcaccaggtacgattctctttccacagtggacacagcaggctattttctagtttgtgctggtcacgtggtagatgaagcctcttactgccccacttagggtggccacggctgcttgtgaatgcagctttgccagtggcatatctgtcatctgattgcggtggtgaaatggaattgaggcccaaggttagaagcagccgagacgccacttggatactgatttgaacaatgtagaagtcagattctgaattccaaagttatttctcataagtacccaatggcatctctccatctacaaagttgcagtattatgcaaataaaactgacctcattttctgctatgcaataagaatacttaattctagttcccgacaagccagttgcaatatcccctaagatgctttttgagctgtcttactttgatatctgttgtgtaacgtttgtatatttctgagccagatcctttcaaagattgcctttttataaaattgaagctatagcttttaggctaaaattttaacgtagatatttttataagatatttttttcaagagtttgaatcgctttttattgtccatggtaatgaaatgttgtgttctttgcatcattcactctcaaacgtagttcatgcctgtagctctcttccttttgtttctcacccttcagaaacatatttttcagtagctccaggtagatgagcctttttttttttttttttaaataccatattcaagggagtctgctgaattttaaaacgcagtcactggtgtttcttgaattgctagggactgatgttatgttcgactcagcacttgcccgtctgtattgattgtgtctttttttttttttttggagtctgctttctgtgggggtgaggccgggctgtctcgtggtggctcccactgacgggcactgagcctggtaccctgtggcatggagaagcctcagggaaaggcctgcccccccagcacatactcccatagtgtcctaggtccagccgaccattccttattctcttctatctccttgttgatctgaagcttccaatagcttgaggcctttgctgctggatgatgccctttttgggagcatcttgtctctaacctttaaaagaggggtcaatcctcatgatccctgtgtgttaagcatatgctttgcaggtgctcacactacacttacaacttgcttcttgagctatgtctctactccaggctctgttttgtgtatttatctgccatttgcatcatggtttttaaaatttattattattattattattgttgggacaggtgccatttaaattgcctccatgctccccatttgcacctagctggatcaagttgggaggctgagcaaactcatattccagttagttggagtttttaaaggctctgtttgcctggagaagcaaggaggttagaatgtaatttttttaagcgtttgcactatttagagtcctaagcccctcatgttcagctgtgctgtgtttctactgaccaagcaggagagccagcagcacttccagcatttgggaatggaagagatttcttctgtagtggataattacagcctcatagcccctgtgcagccttcgtcatgggactcagtgactcatggatatagcatcagccatggcaggaatgcacaggactgtggcatttgcagcatcaaatcaccctagtgccatgtttggttatgagattgtaaattattcgctcccccgtcctcccctcccctcattttcagtggcaatagaggacccttgttgtacttcttgtttaatttgcatattatgtgtaaaatgctttcgttgaaagaaaactgaagacactgaatgtgtatgtctgtgtgggtgctctgtccctgtggttgtcatagccagtcagacttgatcactgacaccccgtacaacatattgcataggtaagatcctcgatctggtgttctctgcgtggctgttagggactgtatatcttgtaaaagaacacttgtcacatgcttgatcagttacagcaatagctgaagaaacatttcctcaaatgtattattttaacaggaatcatgttctaatttcccatcctttaattttaataaaagctgaactgtgtgaa

SEQ ID NO: 281592 - DNA, 6840 bp, Homo sapiens
cataagattccattatatatactctaattgaaaattcatttccttcgttggaaattatagttttatgtaatattttgttattataaataatgatataatgggcatccttgcatcttaatctttatgtacattcctgattattttactagaatagattcctagaataagaagtactcgattaaaaggtatgcacactttgaagacttttgagacatgtgccgcattgatctaaagaacagttgtaccagcttatgctcccatcagcaagatatctaagatttatatatttttaaggcccattggctttgcctaaaccttggtaaacagatactaaaaatctccagtaacattgcaaaattttgttctaattatcaggttcagcttcaaaacgtgtaaaatgcattgtgtactgagagtaagaggctgactctcgttagatccatttctatcagtgtgtttaaagccaaaaggaaagtaaaatacacatggctttcttctgacttgagttgtgtgattatggtcttttactcaagcttaaatgtttttatttttttgtcttccgagttcatgttgcccaaatgtcctgaggtggttccaaataccaatcccacacttcttgaccattgtcctgtggacaataacttggaataaatgtgaaactgaagtctgagtgcccatcagagagtgtcccaatccaaccagtctataagaagatctggggtgacatgtctgagagtaaagccaaaaagatagaaatcaaggacgtggatgggcagacgctgagtaagctgattgactacatctatactgctgaaatcgaggtgactgaagagaatgtccaggtgctgctcccggcagccagcttgctgcagctcatggatgttcggcagaactgctgtgacttcctgcagtctcagttgcatcccaccaattgcctgggcatccgtgcgtttgcagatgtacacacctgcactgaccttctgcagcaggccaatgcctacgcagagcagcactttccagaggtgatgctaggagaagaatttcttagcctgagtctggaccaggtgtgcagcttgatatccagcgacaagctgaccgtttcttcagaagagaaggtgtttgaagctgtgatctcatggatcaattatgagaaagaaaaccgtttagagcacatggcaaagctgatggaacatgtccgacttcctctcttacctagggactacctagtccaaacggttgaagaagaagctttgataaagaataacaacacctgtaaagacttcctcattgaggccatgaaataccatctcctccctctggatcagagactattgattaagaacccaaggaccaagcccaggactccagtcagccttcccaaggtcatgattgtggttggcggccaggcacccaaggcaatccgcagtgtggagtgctatgatttcgaggaggaccggtgggatcagattgctgagcttccttccagaagatgcagagcaggtgtggtgttcatggctggccacgtgtatgccgtgggagggtttaatggctcactgcgggtgcggacagtggatgtgtatgacggcgtgaaggaccagtggacgtccattgccagcatgcaggagcgccggagcacactgggcgcagcggtgctcaatgacttgctctacgcagtgggaggctttgatggcagtactggcctagcatcggtggaagcctacagctacaagaccaacgagtggttctttgtggccccgatgaacacgcggcagagcagtgtgggtgtgggcgttgtggaggggaagctatatgctgttgggggttatgatggagcttcccgccagtgtctgagcactgtggaacagtacaacccagcgaccaatgaatggatatacgtggcggacatgagcacccgccgcagtggcgcaggggttggagtgcttagcggacagctgtacgccacaggtgggcatgatgggcctttggtgaggaagagcgttgaggtttacgatcctggaacaaatacctggaagcaagtggcagacatgaacatgtgccggcgcaacgcaggggtctgtgcagtaaatgggctcctgtatgtggttggaggggatgatggatcctgcaacttggcttcggtggagtactacaatcctgtcactgacaaatggacgctgcttccaacgaacatgagcacggggcggagctatgcaggtgttgccgtgattcacaagtccttgtgacccaaactcctactgccaggaggtggaggaaggagcaggtgctgcctgtgactctgaacagcaggaccttggtgactggattcaacttgcttgggagggtctgtgctgctgtgagaaccgctctcctctgacttggcagactggtgttgttcatcgcagtgtggacaccattacccacccccgttcccctgaggtgctctggcctatgccctgagcaaggggggtcttgacatccccaggcagcacctttgggctttgttttggtgtttctacagggacaatacagaccctggagtgtgtgtgtgtgtgtgtgtgtgtagaccatggtgtttctctatgtttctctaagttggggggtgagcgtgtgtgacagtctactggatttctttactactgatcctttcgctgtgttaaaaatcaagtcacagagacctctcttctggatttgtcccatggggaccctgagactactaaagctgctttcttctgaaggtccagttggacagtctgggaatgtccagaaataaccagtgagaggggcagttctctggccacacccacttatgtactttaactactgtgactttgtctgcagaagagctggaaaattctcgaagctgcaccgtgtcctctgtgtgctagaataagggacaaatgggttccctgtgcttctcagctcactgtttttccttgagttctcctacaggaagcagatgagaactgcccagtcttcaggtttaggccattggtctttgatgtcatagattccaggcctgggaggtgttatgtctcttcagctgggaaaactagctcttcagagaagcctcgggtaacactgaaaaacaaaacaaaacaaaacaaaaacaggaaaaaaacaaaaaaccaaagtggtaaggattcagttcctgcctataatggtctcagagagggtcctacttttaggttttcccaggacaggacagtccccatttatacttattatcccagtttaattattcacagcaccccattttactcagaagtgttctggtctggaggataaataagaggtcaccctcctccagacccaaagatagatttgtgcctgtgttggatggggtcgtgtgtgattcagatggacattggatggcttcaaaggaatataccactagagctggcccttggcactttgtgacagtggtcaagtctgtctaatgtccttgtcttctttttcttgtgctttccccctattccagggtgtgcaccctctccccaacccccaagaaccccactactgctttccctgtgaggtaggagatatcagtgggtcttggatttgaggcttcctaagatgtgcttgcattttaaaaagggagcttggtgagagctttgctaattcacaggtaaaaattattaacaatagaacttcaagcatcttgaggagcgggcatttgagggggcatggagtaatttgtatttaaaaaaccttaaagttgtgctgttcctaaactagcaaattgctcatgctgaaatttctggcataagcaggggaagtcttgtgtctggagaatagtctcataccttgcagtctgggacaccctccctactttgagaatccacctacaggaagccaaggaactttataaatcctgatgttggacttctgatacgactgggctacttccaagcaggtgctgcaggagattggcatcccccagcccctgcagttagaaaccccgaagtcttcccagccagtgagccactttgtgtatttactgtatatttattgtgccctaaatgtgcaactctcctaaagacaaaacttctctttctgatgttaagcacatgttacttcaacaagatgcttggagaacaacaaggtacccagaatttttagaagccttcagaagaggctaaaatatccagctttgggggacctggaagaaatgtctccaaaggaagcaaggcatgttttagttgagtgctctggtctcactatgaagtggggatgactgtggcttcataactctacctggctgtgggttggaagctgatggaatgagaaatgtcctttctccttctctgaggaaattttgagacttgtttcggtgtgtctgtgtgatggggatgaggctggggttgggatctgatgtatgccattcacagaagctctcaatttcagatgataggtgaattccctgcccctcccccaccactgagaagctagactttcatgcgggagaggctacttttatgtgtcgtcttccggggaagggtccctccactgaaagctagccagtcatgttttctgtttttggatttttgcaattggtttcacctcatgtctccctccctacaaagcactgcctctactgggcgtgctgccaaggccatgtgcactccatcctcatgtatcctttttcacggggaccagaacactggtacgtcatcaccaaagccaatctgctctagctgcccacagatgccaccaaaacctgctatctcttcatcaccaggtacgattctctttccacagtggacacagcaggctattttctagtttgtgctggtcacgtggtagatgaagcctcttactgccccacttagggtggccacggctgcttgtgaatgcagctttgccagtggcatatctgtcatctgattgcggtggtgaaatggaattgaggcccaaggttagaagcagccgagacgccacttggatactgatttgaacaatgtagaagtcagattctgaattccaaagttatttctcataagtacccaatggcatctctccatctacaaagttgcagtattatgcaaataaaactgacctcattttctgctatgcaataagaatacttaattctagttcccgacaagccagttgcaatatcccctaagatgctttttgagctgtcttactttgatatctgttgtgtaacgtttgtatatttctgagccagatcctttcaaagattgcctttttataaaattgaagctatagcttttaggctaaaattttaacgtagatatttttataagatatttttttcaagagtttgaatcgctttttattgtccatggtaatgaaatgttgtgttctttgcatcattcactctcaaacgtagttcatgcctgtagctctcttccttttgtttctcacccttcagaaacatatttttcagtagctccaggtagatgagcctttttttttttttttttaaataccatattcaagggagtctgctgaattttaaaacgcagtcactggtgtttcttgaattgctagggactgatgttatgttcgactcagcacttgcccgtctgtattgattgtgtctttttttttttttttggagtctgctttctgtgggggtgaggccgggctgtctcgtggtggctcccactgacgggcactgagcctggtaccctgtggcatggagaagcctcagggaaaggcctgcccccccagcacatactcccatagtgtcctaggtccagccgaccattccttattctcttctatctccttgttgatctgaagcttccaatagcttgaggcctttgctgctggatgatgccctttttgggagcatcttgtctctaacctttaaaagaggggtcaatcctcatgatccctgtgtgttaagcatatgctttgcaggtgctcacactacacttacaacttgcttcttgagctatgtctctactccaggctctgttttgtgtatttatctgccatttgcatcatggtttttaaaatttattattattattattattgttgggacaggtgccatttaaattgcctccatgctccccatttgcacctagctggatcaagttgggaggctgagcaaactcatattccagttagttggagtttttaaaggctctgtttgcctggagaagcaaggaggttagaatgtaatttttttaagcgtttgcactatttagagtcctaagcccctcatgttcagctgtgctgtgtttctactgaccaagcaggagagccagcagcacttccagcatttgggaatggaagagatttcttctgtagtggataattacagcctcatagcccctgtgcagccttcgtcatgggactcagtgactcatggatatagcatcagccatggcaggaatgcacaggactgtggcatttgcagcatcaaatcaccctagtgccatgtttggttatgagattgtaaattattcgctcccccgtcctcccctcccctcattttcagtggcaatagaggacccttgttgtacttcttgtttaatttgcatattatgtgtaaaatgctttcgttgaaagaaaactgaagacactgaatgtgtatgtctgtgtgggtgctctgtccctgtggttgtcatagccagtcagacttgatcactgacaccccgtacaacatattgcataggtaagatcctcgatctggtgttctctgcgtggctgttagggactgtatatcttgtaaaagaacacttgtcacatgcttgatcagttacagcaatagctgaagaaacatttcctcaaatgtattattttaacaggaatcatgttctaatttcccatcctttaattttaataaaagctgaactgtgtgaa

SEQ ID NO: 281593 - DNA, 7212 bp, Homo sapiens
cggcgagctactcgacaagtcgtcagcgcggctgcgccgcaggagcccgggaggcctttcgcccgaggcgggctgcgggctgctggggtctggtgcggagggccaacttctgggaataacctggctgtgggcttaaaaatcgtagtcattcattatcacgggcttctctctctcgaatacctttaacatttatcgccttgttagtctccacatccacctccgtgaaagagatggagtctcgctatatttcccagtctggcctcaaactcctgatcttaagggatccccagctcaacctctcccagcagctgggactaccgggctgtcaaatttacattaactatgagaattaagcagaatccgaaagtcatctgagttggctatctgcacgttctctctgtaccagtgaacttgaactgtggctgtggcctggattccgcattcaaacatgaccaactgacctctggttgtagggatgtcttgaagatgctgaagaacaaacacagagttcagaggatggaagaaactgttataccatctacaatgatttgaaatgccatttgcaactgcagttgaccgtgggttattgaaaccacagaaagtgaaactggataacgaagggaaacactatcccagcctcaacaaggagcttgatttgggcacagaaacaggagaaagagacctgccttgcctcccttatccaaccggaagatgcttcctcttctctcaatatattctcacttatgggtataaagtgtcaagctgagctcccagactctgatacaggctggggatgatgagaagaaccagaggacgatcactgtcaaccctgcccacatggggaaagcattcaaggttatgaatgaactgcggagtaaacagctgttgtgtgacgtgatgattgtggcagaagatgtcgagatagaagcccaccgtgtggtcctggcagcctgcagcccctacttctgtgcgatgttcacaggtgacatgtctgagagtaaagccaaaaagatagaaatcaaggacgtggatgggcagacgctgagtaagctgattgactacatctatactgctgaaatcgaggtgactgaagagaatgtccaggtgctgctcccggcagccagcttgctgcagctcatggatgttcggcagaactgctgtgacttcctgcagtctcagttgcatcccaccaattgcctgggcatccgtgcgtttgcagatgtacacacctgcactgaccttctgcagcaggccaatgcctacgcagagcagcactttccagaggtgatgctaggagaagaatttcttagcctgagtctggaccaggtgtgcagcttgatatccagcgacaagctgaccgtttcttcagaagagaaggtgtttgaagctgtgatctcatggatcaattatgagaaagaaaaccgtttagagcacatggcaaagctgatggaacatgtccgacttcctctcttacctagggactacctagtccaaacggttgaagaagaagctttgataaagaataacaacacctgtaaagacttcctcattgaggccatgaaataccatctcctccctctggatcagagactattgattaagaacccaaggaccaagcccaggactccagtcagccttcccaaggtcatgattgtggttggcggccaggcacccaaggcaatccgcagtgtggagtgctatgatttcgaggaggaccggtgggatcagattgctgagcttccttccagaagatgcagagcaggtgtggtgttcatggctggccacgtgtatgccgtgggagggtttaatggctcactgcgggtgcggacagtggatgtgtatgacggcgtgaaggaccagtggacgtccattgccagcatgcaggagcgccggagcacactgggcgcagcggtgctcaatgacttgctctacgcagtgggaggctttgatggcagtactggcctagcatcggtggaagcctacagctacaagaccaacgagtggttctttgtggccccgatgaacacgcggcagagcagtgtgggtgtgggcgttgtggaggggaagctatatgctgttgggggttatgatggagcttcccgccagtgtctgagcactgtggaacagtacaacccagcgaccaatgaatggatatacgtggcggacatgagcacccgccgcagtggcgcaggggttggagtgcttagcggacagctgtacgccacaggtgggcatgatgggcctttggtgaggaagagcgttgaggtttacgatcctggaacaaatacctggaagcaagtggcagacatgaacatgtgccggcgcaacgcaggggtctgtgcagtaaatgggctcctgtatgtggttggaggggatgatggatcctgcaacttggcttcggtggagtactacaatcctgtcactgacaaatggacgctgcttccaacgaacatgagcacggggcggagctatgcaggtgttgccgtgattcacaagtccttgtgacccaaactcctactgccaggaggtggaggaaggagcaggtgctgcctgtgactctgaacagcaggaccttggtgactggattcaacttgcttgggagggtctgtgctgctgtgagaaccgctctcctctgacttggcagactggtgttgttcatcgcagtgtggacaccattacccacccccgttcccctgaggtgctctggcctatgccctgagcaaggggggtcttgacatccccaggcagcacctttgggctttgttttggtgtttctacagggacaatacagaccctggagtgtgtgtgtgtgtgtgtgtgtgtagaccatggtgtttctctatgtttctctaagttggggggtgagcgtgtgtgacagtctactggatttctttactactgatcctttcgctgtgttaaaaatcaagtcacagagacctctcttctggatttgtcccatggggaccctgagactactaaagctgctttcttctgaaggtccagttggacagtctgggaatgtccagaaataaccagtgagaggggcagttctctggccacacccacttatgtactttaactactgtgactttgtctgcagaagagctggaaaattctcgaagctgcaccgtgtcctctgtgtgctagaataagggacaaatgggttccctgtgcttctcagctcactgtttttccttgagttctcctacaggaagcagatgagaactgcccagtcttcaggtttaggccattggtctttgatgtcatagattccaggcctgggaggtgttatgtctcttcagctgggaaaactagctcttcagagaagcctcgggtaacactgaaaaacaaaacaaaacaaaacaaaaacaggaaaaaaacaaaaaaccaaagtggtaaggattcagttcctgcctataatggtctcagagagggtcctacttttaggttttcccaggacaggacagtccccatttatacttattatcccagtttaattattcacagcaccccattttactcagaagtgttctggtctggaggataaataagaggtcaccctcctccagacccaaagatagatttgtgcctgtgttggatggggtcgtgtgtgattcagatggacattggatggcttcaaaggaatataccactagagctggcccttggcactttgtgacagtggtcaagtctgtctaatgtccttgtcttctttttcttgtgctttccccctattccagggtgtgcaccctctccccaacccccaagaaccccactactgctttccctgtgaggtaggagatatcagtgggtcttggatttgaggcttcctaagatgtgcttgcattttaaaaagggagcttggtgagagctttgctaattcacaggtaaaaattattaacaatagaacttcaagcatcttgaggagcgggcatttgagggggcatggagtaatttgtatttaaaaaaccttaaagttgtgctgttcctaaactagcaaattgctcatgctgaaatttctggcataagcaggggaagtcttgtgtctggagaatagtctcataccttgcagtctgggacaccctccctactttgagaatccacctacaggaagccaaggaactttataaatcctgatgttggacttctgatacgactgggctacttccaagcaggtgctgcaggagattggcatcccccagcccctgcagttagaaaccccgaagtcttcccagccagtgagccactttgtgtatttactgtatatttattgtgccctaaatgtgcaactctcctaaagacaaaacttctctttctgatgttaagcacatgttacttcaacaagatgcttggagaacaacaaggtacccagaatttttagaagccttcagaagaggctaaaatatccagctttgggggacctggaagaaatgtctccaaaggaagcaaggcatgttttagttgagtgctctggtctcactatgaagtggggatgactgtggcttcataactctacctggctgtgggttggaagctgatggaatgagaaatgtcctttctccttctctgaggaaattttgagacttgtttcggtgtgtctgtgtgatggggatgaggctggggttgggatctgatgtatgccattcacagaagctctcaatttcagatgataggtgaattccctgcccctcccccaccactgagaagctagactttcatgcgggagaggctacttttatgtgtcgtcttccggggaagggtccctccactgaaagctagccagtcatgttttctgtttttggatttttgcaattggtttcacctcatgtctccctccctacaaagcactgcctctactgggcgtgctgccaaggccatgtgcactccatcctcatgtatcctttttcacggggaccagaacactggtacgtcatcaccaaagccaatctgctctagctgcccacagatgccaccaaaacctgctatctcttcatcaccaggtacgattctctttccacagtggacacagcaggctattttctagtttgtgctggtcacgtggtagatgaagcctcttactgccccacttagggtggccacggctgcttgtgaatgcagctttgccagtggcatatctgtcatctgattgcggtggtgaaatggaattgaggcccaaggttagaagcagccgagacgccacttggatactgatttgaacaatgtagaagtcagattctgaattccaaagttatttctcataagtacccaatggcatctctccatctacaaagttgcagtattatgcaaataaaactgacctcattttctgctatgcaataagaatacttaattctagttcccgacaagccagttgcaatatcccctaagatgctttttgagctgtcttactttgatatctgttgtgtaacgtttgtatatttctgagccagatcctttcaaagattgcctttttataaaattgaagctatagcttttaggctaaaattttaacgtagatatttttataagatatttttttcaagagtttgaatcgctttttattgtccatggtaatgaaatgttgtgttctttgcatcattcactctcaaacgtagttcatgcctgtagctctcttccttttgtttctcacccttcagaaacatatttttcagtagctccaggtagatgagcctttttttttttttttttaaataccatattcaagggagtctgctgaattttaaaacgcagtcactggtgtttcttgaattgctagggactgatgttatgttcgactcagcacttgcccgtctgtattgattgtgtctttttttttttttttggagtctgctttctgtgggggtgaggccgggctgtctcgtggtggctcccactgacgggcactgagcctggtaccctgtggcatggagaagcctcagggaaaggcctgcccccccagcacatactcccatagtgtcctaggtccagccgaccattccttattctcttctatctccttgttgatctgaagcttccaatagcttgaggcctttgctgctggatgatgccctttttgggagcatcttgtctctaacctttaaaagaggggtcaatcctcatgatccctgtgtgttaagcatatgctttgcaggtgctcacactacacttacaacttgcttcttgagctatgtctctactccaggctctgttttgtgtatttatctgccatttgcatcatggtttttaaaatttattattattattattattgttgggacaggtgccatttaaattgcctccatgctccccatttgcacctagctggatcaagttgggaggctgagcaaactcatattccagttagttggagtttttaaaggctctgtttgcctggagaagcaaggaggttagaatgtaatttttttaagcgtttgcactatttagagtcctaagcccctcatgttcagctgtgctgtgtttctactgaccaagcaggagagccagcagcacttccagcatttgggaatggaagagatttcttctgtagtggataattacagcctcatagcccctgtgcagccttcgtcatgggactcagtgactcatggatatagcatcagccatggcaggaatgcacaggactgtggcatttgcagcatcaaatcaccctagtgccatgtttggttatgagattgtaaattattcgctcccccgtcctcccctcccctcattttcagtggcaatagaggacccttgttgtacttcttgtttaatttgcatattatgtgtaaaatgctttcgttgaaagaaaactgaagacactgaatgtgtatgtctgtgtgggtgctctgtccctgtggttgtcatagccagtcagacttgatcactgacaccccgtacaacatattgcataggtaagatcctcgatctggtgttctctgcgtggctgttagggactgtatatcttgtaaaagaacacttgtcacatgcttgatcagttacagcaatagctgaagaaacatttcctcaaatgtattattttaacaggaatcatgttctaatttcccatcctttaattttaataaaagctgaactgtgtgaacttttctcagtatttcatttctatagtccagtctctctgctatgtctcaaacatgaaaaggacagacttattcctgtatgtctttggattaaaaaaatttttaagatcta

SEQ ID NO: 281594 - DNA, 1480 bp, Homo sapiens
cggcgagctactcgacaagtcgtcagcgcggctgcgccgcaggagcccgggaggcctttcgcccgaggcgggctgcgggctgctggggtctggtgcggagggccaacttctgggaataacctggctgtgggcttaaaaatcgtagtcattcattatcacgggcttctctctctcgaatacctttaacatttatcgccttgttagtctccacatccacctccgtgaaagagatggagtctcgctatatttcccagtctggcctcaaactcctgatcttaagggatccccagctcaacctctcccagcagctgggactaccgggctgtcaaatttacattaactatgagaattaagcagaatccgaaagtcatctgagttggctatctgcacgttctctctgtaccagtgaacttgaactgtggctgtggcctggattccgcattcaaacatgaccaactgacctctggttgtagggatgtcttgaagatgctgaagaacaaacacagagttcagaggatggaagaaactgttataccatctacaatgatttgaaatgccatttgcaactgcagttgaccgtgggttattgaaaccacagaaagtgaaactggataacgaagggaaacactatcccagcctcaacaaggagcttgatttgggcacagaaacaggagaaagagacctgccttgcctcccttatccaaccggaagatgcttcctcttctctcaatatattctcacttatgggtataaagtgtcaagctgagctcccagactctgatacaggctggggatgatgagaagaaccagaggacgatcactgtcaaccctgcccacatggggaaagcattcaaggttatgaatgaactgcggagtaaacagctgttgtgtgacgtgatgattgtggcagaagatgtcgagatagaagcccaccgtgtggtcctggcagcctgcagcccctacttctgtgcgatgttcacaggtgacatgtctgagagtaaagccaaaaagatagaaatcaaggacgtggatgggcagacgctgagtaagctgattgactacatctatactgctgaaatcgaggtgactgaagagaatgtccaggtgctgctcccggcagccagcttgctgcagctcatggatgttcggcagaactgctgtgacttcctgcagtctcagttgcatcccaccaattgcctgggcatccgtgcgtttgcagatgtacacacctgcactgaccttctgcagcaggccaatgcctacgcagagcagcactttccagaggtgatgctaggagaagaatttcttagcctgagtctggaccaggtgtgcagcttgatatccagcgacaagctgaccgtttcttcagaagagaagatcttttcttttctttttttttgagatggagtcttgctctgtcggccaggctgagattgcaccactgcactccatcctgggcaacagagtaagactctgtctc

SEQ ID NO: 281595 - DNA, 1389 bp, Homo sapiens
  misc_feature (2)..(2): n is a, c, g, or t
ancattgctgctgctacctgctttccagagcctttcatcaatgaaggaaagcggctgggctatatccatcgaaattttgctggaaacagattttctgatcacgtagcccttttatcagtattccaagcctgggatgatgctagaatgggtggagaagaagcagagatacgtttttgtgagcacaaaagacttaatatggctacactaagaatgacctgggaagccaaagttcagctcaaagagattttgattaattctgggtttccagaagattgtttgttgacacaagtgtttactaacactggaccagataataatttggatgttgttatctccctcctggccttggtgtgtactagccaagacatgaagtacccatctcccttctttgtatttggtgaaaagattcgaactcgagccatctctgctaaaggcatgactttagtcacccccctgcagttgcttctctttgcctccaagaaagtccaatctgatgggcagattgtgcttgtagatgactggattaaactgcaaatatctcatgaagctgctgcctgtatcactggtctccgggcagccatggaggctttggttgttgaagtaaccaaacaacctgctatcatcagccagttggaccccgtaaatgaacgtatgctgaacatgatccgtcagatctctagaccctcagctgctggtatcaaccttatgattggcagtacacggtatggagatggtccacgtcctcccaagatggcccgatacgacaatggaagcggatatagaaggggaggttctagttacagtggtggaggctatggcggtggctatagcagtggaggctatggtagcggaggctatggtggcagcgccaactcctttcgggcaggatatggtgcaggtgttggtggaggctatagaggagtttcccgaggtggctttagaggcaactctggaggagactacagagggcctagtggaggctacagaggatctgggggattccagcgaggaggtggtaggggggcctatggaactggctactttggacagggaagaggaggtggcggctattaaaacttggttatgtcagttcctgtgtgtagacagtaaggaaaaaaaggcatgctatgtgttacgtgttttttccagtatgtttatttgccaccaaaaagtaaatgcattttcacccattctgtggttcattgtagtttaaggaaaccaagcatatagatgcattagtgattttgtttatattatgtaaaatataacgatctcttaaaaataccacagtttgtattttttctttaaggagtaaagatttgcctttaaataacttggtattttcctggctttcgtttaatacaatagaaaataaagtattacaccgaa

SEQ ID NO: 281596 - DNA, 1156 bp, Homo sapiens
aggctggtaccggcccgacgtatgggatcccaatgtatgctatcataaggaaaagaggaagattctcaccactgaagggcgtaatgcacttatccacaaatcatctgttaattgtccttttagtagccaagacatgaagtacccatctcccttctttgtatttggtgaaaagattcgaactcgagccatctctgctaaaggcatgactttagtcacccccctgcagttgcttctctttgcctccaagaaagtccaatctgatgggcagattgtgcttgtagatgactggattaaactgcaaatatctcatgaagctgctgcctgtatcactggtctccgggcagccatggaggctttggttgttgaagtaaccaaacaacctgctatcatcagccagttggaccccgtaaatgaacgtatgctgaacatgatccgtcagatctctagaccctcagctgctggtatcaaccttatgattggcagtacacggtatggagatggtccacgtcctcccaagatggcccgatacgacaatggaagcggatatagaaggggaggttctagttacagtggtggaggctatggcggtggctatagcagtggaggctatggtagcggaggctatggtggcagcgccaactcctttcgggcaggatatggtgcaggtgttggtggaggctatagaggagtttcccgaggtggctttagaggcaactctggaggagactacagagggcctagtggaggctacagaggatctgggggattccagcgaggaggtggtaggggggcctatggaactggctactttggacagggaagaggaggtggcggctattaaaacttggttatgtcagttcctgtgtgtagacagtaaggaaaaaaaggcatgctatgtgttacgtgttttttccagtatgtttatttgccaccaaaaagtaaatgcattttcacccattctgtggttcattgtagtttaaggaaaccaagcatatagatgcattagtgattttgtttatattatgtaaaatataacgatctcttaaaaataccacagtttgtattttttctttaaggagtaaagatttgcctttaaataacttggtattttcctggctttcgtttaatacaatagaaaataaagtattacaccgaa

SEQ ID NO: 281597 - DNA, 1103 bp, Homo sapiens
cttatttgccacatgaaacagatttaggcattattaccaaggacatttttcaaaatcatatttcagaattattgcaggaaaacatctggtgataaagaccaaatagtttattggcagctccaggaaccctctcctaatgcttgccttcttggaacacttatgttattgaactgagtaagaggactgtcttaaagttctaatgacatactgccaaaattcaaaacctttgagattgaaccagaacttcagaaaaacagatggatacaattgatgactgttttagaatagcagatcaattttatttcaatttctatttgtgcatttggcttcattccctttattaaattttcaaatataactaaatgtgtacatttggtaagtcgttgggaaataataagaatgctttgctaaagtgatggttttgtgcttttcctaggtatggagatggtccacgtcctcccaagatggcccgatacgacaatggaagcggatatagaaggggaggttctagttacagtggtggaggctatggcggtggctatagcagtggaggctatggtagcggaggctatggtggcagcgccaactcctttcgggcaggatatggtgcaggtgttggtggaggctatagaggagtttcccgaggtggctttagaggcaactctggaggagactacagagggcctagtggaggctacagaggatctgggggattccagcgaggaggtggtaggggggcctatggaactggctactttggacagggaagaggaggtggcggctattaaaacttggttatgtcagttcctgtgtgtagacagtaaggaaaaaaaggcatgctatgtgttacgtgttttttccagtatgtttatttgccaccaaaaagtaaatgcattttcacccattctgtggttcattgtagtttaaggaaaccaagcatatagatgcattagtgattttgtttatattatgtaaaatataacgatctcttaaaaataccacagtttgtattttttctttaaggagtaaagatttgcctttaaataacttggtattttcctggctttcgtttaatacaatagaaaataaagtattacaccgaa

SEQ ID NO: 281598 - DNA, 1678 bp, Homo sapiens
  misc_feature (2)..(2): n is a, c, g, or t
ancattgctgctgctacctgctttccagagcctttcatcaatgaaggaaagcggctgggctatatccatcgaaattttgctggaaacagattttctgatcacgtagcccttttatcagtattccaagcctgggatgatgctagaatgggtggagaagaagcagagatacgtttttgtgagcacaaaagacttaatatggctacactaagaatgacctgggaagccaaagttcagctcaaagagattttgattaattctgggtttccagaagattgtttgttgacacaagtgtttactaacactggaccagataataatttggatgttgttatctccctcctggccttggtgtgtaccccaatgtatgctatcataaggaaaagaggaagattctcaccactgaagggcgtaatgcacttatccacaaatcatctgttaattgtccttttagtagccaagacatgaagtacccatctcccttctttgtatttggtgaaaagattcgaactcgagccatctctgctaaaggcatgactttagtcacccccctgcagttgcttctctttgcctccaagaaagtccaatctgatgggcagattgtgcttgtagatgactggattaaactgcaaatatctcatgaagctgctgcctgtatcactggtctccgggcagccatggaggctttggttgttgaagtaaccaaacaacctgctatcatcagccagttggaccccgtaaatgaacgtatgctgaacatgatccgtcagatctctagaccctcagctgctggtatcaaccttatgattggcagtacacggtatggagatggtccacgtcctcccaagatggcccgatacgacaatggaagcggatatagaaggggaggttctagttacagtggtggaggctatggcggtggctatagcagtggaggctatggtagcggaggctatggtggcagcgccaactcctttcgggcaggatatggtgcaggtgttggtggaggctatagaggagtttcccgaggtggctttagaggcaactctggaggagactacagagggcctagtggaggctacagaggatctgggggattccagcgaggaggtggtaggggggcctatggaactggctactttggacagggaagaggaggtggcggctattaaaacttggttatgtcagttcctgtgtgtagacagtaaggaaaaaaaggcatgctatgtgttacgtgttttttccagtatgtttatttgccaccaaaaagtaaatgcattttcacccattctgtggttcattgtagtttaaggaaaccaagcatatagatgcattagtgattttgtttatattatgtaaaatataacgatctcttaaaaataccacagtttgtattttttctttaaggagtaaagatttgcctttaaataacttggtattttcctggctttcgtttaatacaatagaaaataaagtattacaccgaaaaaaaaaaaaagggggggcggtcggatttagaaccagagctcaggaaatagaaccgtctgaatatcctgccggcatatcctagtctaatggacctccaatcctaagatcttacataacggaggggcaaggtcctcccttacctaataatggccaggtttgacctcggtccgaagggggaattaatctaattcca

SEQ ID NO: 281599 - DNA, 1879 bp, Homo sapiens
  misc_feature (2)..(2): n is a, c, g, or t
ancattgctgctgctacctgctttccagagcctttcatcaatgaaggaaagcggctgggctatatccatcgaaattttgctggaaacagattttctgatcacgtagcccttttatcagtattccaagcctgggatgatgctagaatgggtggagaagaagcagagatacgtttttgtgagcacaaaagacttaatatggctacactaagaatgacctgggaagccaaagttcagctcaaagagattttgattaattctgggtttccagaagattgtttgttgacacaagtgtttactaacactggaccagataataatttggatgttgttatctccctcctggccttggtgtgtaccccaatgtatgctatcataaggaaaagaggaagattctcaccactgaagggcgtaatgcacttatccacaaatcatctgttaattgtccttttagtagccaagacatgaagtacccatctcccttctttgtatttggtgaaaagattcgaactcgagccatctctgctaaaggcatgactttagtcacccccctgcagttgcttctctttgcctccaagaaagtccaatctgatgggcagattgtgcttgtagatgactggattaaactgcaaatatctcatgaagctgctgcctgtatcactggtctccgggcagccatggaggctttggttgttgaagtaaccaaacaacctgctatcatcagccagttggaccccgtaaatgaacgtatgctgaacatgatccgtcagatctctagaccctcagctgctggtatcaaccttatgattggcagtacacggtatggagatggtccacgtcctcccaagatggcccgatacgacaatggaagcggatatagaaggggaggttctagttacagtggtggaggctatggcggtggctatagcagtggaggctatggtagcggaggctatggtggcagcgccaactcctttcgggcaggatatggtgcaggtgttggtggaggctatagaggagtttcccgaggtggctttagaggcaactctggaggagactacagagggcctagtggaggctacagaggatctgggggattccagcgaggaggtggtaggggggcctatggaactggctactttggacagggaagaggaggtggcggctattaaaacttggttatgtcagttcctgtgtgtagacagtaaggaaaaaaaggcatgctatgtgttacgtgttttttccagtatgtttatttgccaccaaaaagtaaatgcattttcacccattctgtggttcattgtagtttaaggaaaccaagcatatagatgcattagtgattttgtttatattatgtaaaatataacgatctcttaaaaataccacagtttgtattttttctttaaggagtaaagatttgcctttaaataacttggtattttcctggctttcgtttaatacaatagaaaataaagtattacaccgaaaaaaaaaaaaaaaaaaaaaaaaaaaaaaaaaaaaaaaaaaaaaaaaaaaaaaaaaaaaaaaaaaacccaaaaaaaaaaaaaaaaaaaaaaactttgtggcccttttggcccaagcgattttaaatttgggcaagtttttgcatggggcccaaatttgggcttatttggccaatttccccttaaggggggcgttttacaattcaatggcccgggttttaaaaaggtgggatttgaaaaaccctggggttccccaatttaaaccctttggaagaaaatccctttttgccaagttgggttaaacgcaaagggccccgaccgaatcgccttttccaaaatgttggcaaccttaaatggaaagggaaattggaaggcttaaatttgtgtaaaattccggt

SEQ ID NO: 281600 - DNA, 1223 bp, Homo sapiens
  misc_feature (2)..(2): n is a, c, g, or t
ancattgctgctgctacctgctttccagagcctttcatcaatgaaggaaagcggctgggctatatccatcgaaattttgctggaaacagattttctgatcacgtagcccttttatcagtattccaagcctgggatgatgctagaatgggtggagaagaagcagagatacgtttttgtgagcacaaaagacttaatatggctacactaagaatgacctgggaagccaaagttcagctcaaagagattttgattaattctgggtttccagaagattgtttgttgacacaagtgtttactaacactggaccagataataatttggatgttgttatctccctcctggccttggtgtgtaccccaatgtatgctatcataaggaaaagaggaagattctcaccactgaagggcgtaatgcacttatccacaaatcatctgttaattgtccttttagtagccaagacatgaagtacccatctcccttctttgtatttggtgaaaagattcgaactcgagccatctctgctaaaggcatgactttagtcacccccctgcagttgcttctctttgcctccaagaaagtccaatctgatgggcagattgtgcttgtagatgactggattaaactgcaaatatctcatgaagctgctgcctgtatcactggtctccgggcagccatggaggctttggttgttgaagtaaccaaacaacctgctatcatcagccagttggaccccgtaaatgaacgtatgctgaacatgatccgtcagatctctagaccctcagctgctggtatcaaccttatgattggcagtacacggtatggagatggtccacgtcctcccaagatggcccgatacgacaatggaagcggatatagaaggggaggttctagttacagtggtggaggctatggcggtggctatagcagtggaggctatggtagcggaggctatggtggcagcgccaactcctttcgggcaggatatggtgcaggtgttggtggaggctatagaggagtttcccgaggtggctttagaggcaactctggaggagactacagagggcctagtggaggctacagaggatctgggggattccagcgaggaggtggtaggggggcctatggaactggctactttggacagggaagaggaggtggcggctattaaaacttggttatgtcagttcctgtgtgtagaggtgaccgggatactctagtaacg

SEQ ID NO: 281601 - DNA, 1484 bp, Homo sapiens
  misc_feature (2)..(2): n is a, c, g, or t
ancattgctgctgctacctgctttccagagcctttcatcaatgaaggaaagcggctgggctatatccatcgaaattttgctggaaacagattttctgatcacgtagcccttttatcagtattccaagcctgggatgatgctagaatgggtggagaagaagcagagatacgtttttgtgagcacaaaagacttaatatggctacactaagaatgacctgggaagccaaagttcagctcaaagagattttgattaattctgggtttccagaagattgtttgttgacacaagtgtttactaacactggaccagataataatttggatgttgttatctccctcctggccttggtgtgtaccccaatgtatgctatcataaggaaaagaggaagattctcaccactgaagggcgtaatgcacttatccacaaatcatctgttaattgtccttttagtagccaagacatgaagtacccatctcccttctttgtatttggtgaaaagattcgaactcgagccatctctgctaaaggcatgactttagtcacccccctgcagttgcttctctttgcctccaagaaagtccaatctgatgggcagattgtgcttgtagatgactggattaaactgcaaatatctcatgaagctgctgcctgtatcactggtctccgggcagccatggaggctttggttgttgaagtaaccaaacaacctgctatcatcagccagttggaccccgtaaatgaacgtatgctgaacatgatccgtcagatctctagaccctcagctgctggtatcaaccttatgattggcagtacacggtatggagatggtccacgtcctcccaagatggcccgatacgacaatggaagcggatatagaaggggaggttctagttacagtggtggaggctatggcggtggctatagcagtggaggctatggtagcggaggctatggtggcagcgccaactcctttcgggcaggatatggtgcaggtgttggtggaggctatagaggagtttcccgaggtggctttagaggcaactctggaggagactacagagggcctagtggaggctacagaggatctgggggattccagcgaggaggtggtaggggggcctatggaactggctactttggacagggaagaggaggtggcggctattaaaacttggttatgtcagttcctgtgtgtagacagtaaggaaaaaaaggcatgctatgtgttacgtgttttttccagtatgtttatttgccaccaaaaagtaaatgcattttcacccattctgtggttcattgtagtttaaggaaaccaagcatatagatgcattagtgattttgtttatattatgtaaaatataacgatctcttaaaaataccacagtttgtattttttctttaaggagtaaagatttgcctttaaataacttggtattttcctggctttcgtttaatacaatagaaaataaagtattacaccgaa

SEQ ID NO: 281602 - DNA, 1025 bp, Homo sapiens
ggctaggacgaggccgggtggttgctgtatttggtgaaaagattcgaactcgagccatctctgctaaaggcatgactttagtcacccccctgcagttgcttctctttgcctccaagaaagtccaatctgatgggcagattgtgcttgtagatgactggattaaactgcaaatatctcatgaagctgctgcctgtatcactggtctccgggcagccatggaggctttggttgttgaagtaaccaaacaacctgctatcatcagccagttggaccccgtaaatgaacgtatgctgaacatgatccgtcagatctctagaccctcagctgctggtatcaaccttatgattggcagtacacggtatggagatggtccacgtcctcccaagatggcccgatacgacaatggaagcggatatagaaggggaggttctagttacagtggtggaggctatggcggtggctatagcagtggaggctatggtagcggaggctatggtggcagcgccaactcctttcgggcaggatatggtgcaggtgttggtggaggctatagaggagtttcccgaggtggctttagaggcaactctggaggagactacagagggcctagtggaggctacagaggatctgggggattccagcgaggaggtggtaggggggcctatggaactggctactttggacagggaagaggaggtggcggctattaaaacttggttatgtcagttcctgtgtgtagacagtaaggaaaaaaaggcatgctatgtgttacgtgttttttccagtatgtttatttgccaccaaaaagtaaatgcattttcacccattctgtggttcattgtagtttaaggaaaccaagcatatagatgcattagtgattttgtttatattatgtaaaatataacgatctcttaaaaataccacagtttgtattttttctttaaggagtaaagatttgcctttaaataacttggtattttcctggctttcgtttaatacaatagaaaataaagtattacaccgaa

SEQ ID NO: 281603 - DNA, 1724 bp, Homo sapiens
  misc_feature (2)..(2): n is a, c, g, or t
ancattgctgctgctacctgctttccagagcctttcatcaatgaaggaaagcggctgggctatatccatcgaaattttgctggaaacagattttctgatcacgtagcccttttatcagtattccaagcctgggatgatgctagaatgggtggagaagaagcagagatacgtttttgtgagcacaaaagacttaatatggctacactaagaatgacctgggaagccaaagttcagctcaaagagattttgattaattctgggtttccagaagattgtttgttgacacaagtgtttactaacactggaccagataataatttggatgttgttatctccctcctggccttggtgtgtaccccaatgtatgctatcataaggaaaagaggaagattctcaccactgaagggcgtaatgcacttatccacaaatcatctgttaattgtccttttagtagccaagacatgaagtacccatctcccttctttgtatttggtgaaaagattcgaactcgagccatctctgctaaaggcatgactttagtcacccccctgcagttgcttctctttgcctccaagaaagtccaatctgatgggcagattgtgcttgtagatgactggattaaactgcaaatatctcatgaagctgctgcctgtatcactggtctccgggcagccatggaggctttggttgttgaagtaaccaaacaacctgctatcatcagccagttggaccccgtaaatgaacgtatgctgaacatgatccgtcagatctctagaccctcagctgctggtatcaaccttatgattggcagtacacggtatggagatggtccacgtcctcccaagatggcccgatacgacaatggaagcggatatagaaggggaggttctagttacagtggtggaggctatggcggtggctatagcagtggaggctatggtagcggaggctatggtggcagcgccaactcctttcgggcaggatatggtgcaggtgttggtggaggctatagaggagtttcccgaggtggctttagaggcaactctggaggagactacagagggcctagtggaggctacagaggatctgggggattccagcgaggaggtggtaggggggcctatggaactggctactttggacagggaagaggaggtggcggctattaaaacttggttatgtcagttcctgtgtgtagacagtaaggaaaaaaaggcatgctatgtgttacgtgttttttccagtatgtttatttgccaccaaaaagtaaatgcattttcacccattctgtggttcattgtagtttaaggaaaccaagcatatagatgcattagtgattttgtttatattatgtaaaatataacgatctcttaaaaataccacagtttgtattttttctttaaggagtaaagatttgcctttaaataacttggtattttcctggctttcgtttaatacaatagaaaataaagtattacaccgaatacttgccgtgtagtttgtttgttgacctcgtatgttagaaaattttacaatgccagctacatctgttgattttaaatgtcagagaagttgtaccctgtttcaaaagtatactaagtgatactacttgtaatagaataaatcatcttggaattgaattgttaccttttgaagtaaatactggcaagtgcacaagccacataaacctgaataaaacttttgacctagggttgaaaaaaaaa

SEQ ID NO: 281604 - DNA, 1617 bp, Homo sapiens
  misc_feature (2)..(2): n is a, c, g, or t
ancattgctgctgctacctgctttccagagcctttcatcaatgaaggaaagcggctgggctatatccatcgaaattttgctggaaacagattttctgatcacgtagcccttttatcagtattccaagcctgggatgatgctagaatgggtggagaagaagcagagatacgtttttgtgagcacaaaagacttaatatggctacactaagaatgacctgggaagccaaagttcagctcaaagagattttgattaattctgggtttccagaagattgtttgttgacacaagtgtttactaacactggaccagataataatttggatgttgttatctccctcctggccttggtgtgtaccccaatgtatgctatcataaggaaaagaggaagattctcaccactgaagggcgtaatgcacttatccacaaatcatctgttaattgtccttttagtagccaagacatgaagtacccatctcccttctttgtatttggtgaaaagattcgaactcgagccatctctgctaaaggcatgactttagtcacccccctgcagttgcttctctttgcctccaagaaagtccaatctgatgggcagattgtgcttgtagatgactggattaaactgcaaatatctcatgaagctgctgcctgtatcactggtctccgggcagccatggaggctttggttgttgaagtaaccaaacaacctgctatcatcagccagttggaccccgtaaatgaacgtatgctgaacatgatccgtcagatctctagaccctcagctgctggtatcaaccttatgattggcagtacacggtatggagatggtccacgtcctcccaagatggcccgatacgacaatggaagcggatatagaaggggaggttctagttacagtggtggaggctatggcggtggctatagcagtggaggctatggtagcggaggctatggtggcagcgccaactcctttcgggcaggatatggtgcaggtgttggtggaggctatagaggagtttcccgaggtggctttagaggcaactctggaggagactacagagggcctagtggaggctacagaggatctgggggattccagcgaggaggtggtaggggggcctatggaactggctactttggacagggaagaggaggtggcggctattaaaacttggttatgtcagttcctgtgtgtagacagtaaggaaaaaaaggcatgctatgtgttacgtgttttttccagtatgtttatttgccaccaaaaagtaaatgcattttcacccattctgtggttcattgtagtttaaggaaaccaagcatatagatgcattagtgattttgtttatattatgtaaaatataacgatctcttaaaaataccacagtttgtattttttctttaaggagtaaagatttgcctttaaataacttggtattttcctggttcgttatcatggaaataaggttacggaaaaaaaaaaggggggggctaaagatcccgggcagtaggaccggtttgaagggcctaggggtaaaaggggggggtaaacgcgaggaagctgtttgggccctggggatgggccaaagggggaaaggtgggaggggggtaataaaaga

SEQ ID NO: 281605 - DNA, 942 bp, Homo sapiens
aggctggtaccggcccgacgtatgggatcccaatgtatgctatcataaggaaaagaggaagattctcaccactgaagggcgtaatgcacttatccacaaatcatctgttaattgtccttttagtagccaagacatgaagtacccatctcccttctttgtatttggtgaaaagattcgaactcgagccatctctgctaaaggcatgactttagtcacccccctgcagttgcttctctttgcctccaagaaagtccaatctgatgggcagattgtgcttgtagatgactggattaaactgcaaatatctcatgaagctgctgcctgtatcactggtctccgggcagccatggaggctttggttgttgaagtaaccaaacaacctgctatcatcagccagttggaccccgtaaatgaacgtatgctgaacatgatccgtcagatctctagaccctcagctgctggtatcaaccttatgattggcagtacacggtatggagatggtccacgtcctcccaagatggcccgatacgacaatggaagcggatatagaaggggaggttctagttacagtggtggaggctatggcggtggctatagcagtggaggctatggtagcggaggtattaaaacttggttatgtcagttcctgtgtgtagacagtaaggaaaaaaaggcatgctatgtgttacgtgttttttccagtatgtttatttgccaccaaaaagtaaatgcattttcacccattctgtggttcattgtagtttaaggaaaccaagcatatagatgcattagtgattttgtttatattatgtaaaatataacgatctcttaaaaataccacagtttgtattttttctttaaggagtaaagatttgcctttaaataacttggtattttcctggctttcgtttaatacaatagaaaataaagtattacaccgaa

SEQ ID NO: 281606 - DNA, 1959 bp, Homo sapiens
gcccgccagtaacaaacatggctccctgaagccgctcaggctcaagagcaacatggaggtctgcacttaatcgctcctctccgggggcggccatactgaggaggcatctcttccgtgcaggcaggctctcctggggacctcagagattctctccagcggcagcagaaaacgggcaatgggtggattcgggtccagattctggcaggagggagtttgggatcgagatctggaaaaaagcactagactggaagaggacgcgatggagtcggagccgctggcggggacaaaaaccagaggccggggaaggcgccggtgggaggcaaggcgcgcatagactttacctgcgcacgcgtcgcagccatctccgcgcacagtggtggccaccgcgactggtgctgaagtgtcggcgcgtgccgggcgctccgctgggacccgggttgctcgccctgagtctcagctttctcatctgtacggttgggacaagtacagtaaccctcgcccgtcaagacgggccagggctgtggcgagggtccacgccttagagcaggcacctatcttgtgcagggccctgagacggggtctgactcagttcctgcggggaacttcaccagtgacccagtcagtgcccttcagttaaagaccaccaggagcacacttatatcatggaaatcaggacagtagcagttgggattgtggcaatcaaaggggtggaaagtgaattctatcttgcaacgaacgaggaaggaaaactctatgcaaagaaggaatacaatgaagattgtaacttcaaagatctaattctggaaaaccattacaacacatatgcagcagctaaatggacaaacaacggaggggaaatgtttgtggccttaaatcaaaaggggattcctgtaagaggaaaaaaaacgaagaaagaacaaaaaacagcccactttcttcctatggcaataacttaattgcatatggtatataaagaaccagttccagtagggagatttctttaagtggactgttttctttcttctcaaaattttctttccttttattttttagtaatcaagaaaggctggaaaactactgaaaaactgatcaagcttgacttgtgcatttatgtttgttttaagacactgcattaaagaaagatttgaaaagtatacacaaaaatcagatttagtaactaaaggttgtacaaaattgtaaaactggttgtacaatcatgatgttagtaatagtaatttttttcttaaattaatttacccttaagagtatgttagatttgattatctgataatgattatttaaatattcctatctgcttataaaatggctgctataataataataatgcagatgatgttatataaggtgtatcagacctacaggctgctgcaggatttgtcagataatcaagccacactaactatagaaaatgagcagcattttaaatgctttctagtgaaaaattataatctacttaaactctaatcagaaaaaaagaatattctcaaaaaaatctattacgaaagtcaataaaatagataatttaacaaaagtacaggattagaacatgcttatacctattaacaagaacaaaatttctaatgctgctcaagtggaaagggtattgctaaaaggatgtttccaaaaatcttgtatataagatagcaacagtgattgatgataatactgtacttcatcttacttgccacaaaataacattttataatttctcaaagtaaaattgagaaatctttaagtttttttcaagtaacataatctatctttgtataattcgtatttgggaatatggcttttaataatgttcttcccacaaataatcatgcttttttcctatggttacagcattaaactatattttaagttgtttttgaactttattattttgttatttaagtttattttatttattaaaaaaaccttaataagctgaatctgttt

SEQ ID NO: 281607 - DNA, 2167 bp, Homo sapiens
gcccgccagtaacaaacatggctccctgaagccgctcaggctcaagagcaacatggaggtctgcacttaatcgctcctctccgggggcggccatactgaggaggcatctcttccgtgcaggcaggctctcctggggacctcagagattctctccagcggcagcagaaaacgggcaatgggtggattcgggtccagattctggcaggagggagtttgggatcgagatctggaaaaaagcactagactggaagaggacgcgatggagtcggagccgctggcggggacaaaaaccagaggccggggaaggcgccggtgggaggcaaggcgcgcatagactttacctgcgcacgcgtcgcagccatctccgcgcacagtggtggccaccgcgactggtgctgaagtgtcggcgcgtgccgggcgctccgctgggacccgggttgctcgccctgagtctcagctttctcatctgtacggttgggacaagtacagtaaccctcgcccgtcaagacgggccagggctgtggcgagggtccacgccttagagcaggcacctatcttgtgcagggccctgagacggggtctgactcagttcctgcggggaacttcaccagtgacccagtcagtgcccttcagttaaagaccaccaggagcacacttcattgctgttggaaaggctgatgccaatcaaaaccaatttttccctaaaggatgatctgtcttctcatcattttgacaggatgtaacaaaacaaaggagtcttcaatgttgctggagtgcagtggcatgaccatggctcactacagtcttgaactttcatgctcaagctatcctctgaccttagcctcctgagtagctggaactacagatatcatggaaatcaggacagtagcagttgggattgtggcaatcaaaggggtggaaagtgaattctatcttgcaacgaacgaggaaggaaaactctatgcaaagaaggaatacaatgaagattgtaacttcaaagatctaattctggaaaaccattacaacacatatgcagcagctaaatggacaaacaacggaggggaaatgtttgtggccttaaatcaaaaggggattcctgtaagaggaaaaaaaacgaagaaagaacaaaaaacagcccactttcttcctatggcaataacttaattgcatatggtatataaagaaccagttccagtagggagatttctttaagtggactgttttctttcttctcaaaattttctttccttttattttttagtaatcaagaaaggctggaaaactactgaaaaactgatcaagcttgacttgtgcatttatgtttgttttaagacactgcattaaagaaagatttgaaaagtatacacaaaaatcagatttagtaactaaaggttgtacaaaattgtaaaactggttgtacaatcatgatgttagtaatagtaatttttttcttaaattaatttacccttaagagtatgttagatttgattatctgataatgattatttaaatattcctatctgcttataaaatggctgctataataataataatgcagatgatgttatataaggtgtatcagacctacaggctgctgcaggatttgtcagataatcaagccacactaactatagaaaatgagcagcattttaaatgctttctagtgaaaaattataatctacttaaactctaatcagaaaaaaagaatattctcaaaaaaatctattacgaaagtcaataaaatagataatttaacaaaagtacaggattagaacatgcttatacctattaacaagaacaaaatttctaatgctgctcaagtggaaagggtattgctaaaaggatgtttccaaaaatcttgtatataagatagcaacagtgattgatgataatactgtacttcatcttacttgccacaaaataacattttataatttctcaaagtaaaattgagaaatctttaagtttttttcaagtaacataatctatctttgtataattcgtatttgggaatatggcttttaataatgttcttcccacaaataatcatgcttttttcctatggttacagcattaaactatattttaagttgtttttgaactttattattttgttatttaagtttattttatttattaaaaaaaccttaataagctgaatctgttt

SEQ ID NO: 281608 - DNA, 1906 bp, Homo sapiens
gcccgccagtaacaaacatggctccctgaagccgctcaggctcaagagcaacatggaggtctgcacttaatcgctcctctccgggggcggccatactgaggaggcatctcttccgtgcaggcaggctctcctggggacctcagagattctctccagcggcagcagaaaacgggcaatgggtggattcgggtccagattctggcaggagggagtttgggatcgagatctggaaaaaagcactagactggaagaggacgcgatggagtcggagccgctggcggggacaaaaaccagaggccggggaaggcgccggtgggaggcaaggcgcgcatagactttacctgcgcacgcgtcgcagccatctccgcgcacagtggtggccaccgcgactggtgctgaagtgtcggcgcgtgccgggcgctccgctgggacccgggttgctcgccctgagtctcagctttctcatctgtacggttgggacaagtacagtaaccctcgcccgtcaagacgggccagggctgtggcgagggtccacgccttagagcaggcacctatcttgtgcagggccctgagacggggtctgactcagttcctgcggggaacttcaccagtgacccagtcagtgcccttcagttaaagaccaccaggagcacacttatatcatggaaatcaggacagtagcagttgggattgtggcaatcaaaggggtggaaagtgaattctatcttgcaacgaacgaggaaggaaaactctatgcaaagaaggaatacaatgaagattgtaacttcaaagatctaattctggaaaaccattacaacacatatgcagcagctaaatggacaaacaacggaggggaaatgtttgtggccttaaatcaaaaggggattcctgtaagaggaaaaaaaacgaagaaagaacaaaaaacagcccactttcttcctatggcaataacttaattgcatatggtatataaagaaccagttccagtagggagatttctttaagtggactgttttctttcttctcaaaattttctttccttttattttttagtaatcaagaaaggctggaaaactactgaaaaactgatcaagcttgacttgtgcatttatgtttgttttaagacactgcattaaagaaagatttgaaaagtatacacaaaaatcagatttagtaactaaaggttgtacaaaattgtaaaactggttgtacaatcatgatgttagtaatagtaatttttttcttaaattaatttacccttaagagtatgttagatttgattatctgataatgattatttaaatattcctatctgcttataaaatggctgctataataataataatgcagatgatgttatataaggtgtatcagacctacaggctgctgcaggatttgtcagataatcaagccacactaactatagaaaatgagcagcattttaaatgctttctagtgaaaaattataatctacttaaactctaatcagaaaaaaagaatattctcaaaaaaatctattacgaaagtcaataaaatagataatttaacaaaagtacaggattagaacatgcttatacctattaacaagaacaaaatttctaatgctgctcaagtggaaagggtattgctaaaaggatgtttccaaaaatcttgtatataagatagcaacataatttctcaaagtaaaattgagaaatctttaagtttttttcaagtaacataatctatctttgtataattcgtatttgggaatatggcttttaataatgttcttcccacaaataatcatgcttttttcctatggttacagcattaaactatattttaagttgtttttgaactttattattttgttatttaagtttattttatttattaaaaaaaccttaataagctgaatctgttt

SEQ ID NO: 281609 - DNA, 1990 bp, Homo sapiens
gcccgccagtaacaaacatggctccctgaagccgctcaggctcaagagcaacatggaggtctgcacttaatcgctcctctccgggggcggccatactgaggaggcatctcttccgtgcaggcaggctctcctggggacctcagagattctctccagcggcagcagaaaacgggcaatgggtggattcgggtccagattctggcaggagggagtttgggatcgagatctggaaaaaagcactagactggaagaggacgcgatggagtcggagccgctggcggggacaaaaaccagaggccggggaaggcgccggtgggaggcaaggcgcgcatagactttacctgcgcacgcgtcgcagccatctccgcgcacagtggtggccaccgcgactggtgctgaagtgtcggcgcgtgccgggcgctccgctgggacccgggttgctcgccctgagtctcagctttctcatctgtacggttgggacaagtacagtaaccctcgcccgtcaagacgggccagggctgtggcgagggtccacgccttagagcaggcacctatcttgtgcagggccctgagacggggtctgactcagttcctgcggggaacttcaccagtgacccagtcagtgcccttcagttaaagaccaccaggagcacacttgatgtaacaaaacaaaggagtcttcaatgttatatcatggaaatcaggacagtagcagttgggattgtggcaatcaaaggggtggaaagtgaattctatcttgcaacgaacgaggaaggaaaactctatgcaaagaaggaatacaatgaagattgtaacttcaaagatctaattctggaaaaccattacaacacatatgcagcagctaaatggacaaacaacggaggggaaatgtttgtggccttaaatcaaaaggggattcctgtaagaggaaaaaaaacgaagaaagaacaaaaaacagcccactttcttcctatggcaataacttaattgcatatggtatataaagaaccagttccagtagggagatttctttaagtggactgttttctttcttctcaaaattttctttccttttattttttagtaatcaagaaaggctggaaaactactgaaaaactgatcaagcttgacttgtgcatttatgtttgttttaagacactgcattaaagaaagatttgaaaagtatacacaaaaatcagatttagtaactaaaggttgtacaaaattgtaaaactggttgtacaatcatgatgttagtaatagtaatttttttcttaaattaatttacccttaagagtatgttagatttgattatctgataatgattatttaaatattcctatctgcttataaaatggctgctataataataataatgcagatgatgttatataaggtgtatcagacctacaggctgctgcaggatttgtcagataatcaagccacactaactatagaaaatgagcagcattttaaatgctttctagtgaaaaattataatctacttaaactctaatcagaaaaaaagaatattctcaaaaaaatctattacgaaagtcaataaaatagataatttaacaaaagtacaggattagaacatgcttatacctattaacaagaacaaaatttctaatgctgctcaagtggaaagggtattgctaaaaggatgtttccaaaaatcttgtatataagatagcaacagtgattgatgataatactgtacttcatcttacttgccacaaaataacattttataatttctcaaagtaaaattgagaaatctttaagtttttttcaagtaacataatctatctttgtataattcgtatttgggaatatggcttttaataatgttcttcccacaaataatcatgcttttttcctatggttacagcattaaactatattttaagttgtttttgaactttattattttgttatttaagtttattttatttattaaaaaaaccttaataagctgaatctgttt

SEQ ID NO: 281610 - DNA, 1139 bp, Homo sapiens
acccaggcggcaagagctgccgggacggtccccatcttcttggagcgctttaggctggccggcggcgctgggaggtggagtcgttgctgttgctgtttgtgagcctgtggcgcggcttctgtgggccggaaccttaaagatagccgcaatggctgaaaatggtgataatgaaaagatggctgccctggaggccaaaatctgtcatcaaattgagtattattttggcgacttcaatttgccacgggacaagtttctaaaggaacagataaaactggatgaaggctgggtacctttggagataatgataaaattcaacaggttgaaccgtctaacaacagactttaatgtaattgtggaagcattgagcaaatccaaggcagaactcatggaaatcagtgaagataaaactaaaatcagaaggtctccaagcaaacccctacctgaagtgactgatgagtataaaaatgatgtaaaaaacagatctgtttatattaaaggcttcccaactgatgcaactcttgatgacataaaagaatggttagaagataaaggtcaagtactaaatattcagatgagaagaacattgcataaagcatttaagggatcaatttttgttgtgtttgatagcattgaatctgctaagaaatttgtagagacccctggccagaagtacaaagaaacagacctgctaatacttttcaaggacgattactttgccaaaaaaaatgaagaaagaaaacaaaataaagtggaagctaaattaagagctaaacaggagcaagaagcaaaacaaaagttagaagaagatgctgaaatgaaatctctagaagaaaagattggatgcttgctgaaattttcgggtgatttagatgatcagacctgtagagaagatttacacatacttttctcaaatcatggtgaaataaaatggatagacttcgtcagaggagcaaaagaggtttggatacatccctatcctttttagcaatcagtttgaaaatctgtagaaacttagacaaaattagtagaaagtaattttaaaaattgtgtttattaaattagtttctacttgatcatttgttattgccactagatgtgatgtctgatattttctgaattatactaaattagtttctact

SEQ ID NO: 281611 - DNA, 809 bp, Homo sapiens
  misc_feature (56)..(56): n is a, c, g, or t
  misc_feature (719)..(719): n is a, c, g, or t
  misc_feature (752)..(752): n is a, c, g, or t
  misc_feature (759)..(760): n is a, c, g, or t
  misc_feature (772)..(772): n is a, c, g, or t
  misc_feature (777)..(777): n is a, c, g, or t
aagcattggtatcaacgcagagtggctcattactggctcgggtgcggagtcgcttnatcagctggccggcggcgctgggaggtggagtcgttgctgttgctgtttgtgagcctgtggcgcggcttctgtgggccggaaccttaaagatagccgcaatggctgaaaatggtgataatgaaaagatggctgccctggaggccaaaatctgtcatcaaattgagtattattttggcgacttcaatttgccacgggacaagtttctaaaggaacagataaaactggatgaaggctgggtacctttggagataatgataaaattcaacaggttgaaccgtctaacaacagactttaatgtaattgtggaagcattgagcaaatccaaggcagaactcatggaaatcagtgaagataaaactaaaatcagaaggtctccaagcaaacccctacctgaagtgactgatgagtataaaaatgatgtaaaaaacagatctgtttatattaaaggcttcccaactgatgcaactcttgatgacataaaagaatggttagaagataaaggtcaagtactaaatattcagatgagaagaacattgcataaagcatttaagggatcaatttttgttgtgtttgatagcattgaatctgctaagaaatttgtagagacccctggccagaagtacaaagaaacagacctgctaatacttttcaagagggacgantactttgccaaaaaattgaggaagaaccaatangtgggcnnattagagcaacngggcngagcaaccagttgagaagactagtgtttcaag

SEQ ID NO: 281612 - DNA, 1221 bp, Homo sapiens
cagcacctctggaatccccttaaagcttgacagggatagaagagctgacacccggtctgggctgggcatctcttggggcagagagtagggttgatggtcagggctggggacgtgtctgggtttgagtctccatggggggtggcaggaggaggactatcttgtcccctcccatccttatgttctggaatggagaggcgatgccaaggtggaagcctgcattggctggggagctgagaaacatggaacattccattgaacagaacccccagcctacgcattctggttcatggagatttgcccaggagagacaggaagttcccataaggttagggaggaggggataattctatttaaagaaaaagccaaggaagcattgggtaaagccaaagatgcaaataatggtaacctacaattaaggaacaaagaagtgacttgggaagtactagaaggagaggtggaaaaagaagcactgaagaaaataatagaagaccaacaagaatccctaaacaaatggaagtcaaaaggtcgtagatttaaaggaaaaggaaagggtaataaagctgcccagcctgggtctggtaaaggaaaagtacagtttcagggcaagaaaacgaaatttgctagtgatgatgaacatgatgaacatgatgaaaatggtgcaactggacctgtgaaaagagcaagagaagaaacagacaaagaagaacctgcatccaaacaacagaaaacagaaaatggtgctggagaccagtagtttagtaaaccaattttttattcattttaaataggttttaaacgacttttgtttgcggggcttttaaaaggaaaaccgaattaggtccacttcaatgtccacctgtgagaaaggaaaaatttttttgttgtttaacttgtctttttgttatgcaaatgagatttctttgaatgtattgttctgtttgtgttatttcagatgattcaaatatcaaaaggaagattcttccattaaattgcctttgtaatatgagaatgtattagtacaaactaactaataaaatatatactatatgaaaagagcaaaaaaaaaatggactcggttggcctacacggtggagctgtgaggacccttaccttttgtggggggtttatggtggatcctgggtgcctagcttccttatttgtacgccacgtcttccgggtccccgtcactttcctgtcagcgacgtaccagctttcaccgca

SEQ ID NO: 281613 - DNA, 484 bp, Homo sapiens
gaactctgaaggtagaaataaatgaatgtggactatgatggatttttaaacatccaatttccacataagaatgtattcggtgtatacttgacctgtgaaaagagcaagagaagaaacagacaaagaagaacctgcatccaaacaacagaaaacagaaaatggtgctggagaccagtagtttagtaaaccaattttttattcattttaaataggttttaaacgacttttgtttgcggggcttttaaaaggaaaaccgaattaggtccacttcaatgtccacctgtgagaaaggaaaaatttttttgttgtttaacttgtctttttgttatgcaaatgagatttctttgaatgtattgttctgtttgtgttatttcagatgattcaaatatcaaaaggaagattcttccattaaattgcctttgtaatatgagaatgtattagtacaaactaactaataaaatatatactatatgaaaagagcaaa

SEQ ID NO: 281614 - DNA, 843 bp, Homo sapiens
ttctgcttttactccatttccaatctattaccaatcatgcacattttgccacactgtaaagcatagtttatcttctcagcacctgcatgaaaattttggttgggcgaatacatgttggcccttttggatattaggattgagatttgtcttacctgctataatatctatcttgattttccattctgcagctttcttttgaacatggctgaacataaataatatgttgttatgagctgatttttaaataatgattttttaaaattgctttttactaatacttgagattgagtttttaagcttaaaatttcattagaatctagacccttataaaaatttcaattgaatggatagtattctgaaaataataaatcaatttcaatacatttaacaatctgaaccaaatcacacaataaatccaagtgatagaaagctactcatgcaccacataatgccatttggggttatctagggactgcatatattttggtagtcccataaaattataaatggagctgaaaaattgctattgcctaatgatgtagctatcttgacatcacagcacaacacattaccttcttggtgtttatatatgttttggtaccagtaccatgctattttggttactgtagctttgtagtatagtttgaagtcaggtagcatggtgcttccagctttgttctttttgcttaggattgtcttggctatgtgggctcttttggttccatatgaaatttaaagtagttttttccaattctgtgaagaaagtcagtggtcgcttgatggtgatagcattgaatctataaattaccttgggtaggtatggcctccatgactttttcaaaa

SEQ ID NO: 281615 - DNA, 1681 bp, Homo sapiens
acccaggcggcaagagctgccgggacggtccccatcttcttggagcgctttaggctggccggcggcgctgggaggtggagtcgttgctgttgctgtttgtgagcctgtggcgcggcttctgtgggccggaaccttaaagatagccgcaatggctgaaaatggtgataatgaaaagatggctgccctggaggccaaaatctgtcatcaaattgagtattattttggcgacttcaatttgccacgggacaagtttctaaaggaacagataaaactggatgaaggctgggtacctttggagataatgataaaattcaacaggttgaaccgtctaacaacagactttaatgtaattgtggaagcattgagcaaatccaaggcagaactcatggaaatcagtgaagataaaactaaaatcagaaggtctccaagcaaacccctacctgaagtgactgatgagtataaaaatgatgtaaaaaacagatctgtttatattaaaggcttcccaactgatgcaactcttgatgacataaaagaatggttagaagataaaggtcaagtactaaatattcagatgagaagaacattgcataaagcatttaagggatcaatttttgttgtgtttgatagcattgaatctgctaagaaatttgtagagacccctggccagaagtacaaagaaacagacctgctaatacttttcaaggacgattactttgccaaaaaaaatgaagaaagaaaacaaaataaagtggaagctaaattaagagctaaacaggagcaagaagcaaaacaaaagttagaagaagatgctgaaatgaaatctctagaagaaaagattggatgcttgctgaaattttcgggtgatttagatgatcagacctgtagagaagatttacacatacttttctcaaatcatggtgaaataaaatggatagacttcgtcagaggagcaaaagaggggataattctatttaaagaaaaagccaaggaagcattgggtaaagccaaagatgcaaataatggtaacctacaattaaggaacaaagaagtgacttgggaagtactagaaggagaggtggaaaaagaagcactgaagaaaataatagaagaccaacaagaatccctaaacaaatggaagtcaaaaggtcgtagatttaaaggaaaaggaaagggtaataaagctgcccagcctgggtctggtaaaggaaaagtacagtttcagggcaagaaaacgaaatttgctagtgatgatgaacatgatgaacatgatgaaaatggtgcaactggacctgtgaaaagagcaagagaagaaacagacaaagaagaacctgcatccaaacaacagaaaacagaaaatggtgctggagaccagtagtttagtaaaccaattttttattcattttaaataggttttaaacgacttttgtttgcggggcttttaaaaggaaaaccgaattaggtccacttcaatgtccacctgtgagaaaggaaaaatttttttgttgtttaacttgtctttttgttatgcaaatgagatttctttgaatgtattgttctgtttgtgttatttcagatgattcaaatatcaaaaggaagattcttccattaaattgcctttgtaatatgagaatgtattagtacaaactaactaataaaatatatactatatgaaaagagcaaa

SEQ ID NO: 281616 - DNA, 1688 bp, Homo sapiens
  misc_feature (56)..(56): n is a, c, g, or t
aagcattggtatcaacgcagagtggctcattactggctcgggtgcggagtcgcttnatcagctggccggcggcgctgggaggtggagtcgttgctgttgctgtttgtgagcctgtggcgcggcttctgtgggccggaaccttaaagatagccgcaatggctgaaaatggtgataatgaaaagatggctgccctggaggccaaaatctgtcatcaaattgagtattattttggcgacttcaatttgccacgggacaagtttctaaaggaacagataaaactggatgaaggctgggtacctttggagataatgataaaattcaacaggttgaaccgtctaacaacagactttaatgtaattgtggaagcattgagcaaatccaaggcagaactcatggaaatcagtgaagataaaactaaaatcagaaggtctccaagcaaacccctacctgaagtgactgatgagtataaaaatgatgtaaaaaacagatctgtttatattaaaggcttcccaactgatgcaactcttgatgacataaaagaatggttagaagataaaggtcaagtactaaatattcagatgagaagaacattgcataaagcatttaagggatcaatttttgttgtgtttgatagcattgaatctgctaagaaatttgtagagacccctggccagaagtacaaagaaacagacctgctaatacttttcaaggacgattactttgccaaaaaaaatgaagaaagaaaacaaaataaagtggaagctaaattaagagctaaacaggagcaagaagcaaaacaaaagttagaagaagatgctgaaatgaaatctctagaagaaaagattggatgcttgctgaaattttcgggtgatttagatgatcagacctgtagagaagatttacacatacttttctcaaatcatggtgaaataaaatggatagacttcgtcagaggagcaaaagaggggataattctatttaaagaaaaagccaaggaagcattgggtaaagccaaagatgcaaataatggtaacctacaattaaggaacaaagaagtgacttgggaagtactagaaggagaggtggaaaaagaagcactgaagaaaataatagaagaccaacaagaatccctaaacaaatggaagtcaaaaggtcgtagatttaaaggaaaaggaaagggtaataaagctgcccagcctgggtctggtaaaggaaaagtacagtttcagggcaagaaaacgaaatttgctagtgatgatgaacatgatgaacatgatgaaaatggtgcaactggacctgtgaaaagagcaagagaagaaacagacaaagaagaacctgcatccaaacaacagaaaacagaaaatggtgctggagaccagtagtttagtaaaccaattttttattcattttaaataggttttaaacgacttttgtttgcggggcttttaaaaggaaaaccgaattaggtccacttcaatgtccacctgtgagaaaggaaaaatttttttgttgtttaacttgtctttttgttatgcaaatgagatttctttgaatgtattgttctgtttgtgttatttcagatgattcaaatatcaaaaggaagattcttccattaaattgcctttgtaatatgagaatgtattagtacaaactaactaataaaatatatactatatgaaaagagcaaa

SEQ ID NO: 281617 - DNA, 1842 bp, Homo sapiens
acccaggcggcaagagctgccgggacggtccccatcttcttggagcgctttaggctggccggcggcgctgggaggtggagtcgttgctgttgctgtttgtgagcctgtggcgcggcttctgtgggccggaaccttaaagatagccgcaatggctgaaaatggtgataatgaaaagatggctgccctggaggccaaaatctgtcatcaaattgagtattattttggcgacttcaatttgccacgggacaagtttctaaaggaacagataaaactggatgaaggctgggtacctttggagataatgataaaattcaacaggttgaaccgtctaacaacagactttaatgtaattgtggaagcattgagcaaatccaaggcagaactcatggaaatcagtgaagataaaactaaaatcagaaggtctccaagcaaacccctacctgaagtgactgatgagtataaaaatgatgtaaaaaacagatctgtttatattaaaggcttcccaactgatgcaactcttgatgacataaaagaatggttagaagataaaggtcaagtactaaatattcagatgagaagaacattgcataaagcatttaagggatcaatttttgttgtgtttgatagcattgaatctgctaagaaatttgtagagacccctggccagaagtacaaagaaacagacctgctaatacttttcaaggacgattactttgccaaaaaaaatgaagaaagaaaacaaaataaagtggaagctaaattaagagctaaacaggagcaagaagcaaaacaaaagttagaagaagatgctgaaatgaaatctctagaagaaaagattggatgcttgctgaaattttcgggtgatttagatgatcagacctgtagagaagatttacacatacttttctcaaatcatggtgaaataaaatggatagacttcgtcagaggagcaaaagaggggataattctatttaaagaaaaagccaaggaagcattgggtaaagccaaagatgcaaataatggtaacctacaattaaggaacaaagaagtgacttgggaagtactagaaggagaggtggaaaaagaagcactgaagaaaataatagaagaccaacaagaatccctaaacaaatggaagtcaaaaggtcgtagatttaaaggaaaaggaaagggtaataaagctgcccagcctgggtctggtaaaggaaaagtacagtttcagggcaagaaaacgaaatttgctagtgatgatgaacatgatgaacatgatgaaaatggtgcaactggacctgtgaaaagagcaagagaagaaacagacaaagaagaacctgcatccaaacaacagaaaacagaaaatggtgctggagaccagtagtttagtaaaccaattttttattcattttaaataggttttaaacgacttttgtttgcggggcttttaaaaggaaaaccgaattaggtccacttcaatgtccacctgtgagaaaggaaaaatttttttgttgtttaacttgtctttttgttatgcaaatgagatttctttgaatgtattgttctgtttgtgttatttcagatgattcaaatatcaaaaggaagattcttccattaaattgcctttgtaatatgagaatgtattagtacaaactaactaataaaatatatactatatgaaaagagcaaaaaaaaaatggactcggttggcctacacggtggagctgtgaggacccttaccttttgtggggggtttatggtggatcctgggtgcctagcttccttatttgtacgccacgtcttccgggtccccgtcactttcctgtcagcgacgtaccagctttcaccgca

SEQ ID NO: 281618 - DNA, 1586 bp, Homo sapiens
acccaggcggcaagagctgccgggacggtccccatcttcttggagcgctttaggctggccggcggcgctgggaggtggagtcgttgctgttgctgtttgtgagcctgtggcgcggcttctgtgggccggaaccttaaagatagccgcaatggctgaaaatggtgataatgaaaagatggctgccctggaggccaaaatctgtcatcaaattgagtattattttggcgacttcaatttgccacgggacaagtttctaaaggaacagataaaactggatgaaggctgggtacctttggagataatgataaaattcaacaggttgaaccgtctaacaacagactttaatgtaattgtggaagcattgagcaaatccaaggcagaactcatggaaatcagtgaagataaaactaaaatcagaaggtctccaagcaaacccctacctgaagtgactgatgagtataaaaatgatgtaaaaaacagatctgtttatattaaaggcttcccaactgatgcaactcttgatgacataaaagaatggttagaagataaaggtcaagtactaaatattcagatgagaagaacattgcataaagcatttaagggatcaatttttgttgtgtttgatagcattgaatctgctaagaaatttgtagagacccctggccagaagtacaaagaaacagacctgctaatacttttcaaggacgattactttgccaaaaaaaatgaagaaagaaaacaaaataaagtggaagctaaattaagagctaaacaggagcaagaagcaaaacaaaagttagaagaagatgctgaaatgaaatctctagaagaaaagattggatgcttgctgaaattttcgggtgatttagatgatcagacctgtagagaagatttacacatacttttctcaaatcatggtgaaataaaatggatagacttcgtcagaggagcaaaagaggggataattctatttaaagaaaaagccaaggaagcattgggtaaagccaaagatgcaaataatggtaacctacaattaaggaacaaagaagtgacttgggaagtactagaaggagaggtggaaaaagaagcactgaagaaaataatagaagaccaacaagaatccctaaacaaatggaagtcaaaaggtcgtagatttaaaggaaaaggaaagggtaataaagctgcccagcctgggtctggtaaaggaaaagtacagtttcagggcaagaaaacgaaatttgctagtgatgatgaacatgatgaacatgatgaaaatggtgcaactggacctgtgaaaagagcaagagaagaaacagacaaagaagaacctgcatccaaacaacagaaaacagaaaatggtgctggagaccagtagtttagtaaaccaattttttattcattttaaataggttttaaacgacttttgtttgcggggcttttaaaaggaaaaccgaattaggtccacttcaatgtcctttgatttctttttgtgaagcttgtatgatgcaggcaggtcatagttaagtttaaactctttctcttttgtctttcttcatttaatcgtgtggatggaagtgtgtagacct

SEQ ID NO: 281619 - DNA, 1287 bp, Homo sapiens
acccaggcggcaagagctgccgggacggtccccatcttcttggagcgctttaggctggccggcggcgctgggaggtggagtcgttgctgttgctgtttgtgagcctgtggcgcggcttctgtgggccggaaccttaaagatagccgcaatggctgaaaatggtgataatgaaaagatggctgccctggaggccaaaatctgtcatcaaattgagtattattttggcgacttcaatttgccacgggacaagtttctaaaggaacagataaaactggatgaaggctgggtacctttggagataatgataaaattcaacaggttgaaccgtctaacaacagactttaatgtaattgtggaagcattgagcaaatccaaggcagaactcatggaaatcagtgaagataaaactaaaatcagaaggtctccaagcaaacccctacctgaagtgactgatgagtataaaaatgatgtaaaaaacagatctgtttatattaaaggcttcccaactgatgcaactcttgatgacataaaagaatggttagaagataaaggtcaagtactaaatattcagatgagaagaacattgcataaagcatttaagggatcaatttttgttgtgtttgatagcattgaatctgctaagaaatttgtagagacccctggccagaagtacaaagaaacagacctgctaatacttttcaaggacgattactttgccaaaaaaaatgaagaaagaaaacaaaataaagtggaagctaaattaagagctaaacaggagcaagaagcaaaacaaaagttagaagaagatgctgaaatgaaatctctagaagaaaagattggatgcttgctgaaattttcgggtgatttagatgatcagacctgtagagaagatttacacatacttttctcaaatcatggtgaaataaaatggatagacttcgtcagaggagcaaaagaggggataattctatttaaagaaaaagccaaggaagcattgggtaaagccaaagatgcaaataatggtaacctacaattaaggaacaaagaagtgacttgggaagtactagaaggagaggtggaaaaagaagcactgaagaaaataatagaagaccaacaagaatccctaaacaaatggaagtcaaaaggtcgtagatttaaaggaaaaggaaagggtaataaagctgcccagcctgggtggggcagaaacaaatgacaatggtggaatgtcttcagttaaggctgttttcacttctgtggatcttcagttgcttcaggccatctggatat

SEQ ID NO: 281620 - DNA, 1584 bp, Homo sapiens
atccttaattaaattttttcccccccccgaggctggccggcggcgctgggaggtggagtcgttgctgttgctgtttgtgagcctgtggcgcggcttctgtgggccggaaccttaaagtattattttggcgacttcaatttgccacgggacaagtttctaaaggaacagataaaactggatgaaggctgggtacctttggagataatgataaaattcaacaggttgaaccgtctaacaacagactttaatgtaattgtggaagcattgagcaaatccaaggcagaactcatggaaatcagtgaagataaaactaaaatcagaaggtctccaagcaaacccctacctgaagtgactgatgagtataaaaatgatgtaaaaaacagatctgtttatattaaaggcttcccaactgatgcaactcttgatgacataaaagaatggttagaagataaaggtcaagtactaaatattcagatgagaagaacattgcataaagcatttaagggatcaatttttgttgtgtttgatagcattgaatctgctaagaaatttgtagagacccctggccagaagtacaaagaaacagacctgctaatacttttcaaggacgattactttgccaaaaaaaatgaagaaagaaaacaaaataaagtggaagctaaattaagagctaaacaggagcaagaagcaaaacaaaagttagaagaagatgctgaaatgaaatctctagaagaaaagattggatgcttgctgaaattttcgggtgatttagatgatcagacctgtagagaagatttacacatacttttctcaaatcatggtgaaataaaatggatagacttcgtcagaggagcaaaagaggggataattctatttaaagaaaaagccaaggaagcattgggtaaagccaaagatgcaaataatggtaacctacaattaaggaacaaagaagtgacttgggaagtactagaaggagaggtggaaaaagaagcactgaagaaaataatagaagaccaacaagaatccctaaacaaatggaagtcaaaaggtcgtagatttaaaggaaaaggaaagggtaataaagctgcccagcctgggtctggtaaaggaaaagtacagtttcagggcaagaaaacgaaatttgctagtgatgatgaacatgatgaacatgatgaaaatggtgcaactggacctgtgaaaagagcaagagaagaaacagacaaagaagaacctgcatccaaacaacagaaaacagaaaatggtgctggagaccagtagtttagtaaaccaattttttattcattttaaataggttttaaacgacttttgtttgcggggcttttaaaaggaaaaccgaattaggtccacttcaatgtccacctgtgagaaaggaaaaatttttttgttgtttaacttgtctttttgttatgcaaatgagatttctttgaatgtattgttctgtttgtgttatttcagatgattcaaatatcaaaaggaagattcttccattaaattgcctttgtaatatgagaatgtattagtacaaactaactaataaaatatatactatatgaaaagagcaaa

SEQ ID NO: 281621 - DNA, 1506 bp, Homo sapiens
  misc_feature (34)..(34): n is a, c, g, or t
cgatctagaggatcccgtcaatttctacactcanaatagtattattttggcgacttcaatttgccacgggacaagtttctaaaggaacagataaaactggatgaaggctgggtacctttggagataatgataaaattcaacaggttgaaccgtctaacaacagactttaatgtaattgtggaagcattgagcaaatccaaggcagaactcatggaaatcagtgaagataaaactaaaatcagaaggtctccaagcaaacccctacctgaagtgactgatgagtataaaaatgatgtaaaaaacagatctgtttatattaaaggcttcccaactgatgcaactcttgatgacataaaagaatggttagaagataaaggtcaagtactaaatattcagatgagaagaacattgcataaagcatttaagggatcaatttttgttgtgtttgatagcattgaatctgctaagaaatttgtagagacccctggccagaagtacaaagaaacagacctgctaatacttttcaaggacgattactttgccaaaaaaaatgaagaaagaaaacaaaataaagtggaagctaaattaagagctaaacaggagcaagaagcaaaacaaaagttagaagaagatgctgaaatgaaatctctagaagaaaagattggatgcttgctgaaattttcgggtgatttagatgatcagacctgtagagaagatttacacatacttttctcaaatcatggtgaaataaaatggatagacttcgtcagaggagcaaaagaggggataattctatttaaagaaaaagccaaggaagcattgggtaaagccaaagatgcaaataatggtaacctacaattaaggaacaaagaagtgacttgggaagtactagaaggagaggtggaaaaagaagcactgaagaaaataatagaagaccaacaagaatccctaaacaaatggaagtcaaaaggtcgtagatttaaaggaaaaggaaagggtaataaagctgcccagcctgggtctggtaaaggaaaagtacagtttcagggcaagaaaacgaaatttgctagtgatgatgaacatgatgaacatgatgaaaatggtgcaactggacctgtgaaaagagcaagagaagaaacagacaaagaagaacctgcatccaaacaacagaaaacagaaaatggtgctggagaccagtagtttagtaaaccaattttttattcattttaaataggttttaaacgacttttgtttgcggggcttttaaaaggaaaaccgaattaggtccacttcaatgtccacctgtgagaaaggaaaaatttttttgttgtttaacttgtctttttgttatgcaaatgagatttctttgaatgtattgttctgtttgtgttatttcagatgattcaaatatcaaaaggaagattcttccattaaattgcctttgtaatatgagaatgtattagtacaaactaactaataaaatatatactatatgaaaagagcaaa

SEQ ID NO: 281622 - DNA, 1512 bp, Homo sapiens
  misc_feature (104)..(104): n is a, c, g, or t
ggtggctccctcgaaatcatttgtttacagtctggccaaggttgtggcctccagtattccccctaagagatgggatctttgcctaaaagttactgagaaacganggatgaaggctgggtacctttggagataatgataaaattcaacaggttgaaccgtctaacaacagactttaatgtaattgtggaagcattgagcaaatccaaggcagaactcatggaaatcagtgaagataaaactaaaatcagaaggtctccaagcaaacccctacctgaagtgactgatgagtataaaaatgatgtaaaaaacagatctgtttatattaaaggcttcccaactgatgcaactcttgatgacataaaagaatggttagaagataaaggtcaagtactaaatattcagatgagaagaacattgcataaagcatttaagggatcaatttttgttgtgtttgatagcattgaatctgctaagaaatttgtagagacccctggccagaagtacaaagaaacagacctgctaatacttttcaaggacgattactttgccaaaaaaaatgaagaaagaaaacaaaataaagtggaagctaaattaagagctaaacaggagcaagaagcaaaacaaaagttagaagaagatgctgaaatgaaatctctagaagaaaagattggatgcttgctgaaattttcgggtgatttagatgatcagacctgtagagaagatttacacatacttttctcaaatcatggtgaaataaaatggatagacttcgtcagaggagcaaaagaggggataattctatttaaagaaaaagccaaggaagcattgggtaaagccaaagatgcaaataatggtaacctacaattaaggaacaaagaagtgacttgggaagtactagaaggagaggtggaaaaagaagcactgaagaaaataatagaagaccaacaagaatccctaaacaaatggaagtcaaaaggtcgtagatttaaaggaaaaggaaagggtaataaagctgcccagcctgggtctggtaaaggaaaagtacagtttcagggcaagaaaacgaaatttgctagtgatgatgaacatgatgaacatgatgaaaatggtgcaactggacctgtgaaaagagcaagagaagaaacagacaaagaagaacctgcatccaaacaacagaaaacagaaaatggtgctggagaccagtagtttagtaaaccaattttttattcattttaaataggttttaaacgacttttgtttgcggggcttttaaaaggaaaaccgaattaggtccacttcaatgtccacctgtgagaaaggaaaaatttttttgttgtttaacttgtctttttgttatgcaaatgagatttctttgaatgtattgttctgtttgtgttatttcagatgattcaaatatcaaaaggaagattcttccattaaattgcctttgtaatatgagaatgtattagtacaaactaactaataaaatatatactatatgaaaagagcaaa

SEQ ID NO: 281623 - DNA, 1577 bp, Homo sapiens
acccaggcggcaagagctgccgggacggtccccatcttcttggagcgctttaggctggccggcggcgctgggaggtggagtcgttgctgttgctgtttgtgagcctgtggcgcggcttctgtgggccggaaccttaaagatagccgcaatggctgaaaatggtgataatgaaaagatggctgccctggaggccaaaatctgtcatcaaattgaggttgaaccgtctaacaacagactttaatgtaattgtggaagcattgagcaaatccaaggcagaactcatggaaatcagtgaagataaaactaaaatcagaaggtctccaagcaaacccctacctgaagtgactgatgagtataaaaatgatgtaaaaaacagatctgtttatattaaaggcttcccaactgatgcaactcttgatgacataaaagaatggttagaagataaaggtcaagtactaaatattcagatgagaagaacattgcataaagcatttaagggatcaatttttgttgtgtttgatagcattgaatctgctaagaaatttgtagagacccctggccagaagtacaaagaaacagacctgctaatacttttcaaggacgattactttgccaaaaaaaatgaagaaagaaaacaaaataaagtggaagctaaattaagagctaaacaggagcaagaagcaaaacaaaagttagaagaagatgctgaaatgaaatctctagaagaaaagattggatgcttgctgaaattttcgggtgatttagatgatcagacctgtagagaagatttacacatacttttctcaaatcatggtgaaataaaatggatagacttcgtcagaggagcaaaagaggggataattctatttaaagaaaaagccaaggaagcattgggtaaagccaaagatgcaaataatggtaacctacaattaaggaacaaagaagtgacttgggaagtactagaaggagaggtggaaaaagaagcactgaagaaaataatagaagaccaacaagaatccctaaacaaatggaagtcaaaaggtcgtagatttaaaggaaaaggaaagggtaataaagctgcccagcctgggtctggtaaaggaaaagtacagtttcagggcaagaaaacgaaatttgctagtgatgatgaacatgatgaacatgatgaaaatggtgcaactggacctgtgaaaagagcaagagaagaaacagacaaagaagaacctgcatccaaacaacagaaaacagaaaatggtgctggagaccagtagtttagtaaaccaattttttattcattttaaataggttttaaacgacttttgtttgcggggcttttaaaaggaaaaccgaattaggtccacttcaatgtccacctgtgagaaaggaaaaatttttttgttgtttaacttgtctttttgttatgcaaatgagatttctttgaatgtattgttctgtttgtgttatttcagatgattcaaatatcaaaaggaagattcttccattaaattgcctttgtaatatgagaatgtattagtacaaactaactaataaaatatatactatatgaaaagagcaaa

SEQ ID NO: 281624 - DNA, 1759 bp, Homo sapiens
acccaggcggcaagagctgccgggacggtccccatcttcttggagcgctttaggctggccggcggcgctgggaggtggagtcgttgctgttgctgtttgtgagcctgtggcgcggcttctgtgggccggaaccttaaagatagccgcaatggctgaaaatggtgataatgaaaagatggctgccctggaggccaaaatctgtcatcaaattgagtattattttggcgacttcaatttgccacgggacaagtttctaaaggaacagataaaactggatgaaggctgggtacctttggagataatgataaaattcaacaggttgaaccgtctaacaacagactttaatgtaattgtggaagcattgagcaaatccaaggcagaactcatggaaatcagtgaagataaaactaaaatcagaaggtctccaagcaaacccctacctgaagtgactgatgagtataaaaatgatgtaaaaaacagatctgtttatattaaaggcttcccaactgatgcaactcttgatgacataaaagaatggttagaagataaaggtcaagtactaaatattcagatgagaagaacattgcataaagcatttaaggtatgataatacagactttttctagttttaaaatatatgggacataacttaaaaaaatattttccttcctttttacagggatcaatttttgttgtgtttgatagcattgaatctgctaagaaatttgtagagacccctggccagaagtacaaagaaacagacctgctaatacttttcaaggacgattactttgccaaaaaaaatgaagaaagaaaacaaaataaagtggaagctaaattaagagctaaacaggagcaagaagcaaaacaaaagttagaagaagatgctgaaatgaaatctctagaagaaaagattggatgcttgctgaaattttcgggtgatttagatgatcagacctgtagagaagatttacacatacttttctcaaatcatggtgaaataaaatggatagacttcgtcagaggagcaaaagaggggataattctatttaaagaaaaagccaaggaagcattgggtaaagccaaagatgcaaataatggtaacctacaattaaggaacaaagaagtgacttgggaagtactagaaggagaggtggaaaaagaagcactgaagaaaataatagaagaccaacaagaatccctaaacaaatggaagtcaaaaggtcgtagatttaaaggaaaaggaaagggtaataaagctgcccagcctgggtctggtaaaggaaaagtacagtttcagggcaagaaaacgaaatttgctagtgatgatgaacatgatgaacatgatgaaaatggtgcaactggacctgtgaaaagagcaagagaagaaacagacaaagaagaacctgcatccaaacaacagaaaacagaaaatggtgctggagaccagtagtttagtaaaccaattttttattcattttaaataggttttaaacgacttttgtttgcggggcttttaaaaggaaaaccgaattaggtccacttcaatgtccacctgtgagaaaggaaaaatttttttgttgtttaacttgtctttttgttatgcaaatgagatttctttgaatgtattgttctgtttgtgttatttcagatgattcaaatatcaaaaggaagattcttccattaaattgcctttgtaatatgagaatgtattagtacaaactaactaataaaatatatactatatgaaaagagcaaa

SEQ ID NO: 281625 - DNA, 2066 bp, Homo sapiens
acccaggcggcaagagctgccgggacggtccccatcttcttggagcgctttaggctggccggcggcgctgggaggtggagtcgttgctgttgctgtttgtgagcctgtggcgcggcttctgtgggccggaaccttaaagatagccgcaatggctgaaaatggtgataatgaaaagatggctgccctggaggccaaaatctgtcatcaaattgagtattattttggcgacttcaatttgccacgggacaagtttctaaaggaacagataaaactggatgaaggctgggtacctttggagataatgataaaattcaacaggttgaaccgtctaacaacagactttaatgtaattgtggaagcattgagcaaatccaaggcagaactcatggaaatcagtgaagataaaactaaaatcagaaggtctccaagcaaacccctacctgaagtgactgatgagtataaaaatgatgtaaaaaacagatctgtttatattaaaggcttcccaactgatgcaactcttgatgacataaaagaatggttagaagataaaggtcaagtactaaatattcagatgagaagaacattgcataaagcatttaaggtatgataatacagactttttctagttttaaaatatatgggacataacttaaaaaaatattttccttcctttttacagggatcaatttttgttgtgtttgatagcattgaatctgctaagaaatttgtagagacccctggccagaagtacaaagaaacagacctgctaatacttttcaaggacgattactttgccaaaaaaaatgaagaaagaaaacaaaataaagtggaagctaaattaagagctaaacagtaagtatgttgaactaatcacgacataatttgaattccttaaaactctgacagaaatatagctggtgagctctgaaatagtggcagtagacctttctctttgctagtgaaacactgagatcttaagctgccttgacaatctcagggccaaattgcattgcagtctagcattggacgatcaaaaaaaacctaaggacttctggctttggttaagtaagtttagtgatcatgattggttaactttattaggacttaattttcttatatagtaaatagaagtatgttataattatatttttatttgtagggagcaagaagcaaaacaaaagttagaagaagatgctgaaatgaaatctctagaagaaaagattggatgcttgctgaaattttcgggtgatttagatgatcagacctgtagagaagatttacacatacttttctcaaatcatggtgaaataaaatggatagacttcgtcagaggagcaaaagaggggataattctatttaaagaaaaagccaaggaagcattgggtaaagccaaagatgcaaataatggtaacctacaattaaggaacaaagaagtgacttgggaagtactagaaggagaggtggaaaaagaagcactgaagaaaataatagaagaccaacaagaatccctaaacaaatggaagtcaaaaggtcgtagatttaaaggaaaaggaaagggtaataaagctgcccagcctgggtctggtaaaggaaaagtacagtttcagggcaagaaaacgaaatttgctagtgatgatgaacatgatgaacatgatgaaaatggtgcaactggacctgtgaaaagagcaagagaagaaacagacaaagaagaacctgcatccaaacaacagaaaacagaaaatggtgctggagaccagtagtttagtaaaccaattttttattcattttaaataggttttaaacgacttttgtttgcggggcttttaaaaggaaaaccgaattaggtccacttcaatgtccacctgtgagaaaggaaaaatttttttgttgtttaacttgtctttttgttatgcaaatgagatttctttgaatgtattgttctgtttgtgttatttcagatgattcaaatatcaaaaggaagattcttccattaaattgcctttgtaatatgagaatgtattagtacaaactaactaataaaatatatactatatgaaaagagcaaa

SEQ ID NO: 281626 - DNA, 1018 bp, Homo sapiens
cgctgcggcgctctgaggatcccttattcgtgttgcacgggacgattactttgccaaaaaaaatgaagaaagaaaacaaaataaagtggaagctaaattaagagctaaacaggagcaagaagcaaaacaaaagttagaagaagatgctgaaatgaaatctctagaagaaaagattggatgcttgctgaaattttcgggtgatttagatgatcagacctgtagagaagatttacacatacttttctcaaatcatggtgaaataaaatggatagacttcgtcagaggagcaaaagaggggataattctatttaaagaaaaagccaaggaagcattgggtaaagccaaagatgcaaataatggtaacctacaattaaggaacaaagaagtgacttgggaagtactagaaggagaggtggaaaaagaagcactgaagaaaataatagaagaccaacaagaatccctaaacaaatggaagtcaaaaggtcgtagatttaaaggaaaaggaaagggtaataaagctgcccagcctgggtctggtaaaggaaaagtacagtttcagggcaagaaaacgaaatttgctagtgatgatgaacatgatgaacatgatgaaaatggtgcaactggacctgtgaaaagagcaagagaagaaacagacaaagaagaacctgcatccaaacaacagaaaacagaaaatggtgctggagaccagtagtttagtaaaccaattttttattcattttaaataggttttaaacgacttttgtttgcggggcttttaaaaggaaaaccgaattaggtccacttcaatgtccacctgtgagaaaggaaaaatttttttgttgtttaacttgtctttttgttatgcaaatgagatttctttgaatgtattgttctgtttgtgttatttcagatgattcaaatatcaaaaggaagattcttccattaaattgcctttgtaatatgagaatgtattagtacaaactaactaataaaatatatactatatgaaaagagcaaa

SEQ ID NO: 281627 - DNA, 1014 bp, Homo sapiens
ccccaataaaataaaaaagtcttaaggcgaagattggacgattactttgccaaaaaaaatgaagaaagaaaacaaaataaagtggaagctaaattaagagctaaacaggagcaagaagcaaaacaaaagttagaagaagatgctgaaatgaaatctctagaagaaaagattggatgcttgctgaaattttcgggtgatttagatgatcagacctgtagagaagatttacacatacttttctcaaatcatggtgaaataaaatggatagacttcgtcagaggagcaaaagaggggataattctatttaaagaaaaagccaaggaagcattgggtaaagccaaagatgcaaataatggtaacctacaattaaggaacaaagaagtgacttgggaagtactagaaggagaggtggaaaaagaagcactgaagaaaataatagaagaccaacaagaatccctaaacaaatggaagtcaaaaggtcgtagatttaaaggaaaaggaaagggtaataaagctgcccagcctgggtctggtaaaggaaaagtacagtttcagggcaagaaaacgaaatttgctagtgatgatgaacatgatgaacatgatgaaaatggtgcaactggacctgtgaaaagagcaagagaagaaacagacaaagaagaacctgcatccaaacaacagaaaacagaaaatggtgctggagaccagtagtttagtaaaccaattttttattcattttaaataggttttaaacgacttttgtttgcggggcttttaaaaggaaaaccgaattaggtccacttcaatgtccacctgtgagaaaggaaaaatttttttgttgtttaacttgtctttttgttatgcaaatgagatttctttgaatgtattgttctgtttgtgttatttcagatgattcaaatatcaaaaggaagattcttccattaaattgcctttgtaatatgagaatgtattagtacaaactaactaataaaatatatactatatgaaaagagcaaa

SEQ ID NO: 281628 - DNA, 2260 bp, Homo sapiens
  misc_feature (1407)..(1407): n is a, c, g, or t
cggtgaagactgacaagaaggggatgtctatggtcgtacaggatggggggtggatgagcgctagggggatgtgggagagagtggcggtgggggaggaagtgtgagaaaagtggtggcgtgcatttgggtggagttgaaggcgcgtcgtgtgtttggggggtatgggagtgttagagaggttggtgatagtggtagtagagagggtttggcagaagtggcaggggggcgtttgttggtaggagtgctccgcgtggtgtcgcctgtaagatggccgtgatatgacaagtggtagggcggtggtgtggagaaaaggtgggggattagaagggtgctgcggtgtgggcggaagaagcgcgcacaagcttgtctgcgaaggagccctagaagaagcttgcggcatgaaggggggtccaatgggaagaagtgctgtgcgcacgttggtgggaagacaaacttgcccatggggttgggatgaacgggaaagttgagtcgtgaaatcgcgtttacgagagaacgttcccgagagaaataaggggggtttccgttgcgcaagaaggggccgataatatcctccgccggcgttaagcccgccgttggaagagcgctggggaagcctgtgggaagttggcaagggttatggtaggggagagaagttgagaaggtgggttagtggaggtagtggaggccaagggagtgcgcgtgggtggtgttagataaggtggtaggagaatggggcctttgtggcgccgcagaggcgtgggaaggtgggcgagagcgtggcgtgtggaggtgggatgctatgtaggatgagagggagaggtgggggttgttaggagagggaactagagagggggttggcaagagggtgagccgttagagaaggtaggtgtgcgaggaggtcgagggaagagggatgaggcaagtgttggcgaggttagagatggcgaggtgtgtaagagggggggaggtgcagaggtgtgtgtgtagtttggtcgggtgtgtggaggtagggcaggtgtggaaggtgcttggtcgtgagaggagagaggtgtgtcgtagggagggagccgccgcgtgggacgcagggagaggggtagccagagagggagagagcgaggagcgcgtgggcgtagagtaggcgtggtgtgtggcagaggggagctggagtgtaggcgtgttgggcgcagtagagaagtgagaaggttgatagttagagagggagagagagtctatatagagtgagatagagtcggtagggcgtagagaggttgagaggagggcgtagagagcaggggagggtcagagggagaggccagagagagcagagagaggtgtagagaggagaggagtggcgtgaagagtgagaagtgctgctaggagatgagaggaggagttggatggctgtgnctgagaatttgtgcgggtgagtgttaggagtgagtcaggagcgctgtaggaggaaggagtttacagcagtagcgttttctcaaatcatggtgaaataaaatggatagacttcgtcagaggagcaaaagaggggataattctatttaaagaaaaagccaaggaagcattgggtaaagccaaagatgcaaataatggtaacctacaattaaggaacaaagaagtgacttgggaagtactagaaggagaggtggaaaaagaagcactgaagaaaataatagaagaccaacaagaatccctaaacaaatggaagtcaaaaggtcgtagatttaaaggaaaaggaaagggtaataaagctgcccagcctgggtctggtaaaggaaaagtacagtttcagggcaagaaaacgaaatttgctagtgatgatgaacatgatgaacatgatgaaaatggtgcaactggacctgtgaaaagagcaagagaagaaacagacaaagaagaacctgcatccaaacaacagaaaacagaaaatggtgctggagaccagtagtttagtaaaccaattttttattcattttaaataggttttaaacgacttttgtttgcggggcttttaaaaggaaaaccgaattaggtccacttcaatgtccacctgtgagaaaggaaaaatttttttgttgtttaacttgtctttttgttatgcaaatgagatttctttgaatgtattgttctgtttgtgttatttcagatgattcaaatatcaaaaggaagattcttccattaaattgcctttgtaatatgagaatgtattagtacaaactaactaataaaatatatactatatgaaaagagcaaa

SEQ ID NO: 281629 - DNA, 1080 bp, Homo sapiens
aggtatgtatgactatgcgtatatggcagctgggcgcaccgaataagcgataacagttagaaaagctagtgagatgcattaggacttgatgtacgcctagagcaggagtacctgaggtacatcgaacatacgatagactgtgagagataccgtacagacctaggctgaaaatgacagcctcctgcgtaggaaaagaccagagacttgttggcttggactcagcttgccatattgcaggtgtcgtagatgagtgaattgaatctgaactctgattcaagcaggatttccacagtagactttcctcatctcattggtgaccctgaacctgggatagacttcgtcagaggagcaaaagaggggataattctatttaaagaaaaagccaaggaagcattgggtaaagccaaagatgcaaataatggtaacctacaattaaggaacaaagaagtgacttgggaagtactagaaggagaggtggaaaaagaagcactgaagaaaataatagaagaccaacaagaatccctaaacaaatggaagtcaaaaggtcgtagatttaaaggaaaaggaaagggtaataaagctgcccagcctgggtctggtaaaggaaaagtacagtttcagggcaagaaaacgaaatttgctagtgatgatgaacatgatgaacatgatgaaaatggtgcaactggacctgtgaaaagagcaagagaagaaacagacaaagaagaacctgcatccaaacaacagaaaacagaaaatggtgctggagaccagtagtttagtaaaccaattttttattcattttaaataggttttaaacgacttttgtttgcggggcttttaaaaggaaaaccgaattaggtccacttcaatgtccacctgtgagaaaggaaaaatttttttgttgtttaacttgtctttttgttatgcaaatgagatttctttgaatgtattgttctgtttgtgttatttcagatgattcaaatatcaaaaggaagattcttccattaaattgcctttgtaatatgagaatgtattagtacaaactaactaataaaatatatactatatgaaaagagcaaa

SEQ ID NO: 281630 - DNA, 1060 bp, Homo sapiens
cagcacctctggaatccccttaaagcttgacagggatagaagagctgacacccggtctgggctgggcatctcttggggcagagagtagggttgatggtcagggctggggacgtgtctgggtttgagtctccatggggggtggcaggaggaggactatcttgtcccctcccatccttatgttctggaatggagaggcgatgccaaggtggaagcctgcattggctggggagctgagaaacatggaacattccattgaacagaacccccagcctacgcattctggttcatggagatttgcccaggagagacaggaagttcccataaggttagggaggaggggataattctatttaaagaaaaagccaaggaagcattgggtaaagccaaagatgcaaataatggtaacctacaattaaggaacaaagaagtgacttgggaagtactagaaggagaggtggaaaaagaagcactgaagaaaataatagaagaccaacaagaatccctaaacaaatggaagtcaaaaggtcgtagatttaaaggaaaaggaaagggtaataaagctgcccagcctgggtctggtaaaggaaaagtacagtttcagggcaagaaaacgaaatttgctagtgatgatgaacatgatgaacatgatgaaaatggtgcaactggacctgtgaaaagagcaagagaagaaacagacaaagaagaacctgcatccaaacaacagaaaacagaaaatggtgctggagaccagtagtttagtaaaccaattttttattcattttaaataggttttaaacgacttttgtttgcggggcttttaaaaggaaaaccgaattaggtccacttcaatgtccacctgtgagaaaggaaaaatttttttgttgtttaacttgtctttttgttatgcaaatgagatttctttgaatgtattgttctgtttgtgttatttcagatgattcaaatatcaaaaggaagattcttccattaaattgcctttgtaatatgagaatgtattagtacaaactaactaataaaatatatactatatgaaaagagcaaa

SEQ ID NO: 281631 - DNA, 702 bp, Homo sapiens
acccaggcggcaagagctgccgggacggtccccatcttcttggagcgctttaggctggccggcggcgctgggaggtggagtcgttgctgttgctgtttgtgagcctgtggcgcggcttctgtgggccggaaccttaaagatagccgcaatggctgaaaatggtgataatgaaaagatggctgccctggaggccaaaatctgtcatcaaattgagtattattttggcgacttcaatttgccacgggacaagtttctaaaggaacagataaaactggatgaaggctgggtacctttggagataatgataaaattcaacaggttgaaccgtctaacaacagactttaatgtaattgtggaagcattgagcaaatccaaggcagaactcatggaaatcagtgaagataaaactaaaatcagaaggtctccaagcaaacccctacctgaagtgactgatgagtataaaaatgatgtaaaaaacagatctgtttatattgtaagtgggcctgtaatgcatttaaatatcttacatttatttagaaagtaaagtacggaagaataagggctcaggaatcacagcctcactaattactgtatgtcctttcgtaatattcttaacctaagtttcttttgttttgttttgttttgagacagtctcatcctgcactccagcctgggagacagagcgagactccgtctcaaaaa

SEQ ID NO: 281632 - DNA, 462 bp, Homo sapiens
cagtgataaaaatggtttttatttttgtttaattttttctagacagggtcttgctgttaccaaggctggagtgcagtggcacattcatggctcatcgcagccccgaatacctgagctcaggtgatcctcccacctcaaccttctgagtagctaggactataggtgcaccaccacacttgggaaattaaaatttgtgtgtgtgtgtgtgtgtgtgtgggtagaggcagggtctaactatgttgcccgggatggctaccaattcctggccccaaatgatcctcctgtatcagcctcgcaaagcactggcattacacgcctgagccactgcgcctggccttaaaaatggttttaaaatcttttctataaatataccaatatacccgattcttgttacaaacctttattatttttggtcccaaagggaggattcataattactgtatcgaatgacttggacattct

SEQ ID NO: 281633 - DNA, 555 bp, Homo sapiens
gtcatttattctgatttttctttaacagtttggttgttgaacccatttacttgagcaaaaactttaatcagtgttcaaaaacattgacaagagacttaaaaaaagttctttacagagtgctcaattgtgtctctacaggtcgtagatttaaaggaaaaggaaagggtaataaagctgcccagcctgggtctggtaaaggaaaagtacagtttcagggcaagaaaacgaaatttgctagtgatgatgaacatgatgaacatgatgaaaatggtgcaactggtaagttttttttaagtcctttggtagtttcatgagaaaatttctacttccataaataaatgatttgccagagagaatagggatttggcttttcaactcctggataagtgccattcttggattattaacgatttacctcggttatgctgttgtataagtcagggacaggatatttggaagatgaatctagaggtcaggtctgtactaagagaaaagccttttctcattggtgcaaggaagttgttgcatctttttcaacagtatcattattagtaa

SEQ ID NO: 281634 - DNA, 1759 bp, Homo sapiens
tacctccaccgccttctagtctcaccgaaggcttgtggccatctctgtaaagtttctggggaggtgggcacggggtaaacgccggagggttctgtggagcctatgggactgactggaggccaaagaactttgggccgcagatgtacaccagcgtcactcttttggtctgttagggccttcatcgctcacatcaggtttcagtgtgaaacgggaaaacatagccgcaatggctgaaaatggtgataatgaaaagatggctgccctggaggccaaaatctgtcatcaaattgagtattattttggcgacttcaatttgccacgggacaagtttctaaaggaacagataaaactggatgaaggctgggtacctttggagataatgataaaattcaacaggttgaaccgtctaacaacagactttaatgtaattgtggaagcattgagcaaatccaaggcagaactcatggaaatcagtgaagataaaactaaaatcagaaggtctccaagcaaacccctacctgaagtgactgatgagtataaaaatgatgtaaaaaacagatctgtttatattaaaggcttcccaactgatgcaactcttgatgacataaaagaatggttagaagataaaggtcaagtactaaatattcagatgagaagaacattgcataaagcatttaagggatcaatttttgttgtgtttgatagcattgaatctgctaagaaatttgtagagacccctggccagaagtacaaagaaacagacctgctaatacttttcaaggacgattactttgccaaaaaaaatgaagaaagaaaacaaaataaagtggaagctaaattaagagctaaacaggagcaagaagcaaaacaaaagttagaagaagatgctgaaatgaaatctctagaagaaaagattggatgcttgctgaaattttcgggtgatttagatgatcagacctgtagagaagatttacacatacttttctcaaatcatggtgaaataaaatggatagacttcgtcagaggagcaaaagaggggataattctatttaaagaaaaagccaaggaagcattgggtaaagccaaagatgcaaataatggtaacctacaattaaggaacaaagaagtgacttgggaagtactagaaggagaggtggaaaaagaagcactgaagaaaataatagaagaccaacaagaatccctaaacaaatggaagtcaaaaggtcgtagatttaaaggaaaaggaaagggtaataaagctgcccagcctgggtctggtaaaggaaaagtacagtttcagggcaagaaaacgaaatttgctagtgatgatgaacatgatgaacatgatgaaaatggtgcaactggacctgtgaaaagagcaagagaagaaacagacaaagaagaacctgcatccaaacaacagaaaacagaaaatggtgctggagaccagtagtttagtaaaccaattttttattcattttaaataggttttaaacgacttttgtttgcggggcttttaaaaggaaaaccgaattaggtccacttcaatgtccacctgtgagaaaggaaaaatttttttgttgtttaacttgtctttttgttatgcaaatgagatttctttgaatgtattgttctgtttgtgttatttcagatgattcaaatatcaaaaggaagattcttccattaaattgcctttgtaatatgagaatgtattagtacaaactaactaataaaatatatactatatgaaaagagcaaa

SEQ ID NO: 281635 - DNA, 887 bp, Homo sapiens
acccaggcggcaagagctgccgggacggtccccatcttcttggagcgctttaggctggccggcggcgctgggaggtggagtcgttgctgttgctgtttgtgagcctgtggcgcggcttctgtgggccggaaccttaaagatagccgcaatggctgaaaatggtgataatgaaaagatggctgccctggaggccaaaatctgtcatcaaattgagtattattttggcgacttcaatttgccacgggacaagtttctaaaggaacagataaaactggatgaaggctgggtacctttggagataatgataaaattcaacaggttgaaccgtctaacaacagactttaatgtaattgtggaagcattgagcaaatccaaggcagaactcatggaaatcagtgaagataaaactaaaatcagaaggtctccaagcaaacccctacctgaagtgactgatgagtataaaaatgatgtaaaaaacagatctgtttatattaaaggcttcccaactgatgcaactcttgatgacataaaagaatggttagaagataaaggtcaagtactaaatattcagatgagaagaacattgcataaagcatttaagggatcaatttttgttgtgtttgatagcattgaatctgctaagaaatttgtagagacccctggccagaagtacaaagaaacagacctgctaatacttttcaaggacgatacttggcaaaaaatgagaagaaacaataagggagtaattagagtaacgggcaaaaaaaaaaaaaaaaaatttgggggggccgaaattttaaacttgtggggggccggtagaatgtaggtcggacgcggaggggttccaaaacgggggggtgcaaagttgttgttcaggatttactggc

SEQ ID NO: 281636 - DNA, 1659 bp, Homo sapiens
atccttaattaaattttttcccccccccgaggctggccggcggcgctgggaggtggagtcgttgctgttgctgtttgtgagcctgtggcgcggcttctgtgggccggaaccttaaagatagccgcaatggctgaaaatggtgataatgaaaagatggctgccctggaggccaaaatctgtcatcaaattgagtattattttggcgacttcaatttgccacgggacaagtttctaaaggaacagataaaactggatgaaggctgggtacctttggagataatgataaaattcaacaggttgaaccgtctaacaacagactttaatgtaattgtggaagcattgagcaaatccaaggcagaactcatggaaatcagtgaagataaaactaaaatcagaaggtctccaagcaaacccctacctgaagtgactgatgagtataaaaatgatgtaaaaaacagatctgtttatattaaaggcttcccaactgatgcaactcttgatgacataaaagaatggttagaagataaaggtcaagtactaaatattcagatgagaagaacattgcataaagcatttaagggatcaatttttgttgtgtttgatagcattgaatctgctaagaaatttgtagagacccctggccagaagtacaaagaaacagacctgctaatacttttcaaggacgattactttgccaaaaaaaatgaagaaagaaaacaaaataaagtggaagctaaattaagagctaaacaggagcaagaagcaaaacaaaagttagaagaagatgctgaaatgaaatctctagaagaaaagattggatgcttgctgaaattttcgggtgatttagatgatcagacctgtagagaagatttacacatacttttctcaaatcatggtgaaataaaatggatagacttcgtcagaggagcaaaagaggggataattctatttaaagaaaaagccaaggaagcattgggtaaagccaaagatgcaaataatggtaacctacaattaaggaacaaagaagtgacttgggaagtactagaaggagaggtggaaaaagaagcactgaagaaaataatagaagaccaacaagaatccctaaacaaatggaagtcaaaaggtcgtagatttaaaggaaaaggaaagggtaataaagctgcccagcctgggtctggtaaaggaaaagtacagtttcagggcaagaaaacgaaatttgctagtgatgatgaacatgatgaacatgatgaaaatggtgcaactggacctgtgaaaagagcaagagaagaaacagacaaagaagaacctgcatccaaacaacagaaaacagaaaatggtgctggagaccagtagtttagtaaaccaattttttattcattttaaataggttttaaacgacttttgtttgcggggcttttaaaaggaaaaccgaattaggtccacttcaatgtccacctgtgagaaaggaaaaatttttttgttgtttaacttgtctttttgttatgcaaatgagatttctttgaatgtattgttctgtttgtgttatttcagatgattcaaatatcaaaaggaagattcttccattaaattgcctttgtaatatgagaatgtattagtacaaactaactaataaaatatatactatatgaaaagagcaaa

SEQ ID NO: 281637 - DNA, 2603 bp, Homo sapiens
acccaggcggcaagagctgccgggacggtccccatcttcttggagcgctttaggctggccggcggcgctgggaggtggagtcgttgctgttgctgtttgtgagcctgtggcgcggcttctgtgggccggaaccttaaagatagccgcaatggctgaaaatggtgataatgaaaagatggctgccctggaggccaaaatctgtcatcaaattgagtattattttggcgacttcaatttgccacgggacaagtttctaaaggaacagataaaactggatgaaggctgggtacctttggagataatgataaaattcaacaggttgaaccgtctaacaacagactttaatgtaattgtggaagcattgagcaaatccaaggcagaactcatggaaatcagtgaagataaaactaaaatcagaaggtctccaagcaaacccctacctgaagtgactgatgagtataaaaatgatgtaaaaaacagatctgtttatattaaaggcttcccaactgatgcaactcttgatgacataaaagaatggttagaagataaaggtcaagtactaaatattcagatgagaagaacattgcataaagcatttaagggatcaatttttgttgtgtttgatagcattgaatctgctaagaaatttgtagagacccctggccagaagtacaaagaaacagacctgctaatacttttcaaggacgattactttgccaaaaaaaatgaagaaagaaaacaaaataaagtggaagctaaattaagagctaaacaggagcaagaagcaaaacaaaagttagaagaagatgctgaaatgaaatctctagaagaaaagattggatgcttgctgaaattttcgggtgatttagatgatcagacctgtagagaagatttacacatacttttctcaaatcatggtgaaataaaatggatagacttcgtcagaggagcaaaagaggggataattctatttaaagaaaaagccaaggaagcattgggtaaagccaaagatgcaaataatggtaacctacaattaaggaacaaagaagtgacttgggaagtactagaaggagaggtggaaaaagaagcactgaagaaaataatagaagaccaacaagaatccctaaacaaatggaagtcaaaaggtcgtagatttaaaggaaaaggaaagggtaataaagctgcccagcctgggtctggtaaaggaaaagtacagtttcagggcaagaaaacgaaatttgctagtgatgatgaacatgatgaacatgatgaaaatggtgcaactggacctgtgaaaagagcaagagaagaaacagacaaagaagaacctgcatccaaacaacagaaaacagaaaatggtgctggagaccagtagtttagtaaaccaattttttattcattttaaataggttttaaacgacttttgtttgcggggcttttaaaaggaaaaccgaattaggtccacttcaatgtccacctgtgagaaaggaaaaatttttttgttgtttaacttgtctttttgttatgcaaatgagatttctttgaatgtattgttctgtttgtgttatttcagatgattcaaatatcaaaaggaagattcttccattaaattgcctttgtaatatgagaatgtattagtacaaactaactaataaaatatatactatatgaaaagagcaaaaaaaacagtttttgattttttttttctttttgtacccaaagcatttaggaaagaactagaatattagctattgacgatgggcctttcccacaggccatttatggtgtctcctaggctggctttgtatatttacacaggaaagttggtaacactagaaataattacttgtcacaaagctttcctttttttttctttttcgagactgagtctcactcttatcgcgcaggctggagttcagtggggcaatctcagctcactgcaacctctgcctcctgagttcaagcgattctcttgcctcagcctcccgagtagctgggattacaggcatgaaccaccacatccggcccagaaagcttttcaataccgaatgtagaccagccaaaatcaagagacttactgatttctttttgtgaaacttgtatgatgctggcaggtcatatcgaagttctgctataatatctatcttgattttccattctgcagctttcttttgaacatggttctctagttgaggatttgtgtaaggaatatactgctgttcttgccatttccaaagcagtctttagaaaagccatatctgtccctttattatttttggtcccaaagggaggattcataattactgtatcgaatgacttggacattctgttagataataagcacacatcacattgaaccatgtcaatatttgttaactcaaactcttctgcattcctattaaatatttccaatgcgtcttcatctatgtcaaatccaacacacaacctgcaatgtgcggcctggtaggatactgttccagaagtagctgggcttttcaaatcccatccacttgctgcaggcgactctctagatgcgttaagccttactttcttcattttgttttaaagtatggactcgtagggtttgaaggcacaggatctgc

SEQ ID NO: 281638 - DNA, 2158 bp, Homo sapiens
acccaggcggcaagagctgccgggacggtccccatcttcttggagcgctttaggctggccggcggcgctgggaggtggagtcgttgctgttgctgtttgtgagcctgtggcgcggcttctgtgggccggaaccttaaagatagccgcaatggctgaaaatggtgataatgaaaagatggctgccctggaggccaaaatctgtcatcaaattgagtattattttggcgacttcaatttgccacgggacaagtttctaaaggaacagataaaactggatgaaggctgggtacctttggagataatgataaaattcaacaggttgaaccgtctaacaacagactttaatgtaattgtggaagcattgagcaaatccaaggcagaactcatggaaatcagtgaagataaaactaaaatcagaaggtctccaagcaaacccctacctgaagtgactgatgagtataaaaatgatgtaaaaaacagatctgtttatattaaaggcttcccaactgatgcaactcttgatgacataaaagaatggttagaagataaaggtcaagtactaaatattcagatgagaagaacattgcataaagcatttaagggatcaatttttgttgtgtttgatagcattgaatctgctaagaaatttgtagagacccctggccagaagtacaaagaaacagacctgctaatacttttcaaggacgattactttgccaaaaaaaatgaagaaagaaaacaaaataaagtggaagctaaattaagagctaaacaggagcaagaagcaaaacaaaagttagaagaagatgctgaaatgaaatctctagaagaaaagattggatgcttgctgaaattttcgggtgatttagatgatcagacctgtagagaagatttacacatacttttctcaaatcatggtgaaataaaatggatagacttcgtcagaggagcaaaagaggggataattctatttaaagaaaaagccaaggaagcattgggtaaagccaaagatgcaaataatggtaacctacaattaaggaacaaagaagtgacttgggaagtactagaaggagaggtggaaaaagaagcactgaagaaaataatagaagaccaacaagaatccctaaacaaatggaagtcaaaaggtcgtagatttaaaggaaaaggaaagggtaataaagctgcccagcctgggtctggtaaaggaaaagtacagtttcagggcaagaaaacgaaatttgctagtgatgatgaacatgatgaacatgatgaaaatggtgcaactggacctgtgaaaagagcaagagaagaaacagacaaagaagaacctgcatccaaacaacagaaaacagaaaatggtgctggagaccagtagtttagtaaaccaattttttattcattttaaataggttttaaacgacttttgtttgcggggcttttaaaaggaaaaccgaattaggtccacttcaatgtccacctgtgagaaaggaaaaatttttttgttgtttaacttgtctttttgttatgcaaatgagatttctttgaatgtattgttctgtttgtgttatttcagatgattcaaatatcaaaaggaagattcttccattaaattgcctttgtaatatgagaatgtattagtacaaactaactaataaaatatatactatatgaaaagagcaaaaaaaataaataaaagaaaaagtaaatggtaggagaaaagaaaaagaaagcaaagaagagataaaaaaataatagaaacaagaaggtaatagacataaccaatgaaaattaggaaaagaaaggggggggggcgtgttttttatattttttacccaaggggtaaggaagacaaatagtactaacaagatacattgatttagtaagaagaaggggcgcatcataaaatagggggtgaatatatataatacaatcgaggcgtaggcgcgcgttataataagataggaggagaaagaaaaatcaatgatcgtggtaatgtataagtgaggagcagaacatatttggggggggggaaagaaataagagaaaaacacaagaaagagtatacccagcaggagaacaacaaaattatgtagatgtgtaggtaacacatatttatgtgtgaggaagtgtttcagtagttataaattaggagggacaa

SEQ ID NO: 281639 - DNA, 1988 bp, Homo sapiens
acccaggcggcaagagctgccgggacggtccccatcttcttggagcgctttaggctggccggcggcgctgggaggtggagtcgttgctgttgctgtttgtgagcctgtggcgcggcttctgtgggccggaaccttaaagatagccgcaatggctgaaaatggtgataatgaaaagatggctgccctggaggccaaaatctgtcatcaaattgagtattattttggcgacttcaatttgccacgggacaagtttctaaaggaacagataaaactggatgaaggctgggtacctttggagataatgataaaattcaacaggttgaaccgtctaacaacagactttaatgtaattgtggaagcattgagcaaatccaaggcagaactcatggaaatcagtgaagataaaactaaaatcagaaggtctccaagcaaacccctacctgaagtgactgatgagtataaaaatgatgtaaaaaacagatctgtttatattaaaggcttcccaactgatgcaactcttgatgacataaaagaatggttagaagataaaggtcaagtactaaatattcagatgagaagaacattgcataaagcatttaagggatcaatttttgttgtgtttgatagcattgaatctgctaagaaatttgtagagacccctggccagaagtacaaagaaacagacctgctaatacttttcaaggacgattactttgccaaaaaaaatgaagaaagaaaacaaaataaagtggaagctaaattaagagctaaacagtaagtatgttgaactaatcacgacataatttgaattccttaaaactctgacagaaatatagctggtgagctctgaaatagtggcagtagacctttctctttgctagtgaaacactgagatcttaagctgccttgacaatctcagggccaaattgcattgcagtctagcattggacgatcaaaaaaaacctaaggacttctggctttggttaagtaagtttagtgatcatgattggttaactttattaggacttaattttcttatatagtaaatagaagtatgttataattatatttttatttgtagggagcaagaagcaaaacaaaagttagaagaagatgctgaaatgaaatctctagaagaaaagattggatgcttgctgaaattttcgggtgatttagatgatcagacctgtagagaagatttacacatacttttctcaaatcatggtgaaataaaatggatagacttcgtcagaggagcaaaagaggggataattctatttaaagaaaaagccaaggaagcattgggtaaagccaaagatgcaaataatggtaacctacaattaaggaacaaagaagtgacttgggaagtactagaaggagaggtggaaaaagaagcactgaagaaaataatagaagaccaacaagaatccctaaacaaatggaagtcaaaaggtcgtagatttaaaggaaaaggaaagggtaataaagctgcccagcctgggtctggtaaaggaaaagtacagtttcagggcaagaaaacgaaatttgctagtgatgatgaacatgatgaacatgatgaaaatggtgcaactggacctgtgaaaagagcaagagaagaaacagacaaagaagaacctgcatccaaacaacagaaaacagaaaatggtgctggagaccagtagtttagtaaaccaattttttattcattttaaataggttttaaacgacttttgtttgcggggcttttaaaaggaaaaccgaattaggtccacttcaatgtccacctgtgagaaaggaaaaatttttttgttgtttaacttgtctttttgttatgcaaatgagatttctttgaatgtattgttctgtttgtgttatttcagatgattcaaatatcaaaaggaagattcttccattaaattgcctttgtaatatgagaatgtattagtacaaactaactaataaaatatatactatatgaaaagagcaaa

SEQ ID NO: 281640 - DNA, 1747 bp, Homo sapiens
agaacgtttatcagaaaagcatatttgtaatcaccactaaacaatgaggcgcatcggtcccctctccccaaccaccctcactcttcctaaacccactctctcttttggcttttatagaacactgtagaaatcctttcctgagtctgcaaatggccccagactgggatgggagctgcccagagtagtcttgggctggactgagtcctggtgcccagagagggagacctatgcaactgcctccagtatccaaaagttccgttgaagccgtccggaactttaatattattttggcgacttcaatttgccacgggacaagtttctaaaggaacagataaaactggatgaaggctgggtacctttggagataatgataaaattcaacaggttgaaccgtctaacaacagactttaatgtaattgtggaagcattgagcaaatccaaggcagaactcatggaaatcagtgaagataaaactaaaatcagaaggtctccaagcaaacccctacctgaagtgactgatgagtataaaaatgatgtaaaaaacagatctgtttatattaaaggcttcccaactgatgcaactcttgatgacataaaagaatggttagaagataaaggtcaagtactaaatattcagatgagaagaacattgcataaagcatttaagggatcaatttttgttgtgtttgatagcattgaatctgctaagaaatttgtagagacccctggccagaagtacaaagaaacagacctgctaatacttttcaaggacgattactttgccaaaaaaaatgaagaaagaaaacaaaataaagtggaagctaaattaagagctaaacaggagcaagaagcaaaacaaaagttagaagaagatgctgaaatgaaatctctagaagaaaagattggatgcttgctgaaattttcgggtgatttagatgatcagacctgtagagaagatttacacatacttttctcaaatcatggtgaaataaaatggatagacttcgtcagaggagcaaaagaggggataattctatttaaagaaaaagccaaggaagcattgggtaaagccaaagatgcaaataatggtaacctacaattaaggaacaaagaagtgacttgggaagtactagaaggagaggtggaaaaagaagcactgaagaaaataatagaagaccaacaagaatccctaaacaaatggaagtcaaaaggtcgtagatttaaaggaaaaggaaagggtaataaagctgcccagcctgggtctggtaaaggaaaagtacagtttcagggcaagaaaacgaaatttgctagtgatgatgaacatgatgaacatgatgaaaatggtgcaactggacctgtgaaaagagcaagagaagaaacagacaaagaagaacctgcatccaaacaacagaaaacagaaaatggtgctggagaccagtagtttagtaaaccaattttttattcattttaaataggttttaaacgacttttgtttgcggggcttttaaaaggaaaaccgaattaggtccacttcaatgtccacctgtgagaaaggaaaaatttttttgttgtttaacttgtctttttgttatgcaaatgagatttctttgaatgtattgttctgtttgtgttatttcagatgattcaaatatcaaaaggaagattcttccattaaattgcctttgtaatatgagaatgtattagtacaaactaactaataaaatatatactatatgaaaagagcaaa

SEQ ID NO: 281641 - DNA, 1696 bp, Homo sapiens
tagactgtcgtgggggcgcgaggctgagattcgtagctgatcgatgttcgtagacgtctgtgcgtagcgagaatccttgtgtgcgactcgaatacctgtattggatagctcgcccatgtgctgaaacagtcggcggattagatgaccagagatgtgtctggacactgagatcggcacaatgagtcgtgtctagtcgagtctatgtaagctagtgaatctaggcgacagcacgtgtcgatctctatagccaacggtcacataagtctatctttaaaggcacccgggactggatgaaggctgggtacctttggagataatgataaaattcaacaggttgaaccgtctaacaacagactttaatgtaattgtggaagcattgagcaaatccaaggcagaactcatggaaatcagtgaagataaaactaaaatcagaaggtctccaagcaaacccctacctgaagtgactgatgagtataaaaatgatgtaaaaaacagatctgtttatattaaaggcttcccaactgatgcaactcttgatgacataaaagaatggttagaagataaaggtcaagtactaaatattcagatgagaagaacattgcataaagcatttaagggatcaatttttgttgtgtttgatagcattgaatctgctaagaaatttgtagagacccctggccagaagtacaaagaaacagacctgctaatacttttcaaggacgattactttgccaaaaaaaatgaagaaagaaaacaaaataaagtggaagctaaattaagagctaaacaggagcaagaagcaaaacaaaagttagaagaagatgctgaaatgaaatctctagaagaaaagattggatgcttgctgaaattttcgggtgatttagatgatcagacctgtagagaagatttacacatacttttctcaaatcatggtgaaataaaatggatagacttcgtcagaggagcaaaagaggggataattctatttaaagaaaaagccaaggaagcattgggtaaagccaaagatgcaaataatggtaacctacaattaaggaacaaagaagtgacttgggaagtactagaaggagaggtggaaaaagaagcactgaagaaaataatagaagaccaacaagaatccctaaacaaatggaagtcaaaaggtcgtagatttaaaggaaaaggaaagggtaataaagctgcccagcctgggtctggtaaaggaaaagtacagtttcagggcaagaaaacgaaatttgctagtgatgatgaacatgatgaacatgatgaaaatggtgcaactggacctgtgaaaagagcaagagaagaaacagacaaagaagaacctgcatccaaacaacagaaaacagaaaatggtgctggagaccagtagtttagtaaaccaattttttattcattttaaataggttttaaacgacttttgtttgcggggcttttaaaaggaaaaccgaattaggtccacttcaatgtccacctgtgagaaaggaaaaatttttttgttgtttaacttgtctttttgttatgcaaatgagatttctttgaatgtattgttctgtttgtgttatttcagatgattcaaatatcaaaaggaagattcttccattaaattgcctttgtaatatgagaatgtattagtacaaactaactaataaaatatatactatatgaaaagagcaaa

SEQ ID NO: 281642 - DNA, 1369 bp, Homo sapiens
tagaggatcccgagggcttcaacggaactttaatgtaattgtggaagcattgagcaaatccaaggcagaactcatggaaatcagtgaagataaaactaaaatcagaaggtctccaagcaaacccctacctgaagtgactgatgagtataaaaatgatgtaaaaaacagatctgtttatattaaaggcttcccaactgatgcaactcttgatgacataaaagaatggttagaagataaaggtcaagtactaaatattcagatgagaagaacattgcataaagcatttaagggatcaatttttgttgtgtttgatagcattgaatctgctaagaaatttgtagagacccctggccagaagtacaaagaaacagacctgctaatacttttcaaggacgattactttgccaaaaaaaatgaagaaagaaaacaaaataaagtggaagctaaattaagagctaaacaggagcaagaagcaaaacaaaagttagaagaagatgctgaaatgaaatctctagaagaaaagattggatgcttgctgaaattttcgggtgatttagatgatcagacctgtagagaagatttacacatacttttctcaaatcatggtgaaataaaatggatagacttcgtcagaggagcaaaagaggggataattctatttaaagaaaaagccaaggaagcattgggtaaagccaaagatgcaaataatggtaacctacaattaaggaacaaagaagtgacttgggaagtactagaaggagaggtggaaaaagaagcactgaagaaaataatagaagaccaacaagaatccctaaacaaatggaagtcaaaaggtcgtagatttaaaggaaaaggaaagggtaataaagctgcccagcctgggtctggtaaaggaaaagtacagtttcagggcaagaaaacgaaatttgctagtgatgatgaacatgatgaacatgatgaaaatggtgcaactggacctgtgaaaagagcaagagaagaaacagacaaagaagaacctgcatccaaacaacagaaaacagaaaatggtgctggagaccagtagtttagtaaaccaattttttattcattttaaataggttttaaacgacttttgtttgcggggcttttaaaaggaaaaccgaattaggtccacttcaatgtccacctgtgagaaaggaaaaatttttttgttgtttaacttgtctttttgttatgcaaatgagatttctttgaatgtattgttctgtttgtgttatttcagatgattcaaatatcaaaaggaagattcttccattaaattgcctttgtaatatgagaatgtattagtacaaactaactaataaaatatatactatatgaaaagagcaaa

SEQ ID NO: 281643 - DNA, 832 bp, Homo sapiens
acccaggcggcaagagctgccgggacggtccccatcttcttggagcgctttaggctggccggcggcgctgggaggtggagtcgttgctgttgctgtttgtgagcctgtggcgcggcttctgtgggccggaaccttaaagatagccgcaatggctgaaaatggtgataatgaaaagatggctgccctggaggccaaaatctgtcatcaaattgagtattattttggcgacttcaatttgccacgggacaagtttctaaaggaacagataaaactggatgaaggctgggtacctttggagataatgataaaattcaacaggttgaaccgtctaacaacagactttaatgtaattgtggaagcattgagcaaatccaaggcagaactcatggaaatcagtgaagataaaactaaaatcagaaggtctccaagcaaacccctacctgaagtgactgatgagtataaaaatgatgtaaaaaacagatctgtttatattaaaggcttcccaactgatgcaactcttgatgacataaaagaatggttagaagataaaggtcaagtactaaatattcagatgagaagaacattgcataaagcatttaagggatcaatttttgttgtgtttgatagcattgaatctgctaagaaatttgtagagacccctggccagaagtacaaagaaacagacctgctaatacttttcaaggacgattactttgccaaaaaaaatgaagaaagaaaacaaaataaagtggaagctaaattaagagctaaacaggagcaagaagcaaaacaaaagttccgttgaagccgtcgggtcctctagagtcagact

SEQ ID NO: 281644 - DNA, 1262 bp, Homo sapiens
cacgattctttgccaaattaaatgaagaaagaaaactaaataaagtggaagctaaattaagagctaaacaggagaaaggcttcccaactgatgcaactcttgatgacataaaagaatggttagaagataaaggtcaagtactaaatattcagatgagaagaacattgcataaagcatttaagggatcaatttttgttgtgtttgatagcattgaatctgctaagaaatttgtagagacccctggccagaagtacaaagaaacagacctgctaatacttttcaaggacgattactttgccaaaaaaaatgaagaaagaaaacaaaataaagtggaagctaaattaagagctaaacaggagcaagaagcaaaacaaaagttagaagaagatgctgaaatgaaatctctagaagaaaagattggatgcttgctgaaattttcgggtgatttagatgatcagacctgtagagaagatttacacatacttttctcaaatcatggtgaaataaaatggatagacttcgtcagaggagcaaaagaggggataattctatttaaagaaaaagccaaggaagcattgggtaaagccaaagatgcaaataatggtaacctacaattaaggaacaaagaagtgacttgggaagtactagaaggagaggtggaaaaagaagcactgaagaaaataatagaagaccaacaagaatccctaaacaaatggaagtcaaaaggtcgtagatttaaaggaaaaggaaagggtaataaagctgcccagcctgggtctggtaaaggaaaagtacagtttcagggcaagaaaacgaaatttgctagtgatgatgaacatgatgaacatgatgaaaatggtgcaactggacctgtgaaaagagcaagagaagaaacagacaaagaagaacctgcatccaaacaacagaaaacagaaaatggtgctggagaccagtagtttagtaaaccaattttttattcattttaaataggttttaaacgacttttgtttgcggggcttttaaaaggaaaaccgaattaggtccacttcaatgtccacctgtgagaaaggaaaaatttttttgttgtttaacttgtctttttgttatgcaaatgagatttctttgaatgtattgttctgtttgtgttatttcagatgattcaaatatcaaaaggaagattcttccattaaattgcctttgtaatatgagaatgtattagtacaaactaactaataaaatatatactatatgaaaagagcaaa

SEQ ID NO: 281645 - DNA, 802 bp, Homo sapiens
  misc_feature (712)..(712): n is a, c, g, or t
  misc_feature (745)..(745): n is a, c, g, or t
  misc_feature (752)..(753): n is a, c, g, or t
  misc_feature (765)..(765): n is a, c, g, or t
  misc_feature (770)..(770): n is a, c, g, or t
acccaggcggcaagagctgccgggacggtccccatcttcttggagcgctttaggctggccggcggcgctgggaggtggagtcgttgctgttgctgtttgtgagcctgtggcgcggcttctgtgggccggaaccttaaagatagccgcaatggctgaaaatggtgataatgaaaagatggctgccctggaggccaaaatctgtcatcaaattgagtattattttggcgacttcaatttgccacgggacaagtttctaaaggaacagataaaactggatgaaggctgggtacctttggagataatgataaaattcaacaggttgaaccgtctaacaacagactttaatgtaattgtggaagcattgagcaaatccaaggcagaactcatggaaatcagtgaagataaaactaaaatcagaaggtctccaagcaaacccctacctgaagtgactgatgagtataaaaatgatgtaaaaaacagatctgtttatattaaaggcttcccaactgatgcaactcttgatgacataaaagaatggttagaagataaaggtcaagtactaaatattcagatgagaagaacattgcataaagcatttaagggatcaatttttgttgtgtttgatagcattgaatctgctaagaaatttgtagagacccctggccagaagtacaaagaaacagacctgctaatacttttcaagagggacgantactttgccaaaaaattgaggaagaaccaatangtgggcnnattagagcaacngggcngagcaaccagttgagaagactagtgtttcaag

SEQ ID NO: 281646 - DNA, 757 bp, Homo sapiens
atccttaattaaattttttcccccccccgaggctggccggcggcgctgggaggtggagtcgttgctgttgctgtttgtgagcctgtggcgcggcttctgtgggccggaaccttaaagtattattttggcgacttcaatttgccacgggacaagtttctaaaggaacagataaaactggatgaaggctgggtacctttggagataatgataaaattcaacaggttgaaccgtctaacaacagactttaatgtaattgtggaagcattgagcaaatccaaggcagaactcatggaaatcagtgaagataaaactaaaatcagaaggtctccaagcaaacccctacctgaagtgactgatgagtataaaaatgatgtaaaaaacagatctgtttatattaaaggcttcccaactgatgcaactcttgatgacataaaagaatggttagaagataaaggtcaagtactaaatattcagatgagaagaacattgcataaagcatttaagggatcaatttttgttgtgtttgatagcattgaatctgctaagaaatttgtagagacccctggccagaagtacaaagaaacagacctgctaatacttttcaaggacgattactttgccaaaaaaaatgaagaaagaaaacaaaataaagtggaagctaaattaagagctaaacaggagcaagaagcaaaacaaagttagaagaagatctgaatgaaattcttggaagaaagattggggtgctgaaattcggggg

SEQ ID NO: 281647 - DNA, 127 bp, Homo sapiens
tgaggtagctgatggagaaagggcaaagtaagagggtggagaagagcaattaagaatggacagtttgttgttaaaaacaaaacactggccaggcatggtggctcacacctgtaatcccagcactctg

SEQ ID NO: 281648 - DNA, 3002 bp, Homo sapiens
  misc_feature (173)..(173): n is a, c, g, or t
gggcggacctaaaggggctcgggccgctcgggccgggaatggcggcggcggccgagcccggggcccgcgcctggctgggcggcggctccccgcgccccggcagcccggcctgcagccccgtgctgggctcaggaggccgcgcgcgcccggggccggggccggggccgggacgngaccgagcgggcggcgtcagagcccgggcccgtgccgcgccgggacacagcttccggaaggtgacgctcaccaagcccaccttctgccacctctgctccgacttcatctgggggctggccggcttcctgtgcgacgtctgcaatttcatgtctcatgagaagtgcctgaagcacgtgaggatcccgtgcacgagtgtggcacccagcctggtccgggttcctgtagcccactgcttcggcccccgggggctccacaagcgcaagttctgtgctgtctgccgcaaggtcctggaggcaccggcgctccactgcgaagtgtgtgagctgcacctccacccagactgtgtgcccttcgcctgcagtgactgccgccagtgccaccaggatgggcaccaggatcacgacacccatcaccaccactggcgggaggggaacctgccctcgggagcgcgctgcgaggtctgcaggaagacgtgcggctcctctgacgtgctggccggcgtgcgctgcgagtggtgcggggtccaggcgcactccctctgctccgcggcactggctcccgagtgtggcttcgggcgtctgcgctccctggtcctgcctcccgcgtgcgtgcgccttctgcccggcggcttcagcaagacgcagagcttccgcatcgtggaggccgcggagccgggcgaggggggcgacggcgccgacgggagcgctgccgtgggtccaggcagagagacacaggcaactccggagtccgggaagcaaacgctgaagatctttgatggcgacgacgcggtgagaagaagccagttccgcctcgtcacggtgtcccgcctggccggtgccgaggaggtgctggaggccgcactgcgggcccaccacatccccgaggaccctggccacctggagctgtgccggctgcccccttcctctcaggcctgtgacgcctgggctgggggcaaggctgggagtgctgtgatctcggaggagggcagaagccccgggtccggcgaggccacgccagaggcctgggtcatccgggctctgccgcgggcccaggaggtcctgaagatctaccctggctggctcaaggtgggcgtggcctacgtgtccgtgcgagtgacccctaagagcacggctcgctctgtggtgctggaggtcctgccgctgctcggccgccaggccgagagtcccgagagcttccagctggtggaggtggcgatgggctgcaggcacgtccagcggacgatgctgatggacgaacagcccctgctggaccggctacaggacatccggcagatgtctgtgcggcaggtgagccagacgcggttctacgtggcagagagcagggatgtagccccgcacgtctccctgtttgttggcggcctgcctcccggcctgtctcccgaggagtacagcagcctgctgcatgaggccggggctaccaaagccaccgtggtgtccgtgagtcacatctactcctcccaaggcgcggtagtgttggacgttgcctgctttgcggaggccgagcggctgtacatgctgctgaaggacatggctgtgcggggccggctgctcactgccctggtgctccccgacctgctgcacgcgaagctgcccccagacagctgtcccctccttgtgttcgtgaaccccaagagtggaggcctcaagggccgagacctgctctgcagcttccggaagctactgaaccctcatcaggtcttcgacctgaccaacggaggtcctcttcccgggctccacctgttctcccaggtgccctgcttccgggtgctggtgtgtggtggcgatggcactgtgggctgggtgcttggcgccctggaggagacacggtaccgactggcctgcccggagccttctgtggccatcctgcccctgggcacagggaatgaccttggtcgagtcctccgctggggggcgggctacagcggcgaggacccgttctccgtactgctgtctgtggacgaggccgacgccgtgctcatggaccgctggaccatcctgctggatgcccacgaggctggcagtgcagagaacgacacggcagacgcagagccccccaagatcgtgcagatgagtaactactgtggcattggcatcgacgcggagctgagcctggacttccaccaggcacgggaagaggagcctggcaagttcacaagcaggctgcacaacaagggtgtgtacgtgcgggtggggctgcagaagatcagtcactctcggagcctgcacaagcagatccggctgcaggtggagcggcaggaggtggagctgcccagtattgaaggcctcatcttcatcaacatccccagctggggctcgggggccgacctgtggggctccgacagcgacaccaggtttgagaagccacgcatggacgacgggctgctggaggttgtgggcgtgacgggcgtcgtgcacatgggccaggtccagggtgggctgcgctccggaatccggattgcccagggttcctacttccgagtcacgctcctcaaggccaccccggtgcaggtggacggggagccctgggtccaggccccggggcacatgatcatctcagctgctggccctaaggtgcacatgctgaggaaggccaagcagaagccgaggagggccgggaccaccagggatgcccgggcggatgcgtgcgcctgcccctgagagcgatcctaggtaggggtggctggggcagcccaagggctcgagccatctctgctcccgccagccttgttttcaggtggtctggaggcagctccacgtccacacagtggctgtcatatattgaagttaccttcccactggaaaaaaaat

SEQ ID NO: 281649 - DNA, 3303 bp, Homo sapiens
tcctggggaggctgcctttggggtgagatgtcacccctggacaggcggaggggctgtccctggccccagtgctgtgtgtccttcgcctcccaccgccctgaccacagcctgcctttgcagccaccgtggtgtccgtgagtcacatctactcctcccaaggtgagctgccctgagggacgtggtcacatgaggcccaggggtgttcctggggtgaagtgggacagccctggccctcacgtagcacctgacctttcccttgggcagccctgggctggggaaacgtcctggtttggttcctgccctggcaccgtgggggccatgggacaggctccccctgagtcctgggctcctgccgcaggcgcggtagtgttggacgttgcctgctttgcggaggccgagcggctgtacatgctgctgaaggacatggctgtgcggggccggctgctcactgccctggtgctccccgacctgctgcacgcgaagctgcccccagacagctgtcccctccttgtgttcgtgaaccccaagagtggaggcctcaagggccgagacctgctctgcagcttccggaagctactgaaccctcatcaggtcttcgacctgaccaacggaggtcctcttcccgggctccacctgttctcccaggtgccctgcttccgggtgctggtgtgtggtggcgatggcactgtgggctgggtgcttggcgccctggaggagacacggtaccgactggcctgcccggagccttctgtggccatcctgcccctgggcacagggaatgaccttggtcgagtcctccgctggggggcgggctacagcggcgaggacccgttctccgtactgctgtctgtggacgaggccgacgccgtgctcatggaccgctggaccatcctgctggatgcccacgaggctggcagtgcagagaacgacacggcagacgcagagccccccaagatcgtgcagatgagtaactactgtggcattggcatcgacgcggagctgagcctggacttccaccaggcacgggaagaggagcctggcaagttcacaagcaggctgcacaacaagggtgtgtacgtgcgggtggggctgcagaagatcagtcactctcggagcctgcacaagcagatccggctgcaggtggagcggcaggaggtggagctgcccagtattgaaggcctcatcttcatcaacatccccagctggggctcgggggccgacctgtggggctccgacagcgacaccaggtttgagaagccacgcatggacgacgggctgctggaggttgtgggcgtgacgggcgtcgtgcacatgggccaggtccagggtgggctgcgctccggaatccggattgcccagggttcctacttccgagtcacgctcctcaaggccaccccggtgcaggtggacggggagccctgggtccaggccccggggcacatgatcatctcagctgctggccctaaggtgcacatgctgaggaaggccaagcagaagccgaggagggccgggaccaccagggatgcccgggcggatgcgtgcgcctgcccctgagagcgatcctaggtaggggtggctggggcagcccaagggctcgagccatctctgctcccgccagccttgttttcaggtggtctggaggcagctccacgtccacacagtggccggccctgtggtcggacctggctacagccctgaccacagcatcttcccagtgacggagcgggacccgccctcatcccattggtgacacatgttggtgtcacagccctcatcccactggagactggtgtgcgggtggcagtgttaccccgtgtcccgggtgggcgcagggctctggatggtgagccctctgccctgtgggggcctggtcctctcctcaggggtgggcacccatccctctccccactgagccccttgagctggacagtgctggatgcaggccgtccaggtgggtctgatctcactttgtgcccctcgggccgtccccctggccagtccttcagagcagcaggctccctggtgtgtccctgccccagcagacacaggctgccagtccctccagcctcacctccccgccctgggcagcaggtgtgggcagcgtgtgaggctgccgggtggtggtgactggtgacttccttgtgttcagggaagggagaaggtgccttcccttgttttctggccttgttatatacagatggcagcttggatctcaggtacagctccaggggcaggcagtgcccagctggacctggtggccctttcctagtgcctctgcttggggaggagaacctctgtccacgtggaggctaggaggtctcaggtgctgccctggcagcaccagagtgtgggccgggcccgagtgtctgcccctcggccctcagggtggggcacttagcacccagaagggaccaaaagcagggcatggcggtgcagaggagtttgggaggtgtaaacagccccatgcacgtggaggaggagctggctttcagccccagaccccacgctagcactttccacgctgcttgcccgctgttgatgtgcagttcccagtgcctgtgtgagccgacatctgctcagtcctatccctcgtcagcgtgtggagacccagctcctgcagccctcctgctcccacgcccccagacagcttggtggagggtcctgcatctgggccaggctggggtgcacccagccaaagacaaagctgcctccacgtgcccaaggattcagatggtgcactggccccgggaggagtctgaccaaaaatggagcccgctctgtgggaagccccgactcccccacgagaaacggtcccacggtgcggatctcccccttcccttgtggggcacagctggcctgggcctccaatcctgcggagctttcctgggtgtggctttgacctcagaagtggctctggtttggcctcaggagtgtggcctggcccagcctgctgcagcctcctggggggcccttgatgccactaatcccccgaccccccgcatctgccaaactgcacagacacacgcattgtaaggccgcttgtggcctccagcgtgcactcttgtttacgtcattgtcatcttcaagaccagtcctttgtgattagttttgcttcgcgagccctggtgtggactgtggtctgtatgaatcgtgtgtaactgtggtgaggggcttgtcctgtatgtgagtctgtacccaggtggggtctgtgccctgcacaccgggcccctctgtatttatcgctgcctgaatgcaacagtaatttatatccaggacaaatacagtctgggcgtcactatccta

SEQ ID NO: 281650 - DNA, 887 bp, Homo sapiens
  misc_feature (173)..(173): n is a, c, g, or t
gggcggacctaaaggggctcgggccgctcgggccgggaatggcggcggcggccgagcccggggcccgcgcctggctgggcggcggctccccgcgccccggcagcccggcctgcagccccgtgctgggctcaggaggccgcgcgcgcccggggccggggccggggccgggacgngaccgagcgggcggcgtcagagcccgggcccgtgccgcgccgggacacagcttccggaaggtgacgctcaccaagcccaccttctgccacctctgctccgacttcatctgggggctggccggcttcctgtgcgacgtctgcaatttcatgtctcatgagaagtgcctgaagcacgtgaggatcccgtgcacgagtgtggcacccagcctggtccgggttcctgtagcccactgcttcggcccccgggggctccacaagcgcaagttctgtgctgtctgccgcaaggtcctggaggcaccggcgctccactgcgaagtgtgtgagatgttccccctgctgtaaatgcaggtctcttggtatttattgagctttgtgggactggtggaagcaggacacctggaactgcggcaaagtaggagaagaaatggggaggactcgggtgggggaggacgtcccggctgggatgaagtctggtggtgggtcgtaagtttaggaggtgactgcatcctccagcatctcaactccgtctgtctactgtgtgagacttcggcggaccattaggaatgagatccgtgagatccttccatcttcttgaagtcgcctttagggtggctgcgaggtagagggttgggggttggtgggctgtcacggagcgactgtcgagatcgcctagtatgttctgtgaacacaaataaaattgatttactgtctgca

SEQ ID NO: 281651 - DNA, 4680 bp, Homo sapiens
  misc_feature (173)..(173): n is a, c, g, or t
gggcggacctaaaggggctcgggccgctcgggccgggaatggcggcggcggccgagcccggggcccgcgcctggctgggcggcggctccccgcgccccggcagcccggcctgcagccccgtgctgggctcaggaggccgcgcgcgcccggggccggggccggggccgggacgngaccgagcgggcggcgtcagagcccgggcccgtgccgcgccgggacacagcttccggaaggtgacgctcaccaagcccaccttctgccacctctgctccgacttcatctgggggctggccggcttcctgtgcgacgtctgcaatttcatgtctcatgagaagtgcctgaagcacgtgaggatcccgtgcacgagtgtggcacccagcctggtccgggttcctgtagcccactgcttcggcccccgggggctccacaagcgcaagttctgtgctgtctgccgcaaggtcctggaggcaccggcgctccactgcgaagtgtgtgagctgcacctccacccagactgtgtgcccttcgcctgcagtgactgccgccagtgccaccaggatgggcaccaggatcacgacacccatcaccaccactggcgggaggggaacctgccctcgggagcgcgctgcgaggtctgcaggaagacgtgcggctcctctgacgtgctggccggcgtgcgctgcgagtggtgcggggtccaggcgcactccctctgctccgcggcactggctcccgagtgtggcttcgggcgtctgcgctccctggtcctgcctcccgcgtgcgtgcgccttctgcccggcggcttcagcaagacgcagagcttccgcatcgtggaggccgcggagccgggcgaggggggcgacggcgccgacgggagcgctgccgtgggtccaggcagagagacacaggcaactccggagtccgggaagcaaacgctgaagatctttgatggcgacgacgcggtgagaagaagccagttccgcctcgtcacggtgtcccgcctggccggtgccgaggaggtgctggaggccgcactgcgggcccaccacatccccgaggaccctggccacctggagctgtgccggctgcccccttcctctcaggcctgtgacgcctgggctgggggcaaggctgggagtgctgtgatctcggaggagggcagaagccccgggtccggcgaggccacgccagaggcctgggtcatccgggctctgccgcgggcccaggaggtcctgaagatctaccctggctggctcaaggtgggcgtggcctacgtgtccgtgcgagtgacccctaagagcacggctcgctctgtggtgctggaggtcctgccgctgctcggccgccaggccgagagtcccgagagcttccagctggtggaggtggcgatgggctgcaggcacgtccagcggacgatgctgatggacgaacagcccctgctggaccggctacaggacatccggcagggaggcctcgagctgcagatctccccgaggtcctcgaggggaacggacaggggttgtccacagcaaggaagcctctgtggcccctttcctcgttttcctgttgacttaattcctgggagtgttcctgatgccctgttttgctgttttgcgggtgaggagacagagggcctggtgcggtggtgccgttctccccggcccagcatccccgcccctctccctgcagatgtctgccaccgtggtgtccgtgagtcacatctactcctcccaaggcgcggtagtgttggacgttgcctgctttgcggaggccgagcggctgtacatgctgctgaaggacatggctgtgcggggccggctgctcactgccctggtgctccccgacctgctgcacgcgaagctgcccccagacagctgtcccctccttgtgttcgtgaaccccaagagtggaggcctcaagggccgagacctgctctgcagcttccggaagctactgaaccctcatcaggtcttcgacctgaccaacggaggtcctcttcccgggctccacctgttctcccaggtgccctgcttccgggtgctggtgtgtggtggcgatggcactgtgggctgggtgcttggcgccctggaggagacacggtaccgactggcctgcccggagccttctgtggccatcctgcccctgggcacagggaatgaccttggtcgagtcctccgctggggggcgggctacagcggcgaggacccgttctccgtactgctgtctgtggacgaggccgacgccgtgctcatggaccgctggaccatcctgctggatgcccacgaggctggcagtgcagagaacgacacggcagacgcagagccccccaagatcgtgcagatgagtaactactgtggcattggcatcgacgcggagctgagcctggacttccaccaggcacgggaagaggagcctggcaagttcacaagcaggctgcacaacaagggtgtgtacgtgcgggtggggctgcagaagatcagtcactctcggagcctgcacaagcagatccggctgcaggtggagcggcaggaggtggagctgcccagtattgaaggcctcatcttcatcaacatccccagctggggctcgggggccgacctgtggggctccgacagcgacaccaggtttgagaagccacgcatggacgacgggctgctggaggttgtgggcgtgacgggcgtcgtgcacatgggccaggtccagggtgggctgcgctccggaatccggattgcccagggttcctacttccgagtcacgctcctcaaggccaccccggtgcaggtggacggggagccctgggtccaggccccggggcacatgatcatctcagctgctggccctaaggtgcacatgctgaggaaggccaagcagaagccgaggagggccgggaccaccagggatgcccgggcggatgcgtgcgcctgcccctgagagcgatcctaggtaggggtggctggggcagcccaagggctcgagccatctctgctcccgccagccttgttttcaggtggtctggaggcagctccacgtccacacagtggccggccctgtggtcggacctggctacagccctgaccacagcatcttcccagtgacggagcgggacccgccctcatcccattggtgacacatgttggtgtcacagccctcatcccactggagactggtgtgcgggtggcagtgttaccccgtgtcccgggtgggcgcagggctctggatggtgagccctctgccctgtgggggcctggtcctctcctcaggggtgggcacccatccctctccccactgagccccttgagctggacagtgctggatgcaggccgtccaggtgggtctgatctcactttgtgcccctcgggccgtccccctggccagtccttcagagcagcaggctccctggtgtgtccctgccccagcagacacaggctgccagtccctccagcctcacctccccgccctgggcagcaggtgtgggcagcgtgtgaggctgccgggtggtggtgactggtgacttccttgtgttcagggaagggagaaggtgccttcccttgttttctggccttgttatatacagatggcagcttggatctcaggtacagctccaggggcaggcagtgcccagctggacctggtggccctttcctagtgcctctgcttggggaggagaacctctgtccacgtggaggctaggaggtctcaggtgctgccctggcagcaccagagtgtgggccgggcccgagtgtctgcccctcggccctcagggtggggcacttagcacccagaagggaccaaaagcagggcatggcggtgcagaggagtttgggaggtgtaaacagccccatgcacgtggaggaggagctggctttcagccccagaccccacgctagcactttccacgctgcttgcccgctgttgatgtgcagttcccagtgcctgtgtgagccgacatctgctcagtcctatccctcgtcagcgtgtggagacccagctcctgcagccctcctgctcccacgcccccagacagcttggtggagggtcctgcatctgggccaggctggggtgcacccagccaaagacaaagctgcctccacgtgcccaaggattcagatggtgcactggccccgggaggagtctgaccaaaaatggagcccgctctgtgggaagccccgactcccccacgagaaacggtcccacggtgcggatctcccccttcccttgtggggcacagctggcctgggcctccaatcctgcggagctttcctgggtgtggctttgacctcagaagtggctctggtttggcctcaggagtgtggcctggcccagcctgctgcagcctcctggggggcccttgatgccactaatcccccgaccccccgcatctgccaaactgcacagacacacgcattgtaaggccgcttgtggcctccagcgtgcactcttgtttacgtcattgtcatcttcaagaccagtcctttgtgattagttttgcttcgcgagccctggtgtggactgtggtctgtatgaatcgtgtgtaactgtggtgaggggcttgtcctgtatgtgagtctgtacccaggtggggtctgtgccctgcacaccgggcccctctgtatttatcgctgcctgaatgcaacagtaatttatatccaggacaaatacagtctgggcgtcactatccta

SEQ ID NO: 281652 - DNA, 297 bp, Homo sapiens
cgggccacaggtggcacagggagcagccagacaggtccctccccttccgtgaaatggggctgagatggcatcagctgcccggggccccaggaccgggggctgcccgtgtaccgttctttcatcggccatgtcaccctggtcctctgtcccctgccctgggacaggtgcacatgctgaggaaggccaagcagaagccgaggagggccgggaccaccagggatgcccgggcggatgcgtgcgcctgcccctgagagcgatcctaggtaggggtggctggggcagcccaagggctcgagc

SEQ ID NO: 281653 - DNA, 1063 bp, Homo sapiens
ttgttatggcaaaggtggatcccggtgctttgagattggacgactggggtgaggcgggcagctaatgcgcagaccattcctcaagaattttgtatccaaggcccaaaagtttgttacccaagatgatgaatgctgacatggatgcagttgatgctgaaaatcaagtggaactggaggaaaaaacaagacttattaatcaagtgttggaactccaacacacacttgaagatctctctgcaagagtagatgcagttaaggaagaaaatctgaagctaaaatcagaaaaccaagttcttggacaatatatagaaaatctcatgtcagcttctagtgtttttcaaacaactgacacaaaaagcaaaagaaagtaagggattgacacccttctgttttatggaattgctgctgatcattttttctttaaaacttggatagattccaaaagttacagtacctttgtggcttcattgaatatttatgaagataatgtcagatgtagacaaaaataacacaataacaggagacttccataagtttgtgtattatgttagtctatgaaaacgtgcaaatgtattgtagagactttatgattagaattgcatatatttatgaaacttaaagatgaatgttttattgaatttgtaggtttagcactgtcttttattataggattagtaagatatacaagaaaataaccaccgtgttgtgaaaaagtgaccaaaatcatgtactaaatgcacagctttatgtaccctgtccaccatcttgtgcctcttctccatttgcctcttccttcctatttcccttccgctaaggaaaacatggcggcccttgtaagcaatttacaagtaacccccgaagaaccggcttttactgtggacttccccacaaaaatggtcccagggtgcctgggtttagggacaagaaagacagggctcgtcaaggaagagacgggcgacaaagaagctctgcagaacgcgaaggggtgaatgcgcgccacgctttgcgaacacggtggccgcaacaagaggagggcggaacaccaaacccgagcgagagataa

SEQ ID NO: 281654 - DNA, 490 bp, Homo sapiens
tcatccctagtgtaaattgtgcttagaccaataacacatttaaaattatagagcttttcatcactacggagatgctcttgcctatgataggaacgatggctacatctgaagctgagcaaatttatcttttctcttcgtctgcatcagggtgacctctggaagagcaatttaggaccatcagtgttacagagactccaaccaacttgcacagagccctaagctgccgtgtaaggcatctgactacgctgaagccactacattggaaaggtcacatggaggagctccagctgacagtctcggaggagctcagcttcaagccatccctgcaaggtatcagccatataaatgaatcagcccagctgccagtcaagtatctttgcatggcttccatcagtgcctcatgaaacggaagattgactagccaagacttgcccaaattcctgacccacaaaatcatgagatataataaaatggttgttattttaagcca

SEQ ID NO: 281655 - DNA, 1876 bp, Homo sapiens
gggattcttctcacggcgcacgttctgtgggcggagtgggcggagctgccggggtcagttggtccaagtgtcccggcctgaggtgtcggccggatccctccttctcccggcgcctcaagcggaagaccattcctcaagaattttgtatccaaggcccaaaagtttgttacccaagatgatgaatgctgacatggatgcagttgatgctgaaaatcaagtggaactggaggaaaaaacaagacttattaatcaagtgttggaactccaacacacacttgaagatctctctgcaagagtagatgcagttaaggaagaaaatctgaagctaaaatcagaaaaccaagttcttggacaatatatagaaaatctcatgtcagcttctagtgtttttcaaacaactgacacaaaaagcaaaagaaagtaagggattgacacccttctgttttatggaattgctgctgatcattttttctttaaaacttggatagattccaaaagttacagtacctttgtggcttcattgaatatttatgaagataatgtcagatgtagacaaaaataacacaataacaggagacttccataagtttgtgtattatgttagtctatgaaaacgtgcaaatgtattgtagagactttatgattagaattgcatatatttatgaaacttaaagatgaatgttttattgaatttgtaggtttagcactgtcttttattataggattagtaagatatacaagaaaataaccaccgtgttgtgaaaaagtgaccaaaatcatgtactaaatgcacagctttatgtaccctgtccaccatcttgtgcctcttctccatttgcctcttccttcctatttcccttccgctaaggaaaaaaattggtgtcacatttgtaaaagtaattttaatagttaatcatctctgagagtaacctgtattttaattgttgaaacttaaccaaaataagatactgtctcagctagggcttgtcatttgtgtatttagtgttaagataggaatgctagtgtctctttaattaattggaaatagatggaggctaaaaatgaaggtttttctttgaaactgaattaacttgggaatatttgttgttaaaaacttctttttgcccaaaataactcattttgtattatctgaaaatatataatttctggtcatgtgtatgttaaaatagaaaattttgaggaaaaatggaaatagggtggaaaagtactcggtaaacagtagtaaccaaatattttcactccagatttgtgttttctctggcacagagtagatcttttgggaaatatatatgaaagtggattaagtttgactacccttatgttagccacatctggatgagaacagttacaaagagtttggtctctaagttgatttgtacccagtgggtcaacttctgcaaaattccgtaatggtgtattagtattagaatagtgaataaaatgggaaagttatacatgtatacttattatcttgctcagtattttatctcacttgttctagaattttctgtaaaccctgctactgggtttgaagagttttagtcatcctttaacaatttttaaaaatttagcttctagattccatttggtaaggaaatcaatattggaagtattgctaaaatcttataatatgaaaagagatccactaatgtagcttaaggttattagatttgggcttttaatcatggaataatcttatgtattggtgtaagagttgatgaatgactttagctgtgtgaatatataatagtcaaactgcaaacattttgcatcccttttgtgacctaatttacagacatttaaattgtgttgcagttctgctttgccgtttaataaaaagctatttcagaggttg

SEQ ID NO: 281656 - DNA, 1902 bp, Homo sapiens
gggattcttctcacggcgcacgttctgtgggcggagtgggcggagctgccggggtcagttggtccaagtgtcccggcctgaggtgtcggccggatccctccttctcccggcgcctcaagcggaagaccattcctcaagaattttgtatccaaggcccaaaagtttgttacccaagatgatgaatgctgacatggatgcagttgatgctgaaaatcaagtggaactggaggaaaaaacaagacttattaatcaagtgttggaactccaacacacacttgaagatctctctgcaagagtagatgcagttaaggaagaaaatctgaagctaaaatcagaaaaccaagttcttggacaatatatagaaaatctcatgtcagcttctagtgtttttcaaacaactgacacaaaaagcaaaagaaagtaagggattgacacccttctgttttatggaattgctgctgatcattttttctttaaaacttggatagattccaaaagttacagtacctttgtggcttcattgaatatttatgaagataatgtcagatgtagacaaaaataacacaataacaggagacttccataagtttgtgtattatgttagtctatgaaaacgtgcaaatgtattgtagagactttatgattagaattgcatatatttatgaaacttaaagatgaatgttttattgaatttgtaggtttagcactgtcttttattataggattagtaagatatacaagaaaataaccaccgtgttgtgaaaaagtgaccaaaatcatgtactaaatgcacagctttatgtaccctgtccaccatcttgtgcctcttctccatttgcctcttccttcctatttcccttccgctaaggaaaaaaattggtgtcacatttgtaaaagtaattttaatagttaatcatctctgagagtaacctgtattttaattgttgaaacttaaccaaaataagatactgtctcagctagggcttgtcatttgtgtatttagtgttaagataggaatgctagtgtctctttaattaattggaaatagatggaggctaaaaatgaaggtttttctttgaaactgaattaacttgggaatatttgttgttaaaaacttctttttgcccaaaataactcattttgtattatctgaaaatatataatttctggtcatgtgtatgttaaaatagaaaattttgaggaaaaatggaaatagggtggaaaagtactcggtaaacagtagtaaccaaatattttcactccagatttgtgttttctctggcacagagtagatcttttgggaaatatatatgaaagtggattaagtttgactacccttatgttagccacatctggatgagaacagttacaaagagtttggtctctaagttgatttgtacccagtgggtcaacttctgcaaaattccgtaatggtgtattagtattagaatagtgaataaaatgggaaagttatacatgtatacttattatcttgctcagtattttatctcacttgttctagaattttctgtaaaccctgctactgggtttgaagagttttagtcatcctttaacaatttttaaaaatttagcttctagattccatttggtaaggaaatcaatattggaagtattgctaaaatcttataatatgaaaagagatccactaatgtagcttaaggttattagatttgggcttttaatcatggaataatcttatgtattggtgtaagagttgatgaatgactttagctgtgtgaatatataatagtcaaactgcaaacattttgcatcccttttgtgacctaatttacagacatttaaattgtgttgcagttctgctttgccgctaatagcccatccttctttgatccatcatgtttgtcttgcgacgaatccact

SEQ ID NO: 281657 - DNA, 1823 bp, Homo sapiens
gggattcttctcacggcgcacgttctgtgggcggagtgggcggagctgccggggtcagttggtccaagtgtcccggcctgaggtgtcggccggatccctccttctcccggcgcctcaagcggaagaccattcctcaagaattttgtatccaaggcccaaaagtttgttacccaagatgatgaatgctgacatggatgcagttgatgctgaaaatcaagtggaactggaggaaaaaacaagacttattaatcaagtgttggaactccaacacacacttgaagatctctctgcaagagtagatgcagttaaggaagaaaatctgaagctaaaatcagaaaaccaagttcttggacaatatatagaaaatctcatgtcagcttctagtgtttttcaaacaactgacacaaaaagcaaaagaaagtaagggattgacacccttctgttttatggaattgctgctgatcattttttctttaaaacttggatagattccaaaagttacagtacctttgtggcttcattgaatatttatgaagataatgtcagatgtagacaaaaataacacaataacaggagacttccataagtttgtgtattatgttagtctatgaaaacgtgcaaatgtattgtagagactttatgattagaattgcatatatttatgaaacttaaagatgaatgttttattgaatttgtaggtttagcactgtcttttattataggattagtaagatatacaagaaaataaccaccgtgttgtgaaaaagtgaccaaaatcatgtactaaatgcacagctttatgtaccctgtccaccatcttgtgcctcttctccatttgcctcttccttcctatttcccttccgctaaggaaaaaaattggtgtcacatttgtaaaagtaattttaatagttaatcatctctgagagtaacctgtattttaattgttgaaacttaaccaaaataagatactgtctcagctagggcttgtcatttgtgtatttagtgttaagataggaatgctagtgtctctttaattaattggaaatagatggaggctaaaaatgaaggtttttctttgaaactgaattaacttgggaatatttgttgttaaaaacttctttttgcccaaaataactcattttgtattatctgaaaatatataatttctggtcatgtgtatgttaaaatagaaaattttgaggaaaaatggaaatagggtggaaaagtactcggtaaacagtagtaaccaaatattttcactccagatttgtgttttctctggcacagagtagatcttttgggaaatatatatgaaagtggattaagtttgactacccttatgttagccacatctggatgagaacagttacaaagagtttggtctctaagttgatttgtacccagtgggtcaacttctgcaaaattccgtaatggtgtattagtattagaatagtgaataaaatgggaaagttatacatgtatacttattatcttgctcagtattttatctcacttgttctagaattttctgtaaaccctgctactgggtttgaagagttttagtcatcctttaacaatttttaaaaatttagcttctagattccatttggtaaggaaatcaatattggaagtattgctaaaatcttataatatgggaataatcttatgtattggtgtaagagttgatgaatgactttagctgtgtgaatatataatagtcaaactgcaaacattttgcatcccttttgtgacctaatttacagacatttaaattgtgttgcagttctgctttgccgtttaataaaaagctatttcagaggttg

SEQ ID NO: 281658 - DNA, 1116 bp, Homo sapiens
gggattcttctcacggcgcacgttctgtgggcggagtgggcggagctgccggggtcagttggtccaagtgtcccggcctgaggtgtcggccggatccctccttctcccggcgcctcaagcggaagaccattcctcaagaattttgtatccaaggcccaaaagtttgttacccaagatgatgaatgctgacatggatgcagttgatgctgaaaatcaagtggaactggaggaaaaaacaagacttattaatcaagtgttggaactccaacacacacttgaagatctctctgcaagagtagatgcagttaaggaagaaaatctgaagctaaaatcagaaaaccaagttcttggacaatatatagaaaatctcatgtcagcttctagtgtttttcaaacaactgacacaaaaagcaaaagaaagtaagggattgacacccttctgttttatggaattgctgctgatcattttttctttaaaacttggatagattccaaaagttacagtacctttgtggcttcattgaatatttatgaagataatgtcagatgtagacaaaaataacacaataacaggagacttccataagtttgtgtattatgttagtctatgaaaacgtgcaaatgtattgtagagactttatgattagaattgcatatatttatgaaacttaaagatgaatgttttattgaatttgtaggtttagcactgtcttttattataggattagtaagatatacaagaaaataaccaccgtgttgtgaaaaagtgaccaaaatcatgtactaaatgcacagctttatgtaccctgtccaccatcttgtgcctcttctccatttgcctcttccttcctatttcccttccgctaaggaaaacatggcggcccttgtaagcaatttacaagtaacccccgaagaaccggcttttactgtggacttccccacaaaaatggtcccagggtgcctgggtttagggacaagaaagacagggctcgtcaaggaagagacgggcgacaaagaagctctgcagaacgcgaaggggtgaatgcgcgccacgctttgcgaacacggtggccgcaacaagaggagggcggaacaccaaacccgagcgagagataa

SEQ ID NO: 281659 - DNA, 1792 bp, Homo sapiens
gggattcttctcacggcgcacgttctgtgggcggagtgggcggagctgccggggtcagttggtccaagtgtcccggcctgaggtgtcggccggatccctccttctcccggcgcctcaagcggaagaccattcctcaagaattttgtatccaaggcccaaaagtttgttacccaagatgatgaatgctgacatggatgatctctctgcaagagtagatgcagttaaggaagaaaatctgaagctaaaatcagaaaaccaagttcttggacaatatatagaaaatctcatgtcagcttctagtgtttttcaaacaactgacacaaaaagcaaaagaaagtaagggattgacacccttctgttttatggaattgctgctgatcattttttctttaaaacttggatagattccaaaagttacagtacctttgtggcttcattgaatatttatgaagataatgtcagatgtagacaaaaataacacaataacaggagacttccataagtttgtgtattatgttagtctatgaaaacgtgcaaatgtattgtagagactttatgattagaattgcatatatttatgaaacttaaagatgaatgttttattgaatttgtaggtttagcactgtcttttattataggattagtaagatatacaagaaaataaccaccgtgttgtgaaaaagtgaccaaaatcatgtactaaatgcacagctttatgtaccctgtccaccatcttgtgcctcttctccatttgcctcttccttcctatttcccttccgctaaggaaaaaaattggtgtcacatttgtaaaagtaattttaatagttaatcatctctgagagtaacctgtattttaattgttgaaacttaaccaaaataagatactgtctcagctagggcttgtcatttgtgtatttagtgttaagataggaatgctagtgtctctttaattaattggaaatagatggaggctaaaaatgaaggtttttctttgaaactgaattaacttgggaatatttgttgttaaaaacttctttttgcccaaaataactcattttgtattatctgaaaatatataatttctggtcatgtgtatgttaaaatagaaaattttgaggaaaaatggaaatagggtggaaaagtactcggtaaacagtagtaaccaaatattttcactccagatttgtgttttctctggcacagagtagatcttttgggaaatatatatgaaagtggattaagtttgactacccttatgttagccacatctggatgagaacagttacaaagagtttggtctctaagttgatttgtacccagtgggtcaacttctgcaaaattccgtaatggtgtattagtattagaatagtgaataaaatgggaaagttatacatgtatacttattatcttgctcagtattttatctcacttgttctagaattttctgtaaaccctgctactgggtttgaagagttttagtcatcctttaacaatttttaaaaatttagcttctagattccatttggtaaggaaatcaatattggaagtattgctaaaatcttataatatgaaaagagatccactaatgtagcttaaggttattagatttgggcttttaatcatggaataatcttatgtattggtgtaagagttgatgaatgactttagctgtgtgaatatataatagtcaaactgcaaacattttgcatcccttttgtgacctaatttacagacatttaaattgtgttgcagttctgctttgccgtttaataaaaagctatttcagaggttg

SEQ ID NO: 281660 - DNA, 1788 bp, Homo sapiens
gggattcttctcacggcgcacgttctgtgggcggagtgggcggagctgccggggtcagttggtccaagtgtcccggcctgaggtgtcggccggatccctccttctcccggcgcctcaagcggaagaccattcctcaagaattttgtatccaaggcccaaaagtttgttacccaagatgatgaatgctgacatggatgcagttgatgctgaaaatcaagtggaactggaggaaaaaacaagacttattaatcaagtgttggaactccaacacacacttgaagatctctctgcaagagtagatgcagttaaggaagaaaatctgaagctaaaatcagaaaaccaagttcttggacaatatatagaaaatctcatgtcagcttctagtgtttttcaaacaactgacacaaaaattacagtacctttgtggcttcattgaatatttatgaagataatgtcagatgtagacaaaaataacacaataacaggagacttccataagtttgtgtattatgttagtctatgaaaacgtgcaaatgtattgtagagactttatgattagaattgcatatatttatgaaacttaaagatgaatgttttattgaatttgtaggtttagcactgtcttttattataggattagtaagatatacaagaaaataaccaccgtgttgtgaaaaagtgaccaaaatcatgtactaaatgcacagctttatgtaccctgtccaccatcttgtgcctcttctccatttgcctcttccttcctatttcccttccgctaaggaaaaaaattggtgtcacatttgtaaaagtaattttaatagttaatcatctctgagagtaacctgtattttaattgttgaaacttaaccaaaataagatactgtctcagctagggcttgtcatttgtgtatttagtgttaagataggaatgctagtgtctctttaattaattggaaatagatggaggctaaaaatgaaggtttttctttgaaactgaattaacttgggaatatttgttgttaaaaacttctttttgcccaaaataactcattttgtattatctgaaaatatataatttctggtcatgtgtatgttaaaatagaaaattttgaggaaaaatggaaatagggtggaaaagtactcggtaaacagtagtaaccaaatattttcactccagatttgtgttttctctggcacagagtagatcttttgggaaatatatatgaaagtggattaagtttgactacccttatgttagccacatctggatgagaacagttacaaagagtttggtctctaagttgatttgtacccagtgggtcaacttctgcaaaattccgtaatggtgtattagtattagaatagtgaataaaatgggaaagttatacatgtatacttattatcttgctcagtattttatctcacttgttctagaattttctgtaaaccctgctactgggtttgaagagttttagtcatcctttaacaatttttaaaaatttagcttctagattccatttggtaaggaaatcaatattggaagtattgctaaaatcttataatatgaaaagagatccactaatgtagcttaaggttattagatttgggcttttaatcatggaataatcttatgtattggtgtaagagttgatgaatgactttagctgtgtgaatatataatagtcaaactgcaaacattttgcatcccttttgtgacctaatttacagacatttaaattgtgttgcagttctgctttgccgtttaataaaaagctatttcagaggttg

SEQ ID NO: 281661 - DNA, 1917 bp, Homo sapiens
tcatccctagtgtaaattgtgcttagaccaataacacatttaaaattatagagcttttcatcactacggagatgctcttgcctatgataggaacgatggctacatctgaagctgagcaaatttatcttttctcttcgtctgcatcagggtgacctctggaaggtctgaaaattgaacaagatggacgggtccaggaaagaggaggaggaagacagcacattcaccaacatttctcttgcagatgacatagaccattcctcaagaattttgtatccaaggcccaaaagtttgttacccaagatgatgaatgctgacatggatgatctctctgcaagagtagatgcagttaaggaagaaaatctgaagctaaaatcagaaaaccaagttcttggacaatatatagaaaatctcatgtcagcttctagtgtttttcaaacaactgacacaaaaagcaaaagaaagtaagggattgacacccttctgttttatggaattgctgctgatcattttttctttaaaacttggatagattccaaaagttacagtacctttgtggcttcattgaatatttatgaagataatgtcagatgtagacaaaaataacacaataacaggagacttccataagtttgtgtattatgttagtctatgaaaacgtgcaaatgtattgtagagactttatgattagaattgcatatatttatgaaacttaaagatgaatgttttattgaatttgtaggtttagcactgtcttttattataggattagtaagatatacaagaaaataaccaccgtgttgtgaaaaagtgaccaaaatcatgtactaaatgcacagctttatgtaccctgtccaccatcttgtgcctcttctccatttgcctcttccttcctatttcccttccgctaaggaaaaaaattggtgtcacatttgtaaaagtaattttaatagttaatcatctctgagagtaacctgtattttaattgttgaaacttaaccaaaataagatactgtctcagctagggcttgtcatttgtgtatttagtgttaagataggaatgctagtgtctctttaattaattggaaatagatggaggctaaaaatgaaggtttttctttgaaactgaattaacttgggaatatttgttgttaaaaacttctttttgcccaaaataactcattttgtattatctgaaaatatataatttctggtcatgtgtatgttaaaatagaaaattttgaggaaaaatggaaatagggtggaaaagtactcggtaaacagtagtaaccaaatattttcactccagatttgtgttttctctggcacagagtagatcttttgggaaatatatatgaaagtggattaagtttgactacccttatgttagccacatctggatgagaacagttacaaagagtttggtctctaagttgatttgtacccagtgggtcaacttctgcaaaattccgtaatggtgtattagtattagaatagtgaataaaatgggaaagttatacatgtatacttattatcttgctcagtattttatctcacttgttctagaattttctgtaaaccctgctactgggtttgaagagttttagtcatcctttaacaatttttaaaaatttagcttctagattccatttggtaaggaaatcaatattggaagtattgctaaaatcttataatatgaaaagagatccactaatgtagcttaaggttattagatttgggcttttaatcatggaataatcttatgtattggtgtaagagttgatgaatgactttagctgtgtgaatatataatagtcaaactgcaaacattttgcatcccttttgtgacctaatttacagacatttaaattgtgttgcagttctgctttgccgtttaataaaaagctatttcagaggttg

SEQ ID NO: 281662 - DNA, 2001 bp, Homo sapiens
tcatccctagtgtaaattgtgcttagaccaataacacatttaaaattatagagcttttcatcactacggagatgctcttgcctatgataggaacgatggctacatctgaagctgagcaaatttatcttttctcttcgtctgcatcagggtgacctctggaaggtctgaaaattgaacaagatggacgggtccaggaaagaggaggaggaagacagcacattcaccaacatttctcttgcagatgacatagaccattcctcaagaattttgtatccaaggcccaaaagtttgttacccaagatgatgaatgctgacatggatgcagttgatgctgaaaatcaagtggaactggaggaaaaaacaagacttattaatcaagtgttggaactccaacacacacttgaagatctctctgcaagagtagatgcagttaaggaagaaaatctgaagctaaaatcagaaaaccaagttcttggacaatatatagaaaatctcatgtcagcttctagtgtttttcaaacaactgacacaaaaagcaaaagaaagtaagggattgacacccttctgttttatggaattgctgctgatcattttttctttaaaacttggatagattccaaaagttacagtacctttgtggcttcattgaatatttatgaagataatgtcagatgtagacaaaaataacacaataacaggagacttccataagtttgtgtattatgttagtctatgaaaacgtgcaaatgtattgtagagactttatgattagaattgcatatatttatgaaacttaaagatgaatgttttattgaatttgtaggtttagcactgtcttttattataggattagtaagatatacaagaaaataaccaccgtgttgtgaaaaagtgaccaaaatcatgtactaaatgcacagctttatgtaccctgtccaccatcttgtgcctcttctccatttgcctcttccttcctatttcccttccgctaaggaaaaaaattggtgtcacatttgtaaaagtaattttaatagttaatcatctctgagagtaacctgtattttaattgttgaaacttaaccaaaataagatactgtctcagctagggcttgtcatttgtgtatttagtgttaagataggaatgctagtgtctctttaattaattggaaatagatggaggctaaaaatgaaggtttttctttgaaactgaattaacttgggaatatttgttgttaaaaacttctttttgcccaaaataactcattttgtattatctgaaaatatataatttctggtcatgtgtatgttaaaatagaaaattttgaggaaaaatggaaatagggtggaaaagtactcggtaaacagtagtaaccaaatattttcactccagatttgtgttttctctggcacagagtagatcttttgggaaatatatatgaaagtggattaagtttgactacccttatgttagccacatctggatgagaacagttacaaagagtttggtctctaagttgatttgtacccagtgggtcaacttctgcaaaattccgtaatggtgtattagtattagaatagtgaataaaatgggaaagttatacatgtatacttattatcttgctcagtattttatctcacttgttctagaattttctgtaaaccctgctactgggtttgaagagttttagtcatcctttaacaatttttaaaaatttagcttctagattccatttggtaaggaaatcaatattggaagtattgctaaaatcttataatatgaaaagagatccactaatgtagcttaaggttattagatttgggcttttaatcatggaataatcttatgtattggtgtaagagttgatgaatgactttagctgtgtgaatatataatagtcaaactgcaaacattttgcatcccttttgtgacctaatttacagacatttaaattgtgttgcagttctgctttgccgtttaataaaaagctatttcagaggttg

SEQ ID NO: 281663 - DNA, 1834 bp, Homo sapiens
  misc_feature (1742)..(1742): n is a, c, g, or t
gggattcttctcacggcgcacgttctgtgggcggagtgggcggagctgccggggtcagttggtccaagtgtcccggcctgaggtgtcggccggatccctccttctcccggcgcctcaagcggaagaccattcctcaagaattttgtatccaaggcccaaaagtttgttacccaagatgatgaatgctgacatggatgcagttgatgctgaaaatcaagtggaactggaggaaaaaacaagacttattaatcaagtgttggaactccaacacacacttgaagatctctctgcaagagtagatgcagttaaggaagaaaatctgaagctaaaatcagaaaaccaagttcttggacaatatatagaaaatctcatgtcagcttctagtgtttttcaaacaactgacacaaaaagcaaaagaaagtaagggattgacacccttctgttttatggaattgctgctgatcattttttctttaaaacttggatagattccaaaagttacagtacctttgtggcttcattgaatatttatgaagataatgtcagatgtagacaaaaataacacaataacaggagacttccataagtttgtgtattatgttagtctatgaaaacgtgcaaatgtattgtagagactttatgattagaattgcatatatttatgaaacttaaagatgaatgttttattgaatttgtaggtttagcactgtcttttattataggattagtaagatatacaagaaaataaccaccgtgttgtgaaaaagtgaccaaaatcatgtactaaatgcacagctttatgtaccctgtccaccatcttgtgcctcttctccatttgcctcttccttcctatttcccttccgctaaggaaaaaaattggtgtcacatttgtaaaagtaattttaatagttaatcatctctgagagtaacctgtattttaattgttgaaacttaaccaaaataagatactgtctcagctagggcttgtcatttgtgtatttagtgttaagataggaatgctagtgtctctttaattaattggaaatagatggaggctaaaaatgaaggtttttctttgaaactgaattaacttgggaatatttgttgttaaaaacttctttttgcccaaaataactcattttgtattatctgaaaatatataatttctggtcatgtgtatgttaaaatagaaaattttgaggaaaaatggaaatagggtggaaaagtactcggtaaacagtagtaaccaaatattttcactccagatttgtgttttctctggcacagagtagatcttttgggaaatatatatgaaagtggattaagtttgactacccttatgttagccacatctggatgagaacagttacaaagagtttggtctctaagttgatttgtacccagtgggtcaacttctgcaaaattccgtaatggtgtattagtattagaatagtgaataaaatgggaaagttatacatgtatacttattatcttgctcagtattttatctcacttgttctagaattttctgtaaaccctgctactgggtttgaagagttttagtcatcctttaacaatttttaaaaatttagcttctagattccatttggtaaggaaatcaatattggaagtattgctaaaatcttataatatggaaagaaatccccaaaggacgccaaggattaacatcggggcttcaagcatggccttaagatagggggacgaagtgagaatgactcagncggctgagatctaaacgccaccgcaaccgtggctccccggtagcacacacagacaagcggcggacccaccacgacgcaccgctataaccacc

SEQ ID NO: 281664 - DNA, 1698 bp, Homo sapiens
gggattcttctcacggcgcacgttctgtgggcggagtgggcggagctgccggggtcagttggtccaagtgtcccggcctgaggtgtcggccggatccctccttctcccggcgcctcaagcggaagaccattcctcaagaattttgtatccaaggcccaaaagtttgttacccaagatgatgaatgctgacatggatgcagttgatgctgaaaatcaagtggaactggaggaaaaaacaagacttattaatcaagtgttggaactccaacacacacttgaagatctctctgcaagagtagatgcagttaaggaagaaaatctgaagctaaaatcagaaaaccaagttcttggacaatatatagaaaatctcatgtcagcttctagtgtttttcaaacaactgacacaaaaagcaaaagaaagtaagggattgacacccttctgttttatggaattgctgctgatcattttttctttaaaacttggatagattccaaaagttacagtacctttgtggcttcattgaatatttatgaagataatgtcagatgtagacaaaaataacacaataacaggagacttccataagtttgtgtattatgttagtctatgaaaacgtgcaaatgtattgtagagactttatgattagaattgcatatatttatgaaacttaaagatgaatgttttattgaatttgtaggtttagcactgtcttttattataggattagtaagatatacaagaaaataaccaccgtgttgtgaaaaagtgaccaaaatcatgtactaaatgcacagctttatgtaccctgtccaccatcttgtgcctcttctccatttgcctcttccttcctatttcccttccgctaaggaaaaaaattggtgtcacatttgtaaaagtaattttaatagttaatcatctctgagagtaacctgtattttaattgttgaaacttaaccaaaataagatactgtctcagctagggcttgtcatttgtgtatttagtgttaagataggaatgctagtgtctctttaattaattggaaatagatggaggctaaaaatgaaggtttttctttgaaactgaattaacttgggaatatttgttgttaaaaacttctttttgcccaaaataactcattttgtattatctgaaaatatataatttctggtcatgtgtatgttaaaatagaaaattttgaggaaaaatggaaatagggtggaaaagtactcggtaaacagtagtaaccaaatattttcactccagatttgtgttttctctggcacagagtagatcttttgggaaatatatatgaaagtggattaagtttgactacccttatgttagccacatctggatgagaacagttacaaagagtttggtctctaagttgatttgtacccagtgggtcaacttctgcaaaattccgtaatggtgtattagtattagaatagtgaataaaatgggaaagttatacatgtatacttattatcttgctcagtattttatctcacttgttctagaattttctgtaaaccctgctactgggtttgaagagttttagtcatcctttaacaatttttaaaaatttagcttctagattccatttggtagcgcattactaatggagggtttcttctttttttttgagatcccccttcttggtaacgcatttgattccgcccctagggaacgggcc

SEQ ID NO: 281665 - DNA, 1863 bp, Homo sapiens
tccggttaagaatgcaacactcaggtctgaaaattgaacaagatggacgggtccaggaaagaggaggaggaagacagcacattcaccaacatttctcttgcagatgacatagaccattcctcaagaattttgtatccaaggcccaaaagtttgttacccaagatgatgaatgctgacatggatgcagttgatgctgaaaatcaagtggaactggaggaaaaaacaagacttattaatcaagtgttggaactccaacacacacttgaagatctctctgcaagagtagatgcagttaaggaagaaaatctgaagctaaaatcagaaaaccaagttcttggacaatatatagaaaatctcatgtcagcttctagtgtttttcaaacaactgacacaaaaagcaaaagaaagtaagggattgacacccttctgttttatggaattgctgctgatcattttttctttaaaacttggatagattccaaaagttacagtacctttgtggcttcattgaatatttatgaagataatgtcagatgtagacaaaaataacacaataacaggagacttccataagtttgtgtattatgttagtctatgaaaacgtgcaaatgtattgtagagactttatgattagaattgcatatatttatgaaacttaaagatgaatgttttattgaatttgtaggtttagcactgtcttttattataggattagtaagatatacaagaaaataaccaccgtgttgtgaaaaagtgaccaaaatcatgtactaaatgcacagctttatgtaccctgtccaccatcttgtgcctcttctccatttgcctcttccttcctatttcccttccgctaaggaaaaaaattggtgtcacatttgtaaaagtaattttaatagttaatcatctctgagagtaacctgtattttaattgttgaaacttaaccaaaataagatactgtctcagctagggcttgtcatttgtgtatttagtgttaagataggaatgctagtgtctctttaattaattggaaatagatggaggctaaaaatgaaggtttttctttgaaactgaattaacttgggaatatttgttgttaaaaacttctttttgcccaaaataactcattttgtattatctgaaaatatataatttctggtcatgtgtatgttaaaatagaaaattttgaggaaaaatggaaatagggtggaaaagtactcggtaaacagtagtaaccaaatattttcactccagatttgtgttttctctggcacagagtagatcttttgggaaatatatatgaaagtggattaagtttgactacccttatgttagccacatctggatgagaacagttacaaagagtttggtctctaagttgatttgtacccagtgggtcaacttctgcaaaattccgtaatggtgtattagtattagaatagtgaataaaatgggaaagttatacatgtatacttattatcttgctcagtattttatctcacttgttctagaattttctgtaaaccctgctactgggtttgaagagttttagtcatcctttaacaatttttaaaaatttagcttctagattccatttggtaaggaaatcaatattggaagtattgctaaaatcttataatatgaaaagagatccactaatgtagcttaaggttattagatttgggcttttaatcatggaataatcttatgtattggtgtaagagttgatgaatgactttagctgtgtgaatatataatagtcaaactgcaaacattttgcatcccttttgtgacctaatttacagacatttaaattgtgttgcagttctgctttgccgtttaataaaaagctatttcagaggttg

SEQ ID NO: 281666 - DNA, 3409 bp, Homo sapiens
cccgtttacagatttcattacagatggacactgtttcaaggtgcactggcatgcactgtctaaaacggtttcatgctgtaccccagaaggcattcagtttcacagtggagggctgtattgagttggtattctggatgatacaatttttagggctagaaagtttagagtgttggctggctcacaggctgcaaaggaaataatggtggagtccagaccacagcagtaatttcaattactaacacaaagaaacccattgtctgcaataatgaatataactgcagtgtcttgttttgttttaaattcttgtgtgcgatgaagggggcgaatctatcagacaacctatcaattgggctgatgatgtcagtgttccagtggcttctaacaggcgttaatacctgttggaaatggattatcattggctgggacgattgatccacagaccagcatggctgccactgctgctgtgagtcccagtgactacctgcagcctgccgcctccaccacccaggactcccagccatctcccttagccctgcttgctgcaacatgtagcaaaattggccctccagcagttgaagctgctgtgacacctcctgctcccccacagcccacaccgcggaaacttgtccctatcaaacctgcccctctccctctcagccccggcaagaatagctttggaatcttgtcctccaaaggaaatatacttcagattcaggggtcacaactgagcgcctcctatcctggagggcagctggtgttcgctatccagaatcccaccatgatcaacaaagggacccgatcaaatgccaatatccagtaccaggcggtccctcagattcaggcaagcaattcccaaaccatccaagtacagcccaatctcaccaaccagatccagatcatccctggcaccaaccaagccatcatcaccccctcaccgtccagtcacaagcctgtccccatcaagccagcccccatccagaagtcgagtacgaccaccacccccgtgcagagcggggccaatgtggtgaagttgacaggtgggggcggcaatgtgacgctcactctgcccgtcaacaaccttgtgaacgccagtgacaccggggcccctactcagctcctcactgaaagccccccaaccccgctgtctaagactaacaagaaagcaaggaagaagagccttcctgcctcccagccccctgtggctgtggctgagcaggtggagacggtgctgatcgagaccaccgcggacaacatcatccaggcaggaaataacctgctcattgttcagagccctggtgggggccagccagctgtggtccagcaggtccaggtggtgccccccaaggccgagcagcagcaggtggtacagatcccccagcaggctctgcgggtggtgcaggcggcatctgccaccctccccactgtaccccagaagccctcccagaactttcagatccaggcagctgagccgacacctactcaggtctacatccgcacgccttccggtgaggtgcagacagtccttgtccaggacagccccccagcaacagctgcagccacctctaacaccacctgtagcagccctgcatcccgtgctccccatctgagtgggaccagcaaaaagcactcagctgcaattctccgaaaagagcgtcccctgccaaagattgccccagccgggagcatcatcagcctgaatgcagcccagttggcggcagctgcccaggcaatgcagaccatcaacatcaatggtgtccaggtccagggcgtgcctgtcaccatcaccaacacaggcgggcagcagcagctgacagtgcagaatgtttctgggaacaacctgaccatcagtgggctgagccccacccagatccagctgcaaatggaacaagccctggccggagagacccagcccggggagaagcggcgccgcatggcctgcacgtgtcccaactgcaaggatggggagaagaggtctggagagcagggcaagaagaagcacgtttgccacatccccgactgtggcaagacgttccgtaagacgtccttgctgcgtgcccatgtgcgcctgcacactggcgagcggccctttgtctgcaactggttcttctgtgggaagaggttcacacggagtgacgagctccaacggcatgctcgcacccacacaggggacaaacgcttcgagtgcgcccagtgtcagaagcgcttcatgaggagtgaccacctcaccaagcattacaagacccacctggtcacgaagaacttgtaaggccaactgcggcgggaggccctgaagatgcagtcccccacctgtgtcctccctgggcccctggtggaaaggagccctgtggctgccttgggcctgccctcagccccactcctgttctgcaactgtccccacaggaaggggctctgttccctgtattgtcctccttctgaagccccttggctctgccttggcccttcccctcaccacgagctcccggcctgcccagactgtggacactggccgtgcccaatgagacgttctaaaccaggacgcgtgggaacccttatttccaaaggaaaaacatgcatttcactccgtcgaggagcaaagtgagcccctaccccccaccccgatccccgctcccaacactgccggagtcgcgtcatgccatgccccctctcctgcacctccctggccctgccggccactgtggacgccctggggcttggcacccacctctggagaaactcggggccacctccactccatgtgcccagccccgccacaacctctcctccagcacattccagctctatttaaaaagtaaagacacccaccgactcctgatccccctctttttctatggagaacgttgccttatactctctacttcagatgatgaacactgtgtactgtgtgtgctttaaagaagttttatttaattgctcccttcttcctttccttgttattcacctccctgatgcctgctttcagttgagggttgggggcaatgatgagcatatgaattttttctcactctagcaattcccttttctaaatgacacagcatttaaactcaaatctggattcagataacagcacctgcacatcctgcacctcctccctctcccttcacctcacccctgcccggcccaagctctacttgtgtacagtgtatattgtataatagacaattgtgtctactacatgtttaaaaacacattgcttgttatttttgaggcttttaaattaaacaaaaatccaactttatttttagttgtaactgcttgaggtatgttttatgaattaagtgacagatttgttatcctttattaacgtactttgttggtcagcactgggctgacaaaaattttttcttgctaataaatttagttgcctgaggcaaaatcttcaaaatagcag

SEQ ID NO: 281667 - DNA, 454 bp, Homo sapiens
gctcagaggtctctcttcctgttacgtgctctccccaagtcaggcctagaaagacccgtgggaccagggacacactccccagccctgtgttgaatgggaccagtgcccgaagggtgccccggagtatgcactggcaggtagcagggtcaccctccctctcccttcacctcacccctgcccggcccaagctctacttgtgtacagtgtatattgtataatagacaattgtgtctactacatgtttaaaaacacattgcttgttatttttgaggcttttaaattaaacaaaaatccaactttatttttagttgtaactgcttgaggtatgttttatgaattaagtgacagatttgttatcctttattaacgtactttgttggtcagcactgggctgacaaaaattttttcttgctaataaatttagttgcctgaggcaaaatcttcaaaatagcag

SEQ ID NO: 281668 - DNA, 1009 bp, Homo sapiens
  misc_feature (776)..(776): n is a, c, g, or t
  misc_feature (1009)..(1009): n is a, c, g, or t
ggattggcggttgcttggcgggcggtgtcaggctctcggtggcggcggaggcggcggaggccagggaggaagatgtcgtaatgagcgggggcgaatctatcagacaacctatcaattgggctgatgatgtcagtgttccagtggcttctaacaggcgttaatacctgttggaaatggattatcattggctgggacgattgatccacagaccagcatggctgccactgctgctgtgagtcccagtgactacctgcagcctgccgcctccaccacccaggactcccagccatgctccgcttaagccctaggcttgctggcaacagtagtaggcgagaatggataggccctaccatgcaggtagatatcgggctggtagaactgcgcaccgatcactccccacagtcccgacaccgacaggaagagtagatactccgaagacgaaatcgagccgccggcgacgcgcaacgcatgccgccgggcaataagaatcggaggatgaggacggatgaccacgcgaattaaaaatcaaacgacaacacgactatcgatatagacatcggacgagatccacctacctaataccgagaagaaaccttgattgtgattcggctaaaggcattaattcccgaccaagaaagacaagcgaatttagggccctattgcagaagaagccaataatccaattgtcgaaagcgggtcccaactatagaccagtatcaaacgggtggcccagaaagcaatggcccaggagatacagagcccaaatacgactgccnaaagccaagtaatacacaaaacgctatgcgcccgaaaccagacccaaatccagaagggcccaaacaaggcaccgccgtaaacaaccaaggacctaagaccacaaaaatcgcgagagaccccgaaaaccagaggcctaataccccccaaacccgagtaaaaaactaacaaaacttaacagaacaggctccccatggaacaagtatatcgagaagatcaaaaatagggagagacn

SEQ ID NO: 281669 - DNA, 3380 bp, Homo sapiens
gggggccggcgagaggagcgggcaccggggtggcctggcacccctcggacgggtgccgacccacttcaacgccgctctcccgcctgggcgaactatgcctgggtcggctctgaggaggcagccaacagcccttgtgttcgccccgtgtctgagaggccttcctgcactcttaactgtagatgcccaccagcgattcagggctccccggagaacagagaggggcgagggaacgcttgagacccggacgctgccaaccagatgggcactgctcggcatcgacgacagcccgggggcgaatctatcagacaacctatcaattgggctgatgatgtcagtgttccagtggcttctaacaggcgttaatacctgttggaaatggattatcattggctgggacgattgatccacagaccagcatggctgccactgctgctgtgagtcccagtgactacctgcagcctgccgcctccaccacccaggactcccagccatctcccttagccctgcttgctgcaacatgtagcaaaattggccctccagcagttgaagctgctgtgacacctcctgctcccccacagcccacaccgcggaaacttgtccctatcaaacctgcccctctccctctcagccccggcaagaatagctttggaatcttgtcctccaaaggaaatatacttcagattcaggggtcacaactgagcgcctcctatcctggagggcagctggtgttcgctatccagaatcccaccatgatcaacaaagggacccgatcaaatgccaatatccagtaccaggcggtccctcagattcaggcaagcaattcccaaaccatccaagtacagcccaatctcaccaaccagatccagatcatccctggcaccaaccaagccatcatcaccccctcaccgtccagtcacaagcctgtccccatcaagccagcccccatccagaagtcgagtacgaccaccacccccgtgcagagcggggccaatgtggtgaagttgacaggtgggggcggcaatgtgacgctcactctgcccgtcaacaaccttgtgaacgccagtgacaccggggcccctactcagctcctcactgaaagccccccaaccccgctgtctaagactaacaagaaagcaaggaagaagagccttcctgcctcccagccccctgtggctgtggctgagcaggtggagacggtgctgatcgagaccaccgcggacaacatcatccaggcaggaaataacctgctcattgttcagagccctggtgggggccagccagctgtggtccagcaggtccaggtggtgccccccaaggccgagcagcagcaggtggtacagatcccccagcaggctctgcgggtggtgcaggcggcatctgccaccctccccactgtaccccagaagccctcccagaactttcagatccaggcagctgagccgacacctactcaggtctacatccgcacgccttccggtgaggtgcagacagtccttgtccaggacagccccccagcaacagctgcagccacctctaacaccacctgtagcagccctgcatcccgtgctccccatctgagtgggaccagcaaaaagcactcagctgcaattctccgaaaagagcgtcccctgccaaagattgccccagccgggagcatcatcagcctgaatgcagcccagttggcggcagctgcccaggcaatgcagaccatcaacatcaatggtgtccaggtccagggcgtgcctgtcaccatcaccaacacaggcgggcagcagcagctgacagtgcagaatgtttctgggaacaacctgaccatcagtgggctgagccccacccagatccagctgcaaatggaacaagccctggccggagagacccagcccggggagaagcggcgccgcatggcctgcacgtgtcccaactgcaaggatggggagaagaggtctggagagcagggcaagaagaagcacgtttgccacatccccgactgtggcaagacgttccgtaagacgtccttgctgcgtgcccatgtgcgcctgcacactggcgagcggccctttgtctgcaactggttcttctgtgggaagaggttcacacggagtgacgagctccaacggcatgctcgcacccacacaggggacaaacgcttcgagtgcgcccagtgtcagaagcgcttcatgaggagtgaccacctcaccaagcattacaagacccacctggtcacgaagaacttgtaaggccaactgcggcgggaggccctgaagatgcagtcccccacctgtgtcctccctgggcccctggtggaaaggagccctgtggctgccttgggcctgccctcagccccactcctgttctgcaactgtccccacaggaaggggctctgttccctgtattgtcctccttctgaagccccttggctctgccttggcccttcccctcaccacgagctcccggcctgcccagactgtggacactggccgtgcccaatgagacgttctaaaccaggacgcgtgggaacccttatttccaaaggaaaaacatgcatttcactccgtcgaggagcaaagtgagcccctaccccccaccccgatccccgctcccaacactgccggagtcgcgtcatgccatgccccctctcctgcacctccctggccctgccggccactgtggacgccctggggcttggcacccacctctggagaaactcggggccacctccactccatgtgcccagccccgccacaacctctcctccagcacattccagctctatttaaaaagtaaagacacccaccgactcctgatccccctctttttctatggagaacgttgccttatactctctacttcagatgatgaacactgtgtactgtgtgtgctttaaagaagttttatttaattgctcccttcttcctttccttgttattcacctccctgatgcctgctttcagttgagggttgggggcaatgatgagcatatgaattttttctcactctagcaattcccttttctaaatgacacagcatttaaactcaaatctggattcagataacagcacctgcacatcctgcacctcctccctctcccttcacctcacccctgcccggcccaagctctacttgtgtacagtgtatattgtataatagacaattgtgtctactacatgtttaaaaacacattgcttgttatttttgaggcttttaaattaaacaaaaatccaactttatttttagttgtaactgcttgaggtatgttttatgaattaagtgacagatttgttatcctttattaacgtactttgttggtcagcactgggctgacaaaaattttttcttgctaataaatttagttgcctgaggcaaaatcttcaaaatagcag

SEQ ID NO: 281670 - DNA, 4021 bp, Homo sapiens
tgggattacaggtgcgcaccaccacacccagctaatttttgtagttttagtagagatggggtttccccatgttggccaggctggtctcgaattcctgagctcaagtgatctgcccgcctcggcctcccaaagtgctgggattataggtgtgatccaccgcgcccggccatgaataaaaatcttaaagatcatttggtccaacttcccaccccatctcaacatcctgactccagcagggacacatgtcctgcctctggttaagtgattccagagaagggagaacatagtacctcagaaggcaactgattttcatcttttcaaagttctctcttgtgttaactaaaatctgcctcaaaatgtccacacaggagtcttggttctaccctttgaacccatgtccccactctggcaccctgaccacaaccattgctgctgtcttctgaacaagctccagctgaaaatcccccttttaaaatgtccctcagaacagaacctgatgctccagatgtggcccaagtgtgtaaactacaggaggatattatttttttgttctatgactgaacttttagaaatgcaatccaaaattgcagtagcctttttggcagccatatctagattgtgctggcccccattcagcttaaagtcaaaacctctggggcttttccacatggcactattaggctctttctgccctatatgcatgtgattggttttttaacctaagtggaggacttatttttttaatatacagacaaggtttcaccatgttgcccaggctgggctcaaacacctgagctcaagtgatctgctcacattgcccttccaaagtgctgggattacaggcttgagccactgcacctggccaggacttattaaactttaaagccatatatgcctttaaaccctcgatgcagtgatataaattattagagcctcacagaaatcctagaaggatgacattacctttgttttacagagggcactaggaggaggctaagagggaccatcccactaatgaaccacacagtcagaatctcatttagatccacagaccagcatggctgccactgctgctgtgagtcccagtgactacctgcagcctgccgcctccaccacccaggactcccagccatctcccttagccctgcttgctgcaacatgtagcaaaattggccctccagcagttgaagctgctgtgacacctcctgctcccccacagcccacaccgcggaaacttgtccctatcaaacctgcccctctccctctcagccccggcaagaatagctttggaatcttgtcctccaaaggaaatatacttcagattcaggggtcacaactgagcgcctcctatcctggagggcagctggtgttcgctatccagaatcccaccatgatcaacaaagggacccgatcaaatgccaatatccagtaccaggcggtccctcagattcaggcaagcaattcccaaaccatccaagtacagcccaatctcaccaaccagatccagatcatccctggcaccaaccaagccatcatcaccccctcaccgtccagtcacaagcctgtccccatcaagccagcccccatccagaagtcgagtacgaccaccacccccgtgcagagcggggccaatgtggtgaagttgacaggtgggggcggcaatgtgacgctcactctgcccgtcaacaaccttgtgaacgccagtgacaccggggcccctactcagctcctcactgaaagccccccaaccccgctgtctaagactaacaagaaagcaaggaagaagagccttcctgcctcccagccccctgtggctgtggctgagcaggtggagacggtgctgatcgagaccaccgcggacaacatcatccaggcaggaaataacctgctcattgttcagagccctggtgggggccagccagctgtggtccagcaggtccaggtggtgccccccaaggccgagcagcagcaggtggtacagatcccccagcaggctctgcgggtggtgcaggcggcatctgccaccctccccactgtaccccagaagccctcccagaactttcagatccaggcagctgagccgacacctactcaggtctacatccgcacgccttccggtgaggtgcagacagtccttgtccaggacagccccccagcaacagctgcagccacctctaacaccacctgtagcagccctgcatcccgtgctccccatctgagtgggaccagcaaaaagcactcagctgcaattctccgaaaagagcgtcccctgccaaagattgccccagccgggagcatcatcagcctgaatgcagcccagttggcggcagctgcccaggcaatgcagaccatcaacatcaatggtgtccaggtccagggcgtgcctgtcaccatcaccaacacaggcgggcagcagcagctgacagtgcagaatgtttctgggaacaacctgaccatcagtgggctgagccccacccagatccagctgcaaatggaacaagccctggccggagagacccagcccggggagaagcggcgccgcatggcctgcacgtgtcccaactgcaaggatggggagaagaggtctggagagcagggcaagaagaagcacgtttgccacatccccgactgtggcaagacgttccgtaagacgtccttgctgcgtgcccatgtgcgcctgcacactggcgagcggccctttgtctgcaactggttcttctgtgggaagaggttcacacggagtgacgagctccaacggcatgctcgcacccacacaggggacaaacgcttcgagtgcgcccagtgtcagaagcgcttcatgaggagtgaccacctcaccaagcattacaagacccacctggtcacgaagaacttgtaaggccaactgcggcgggaggccctgaagatgcagtcccccacctgtgtcctccctgggcccctggtggaaaggagccctgtggctgccttgggcctgccctcagccccactcctgttctgcaactgtccccacaggaaggggctctgttccctgtattgtcctccttctgaagccccttggctctgccttggcccttcccctcaccacgagctcccggcctgcccagactgtggacactggccgtgcccaatgagacgttctaaaccaggacgcgtgggaacccttatttccaaaggaaaaacatgcatttcactccgtcgaggagcaaagtgagcccctaccccccaccccgatccccgctcccaacactgccggagtcgcgtcatgccatgccccctctcctgcacctccctggccctgccggccactgtggacgccctggggcttggcacccacctctggagaaactcggggccacctccactccatgtgcccagccccgccacaacctctcctccagcacattccagctctatttaaaaagtaaagacacccaccgactcctgatccccctctttttctatggagaacgttgccttatactctctacttcagatgatgaacactgtgtactgtgtgtgctttaaagaagttttatttaattgctcccttcttcctttccttgttattcacctccctgatgcctgctttcagttgagggttgggggcaatgatgagcatatgaattttttctcactctagcaattcccttttctaaatgacacagcatttaaactcaaatctggattcagataacagcacctgcacatcctgcacctcctccctctcccttcacctcacccctgcccggcccaagctctacttgtgtacagtgtatattgtataatagacaattgtgtctactacatgtttaaaaacacattgcttgttatttttgaggcttttaaattaaacaaaaatccaactttatttttagttgtaactgcttgaggtatgttttatgaattaagtgacagatttgttatcctttattaacgtactttgttggtcagcactgggctgacaaaaattttttcttgctaataaatttagttgcctgaggcaaaatcttcaaaatagcag

SEQ ID NO: 281671 - DNA, 3170 bp, Homo sapiens
ggataagcggatagggtcagccagctgtggtccagcaggtcaggtggtgcccccaaggccgagcagcagcaggtggtacagatcccccagcaggctctgcgggtggtgcaggcggcatctgccaccctccccactgtaccccagaagcctcccagaactttcagatccaggcagctgagccgacacctactcatccacagaccagcatggctgccactgctgctgtgagtcccagtgactacctgcagcctgccgcctccaccacccaggactcccagccatctcccttagccctgcttgctgcaacatgtagcaaaattggccctccagcagttgaagctgctgtgacacctcctgctcccccacagcccacaccgcggaaacttgtccctatcaaacctgcccctctccctctcagccccggcaagaatagctttggaatcttgtcctccaaaggaaatatacttcagattcaggggtcacaactgagcgcctcctatcctggagggcagctggtgttcgctatccagaatcccaccatgatcaacaaagggacccgatcaaatgccaatatccagtaccaggcggtccctcagattcaggcaagcaattcccaaaccatccaagtacagcccaatctcaccaaccagatccagatcatccctggcaccaaccaagccatcatcaccccctcaccgtccagtcacaagcctgtccccatcaagccagcccccatccagaagtcgagtacgaccaccacccccgtgcagagcggggccaatgtggtgaagttgacaggtgggggcggcaatgtgacgctcactctgcccgtcaacaaccttgtgaacgccagtgacaccggggcccctactcagctcctcactgaaagccccccaaccccgctgtctaagactaacaagaaagcaaggaagaagagccttcctgcctcccagccccctgtggctgtggctgagcaggtggagacggtgctgatcgagaccaccgcggacaacatcatccaggcaggaaataacctgctcattgttcagagccctggtgggggccagccagctgtggtccagcaggtccaggtggtgccccccaaggccgagcagcagcaggtggtacagatcccccagcaggctctgcgggtggtgcaggcggcatctgccaccctccccactgtaccccagaagccctcccagaactttcagatccaggcagctgagccgacacctactcaggtctacatccgcacgccttccggtgaggtgcagacagtccttgtccaggacagccccccagcaacagctgcagccacctctaacaccacctgtagcagccctgcatcccgtgctccccatctgagtgggaccagcaaaaagcactcagctgcaattctccgaaaagagcgtcccctgccaaagattgccccagccgggagcatcatcagcctgaatgcagcccagttggcggcagctgcccaggcaatgcagaccatcaacatcaatggtgtccaggtccagggcgtgcctgtcaccatcaccaacacaggcgggcagcagcagctgacagtgcagaatgtttctgggaacaacctgaccatcagtgggctgagccccacccagatccagctgcaaatggaacaagccctggccggagagacccagcccggggagaagcggcgccgcatggcctgcacgtgtcccaactgcaaggatggggagaagaggtctggagagcagggcaagaagaagcacgtttgccacatccccgactgtggcaagacgttccgtaagacgtccttgctgcgtgcccatgtgcgcctgcacactggcgagcggccctttgtctgcaactggttcttctgtgggaagaggttcacacggagtgacgagctccaacggcatgctcgcacccacacaggggacaaacgcttcgagtgcgcccagtgtcagaagcgcttcatgaggagtgaccacctcaccaagcattacaagacccacctggtcacgaagaacttgtaaggccaactgcggcgggaggccctgaagatgcagtcccccacctgtgtcctccctgggcccctggtggaaaggagccctgtggctgccttgggcctgccctcagccccactcctgttctgcaactgtccccacaggaaggggctctgttccctgtattgtcctccttctgaagccccttggctctgccttggcccttcccctcaccacgagctcccggcctgcccagactgtggacactggccgtgcccaatgagacgttctaaaccaggacgcgtgggaacccttatttccaaaggaaaaacatgcatttcactccgtcgaggagcaaagtgagcccctaccccccaccccgatccccgctcccaacactgccggagtcgcgtcatgccatgccccctctcctgcacctccctggccctgccggccactgtggacgccctggggcttggcacccacctctggagaaactcggggccacctccactccatgtgcccagccccgccacaacctctcctccagcacattccagctctatttaaaaagtaaagacacccaccgactcctgatccccctctttttctatggagaacgttgccttatactctctacttcagatgatgaacactgtgtactgtgtgtgctttaaagaagttttatttaattgctcccttcttcctttccttgttattcacctccctgatgcctgctttcagttgagggttgggggcaatgatgagcatatgaattttttctcactctagcaattcccttttctaaatgacacagcatttaaactcaaatctggattcagataacagcacctgcacatcctgcacctcctccctctcccttcacctcacccctgcccggcccaagctctacttgtgtacagtgtatattgtataatagacaattgtgtctactacatgtttaaaaacacattgcttgttatttttgaggcttttaaattaaacaaaaatccaactttatttttagttgtaactgcttgaggtatgttttatgaattaagtgacagatttgttatcctttattaacgtactttgttggtcagcactgggctgacaaaaattttttcttgctaataaatttagttgcctgaggcaaaatcttcaaaatagcag

SEQ ID NO: 281672 - DNA, 1230 bp, Homo sapiens
ggattggcggttgcttggcgggcggtgtcaggctctcggtggcggcggaggcggcggaggccagggaggaagatgtcgtaatgagcgatccacagaccagcatggctgccactgctgctgtgagtcccagtgactacctgcagcctgccgcctccaccacccaggactcccagccatctcccttagccctgcttgctgcaacatgtagcaaaattggccctccagcagttgaagctgctgtgacacctcctgctcccccacagcccacaccgcggaaacttgtccctatcaaacctgcccctctccctctcagccccggcaagaatagctttggaatcttgtcctccaaaggaaatatacttcagattcaggggtcacaactgagcgcctcctatcctggagggcagctggtgttcgctatccagaatcccaccatgatcaacaaagggacccgatcaaatgccaatatccagtaccaggcggtccctcagattcaggcaagcaattcccaaaccatccaagtacagcccaatctcaccaaccagatccagatcatccctggcaccaaccaagccatcatcaccccctcaccgtccagtcacaagcctgtccccatcaagccagcccccatccagaagtcgagtacgaccaccacccccgtgcagagcggggccaatgtggtgaagttgacaggtgggggcggcaatgtgacgctcactctgcccgtcaacaaccttgtgaacgccagtgacaccggggcccctactcagctcctcactgcttcctgccaaactgggatgctgaattcaacaagaatgttcttatttttggcatttattaatgtgctctaatactctggaatctctttggctctgtgaggcaagttttattctttgttcatgcctgctaagtgccagtaattgtgcccatgttgcagatggataacccagaactcagataatttatgaagtatccaagatcaaatagggcataaatgacaggaaccaggagtcaattgagatttgtaacttcagaccccacactcttccatcttccaccttgactcttgtgtcttatgtgtagcaggtgctaccattaaaattgaggagtttttttttttttaatataaaaaacagttcccactctcagtcattcggttcttcctctatagacaactaggtcatacattcctcgatggcaggaactgttttttatattaaaaaaaaaaaa

SEQ ID NO: 281673 - DNA, 1860 bp, Homo sapiens
ggattggcggttgcttggcgggcggtgtcaggctctcggtggcggcggaggcggcggaggccagggaggaagatgtcgtaatgagcgatccacagaccagcatggctgccactgctgctgtgagtcccagtgactacctgcagcctgccgcctccaccacccaggactcccagccatctcccttagccctgcttgctgcaacatgtagcaaaattggccctccagcagttgaagctgctgtgacacctcctgctcccccacagcccacaccgcggaaacttgtccctatcaaacctgcccctctccctctcagccccggcaagaatagctttggaatcttgtcctccaaaggaaatatacttcagattcaggggtcacaactgagcgcctcctatcctggagggcagctggtgttcgctatccagaatcccaccatgatcaacaaagggacccgatcaaatgccaatatccagtaccaggcggtccctcagattcaggcaagcaattcccaaaccatccaagtacagcccaatctcaccaaccagatccagatcatccctggcaccaaccaagccatcatcaccccctcaccgtccagtcacaagcctgtccccatcaagccagcccccatccagaagtcgagtacgaccaccacccccgtgcagagcggggccaatgtggtgaagttgacaggtgggggcggcaatgtgacgctcactctgcccgtcaacaaccttgtgaacgccagtgacaccggggcccctactcagctcctcactgcttcctgccaaactgggatgctgaattcaacaagaatgttcttatttttggcatttattaatgtgctctaatactctggaatctctttggctctgtgaggcaagttttattctttgttcatgcctgctaagtgccagtaattgtgcccatgttgcagatggataacccagaactcagataatttatgaagtatccaagatcaaatagggcataaatgacaggaaccaggagtcaattgagatttgtaacttcagaccccacactcttccatcttccaccttgactcttgtgtcttatgtgtagcaggtgctaccattaaaattgaggagtttttttttttttaatataaaaaacagttcctgccatcgaggaatgtatgacctagttgtctatagaggaagaaccgaatgactgagagtgggaagttgtgtaatttcctgggtggagaagagagcctttgaatttgaactgtggacatagaaatcacacaggaattcacccttctggcatatttaatgttgccaggtattttttataagtcatttatcacaatatctgtgaattcccatgatcagacctaccctacaggtgatattttatgttgccaggtgattttttataagtcatctatcacaaatatctgtgaattcccatgatcagacctaccttacaggtgaagaattgtggcacctgctcaggagcacatcctcggcattgcctcccctcccttccatgaggtcccatttcttgaggttgatggagacaggactaaaacccaggtcttccctaaggaaataatgatacatatgcagaaagatttagctacagtattattttttcatgactacacagctttataacatcccaacatgctgattattatacaactgataccttgttaactgtatatatctaggctgtttccaatcttacagctaaataaatccctgaaagtgggtcaaggacacgtacatttttaaaaaatttgtattctatattagaggtttgcagtctgtgaccaactttgaagccaaatctagcccacctgcctgtttttgtaaataaagtttaattggagtg

SEQ ID NO: 281674 - DNA, 363 bp, Homo sapiens
ggattggcggttgcttggcgggcggtgtcaggctctcggtggcggcggaggcggcggaggccagggaggaagatgtcgtaatgagcgagggcactaggaggaggctaagagggaccatcccactaatgaaccacacagtcagaatctcatttagatccacagaccagcatggctgccactgctgctgtgagtcccagtgactacctgcagcctgccgcctccaccacccaggactcccagccatctcccttagccctgcttgctgcaacatgtagcaaaattggccctccagcagttgaagctgctgtgacacctcctgctcccccacagcccacaccgcgatttctgaagaagggtcgtgaa

SEQ ID NO: 281675 - DNA, 3045 bp, Homo sapiens
  misc_feature (32)..(32): n is a, c, g, or t
  misc_feature (39)..(39): n is a, c, g, or t
agcagctggtcccggtcggagaagtatgaggnatcggangccagggaggaagatgtcgtaatgagcgatccacagaccagcatggctgccactgctgctgtgagtcccagtgactacctgcagcctgccgcctccaccacccaggactcccagccatctcccttagccctgcttgctgcaacatgtagcaaaattggccctccagcagttgaagctgctgtgacacctcctgctcccccacagcccacaccgcggaaacttgtccctatcaaacctgcccctctccctctcagccccggcaagaatagctttggaatcttgtcctccaaaggaaatatacttcagattcaggggtcacaactgagcgcctcctatcctggagggcagctggtgttcgctatccagaatcccaccatgatcaacaaagggacccgatcaaatgccaatatccagtaccaggcggtccctcagattcaggcaagcaattcccaaaccatccaagtacagcccaatctcaccaaccagatccagatcatccctggcaccaaccaagccatcatcaccccctcaccgtccagtcacaagcctgtccccatcaagccagcccccatccagaagtcgagtacgaccaccacccccgtgcagagcggggccaatgtggtgaagttgacaggtgggggcggcaatgtgacgctcactctgcccgtcaacaaccttgtgaacgccagtgacaccggggcccctactcagctcctcactgaaagccccccaaccccgctgtctaagactaacaagaaagcaaggaagaagagccttcctgcctcccagccccctgtggctgtggctgagcaggtggagacggtgctgatcgagaccaccgcggacaacatcatccaggcaggaaataacctgctcattgttcagagccctggtgggggccagccagctgtggtccagcaggtccaggtggtgccccccaaggccgagcagcagcaggtggtacagatcccccagcaggctctgcgggtggtgcaggcggcatctgccaccctccccactgtaccccagaagccctcccagaactttcagatccaggcagctgagccgacacctactcaggtctacatccgcacgccttccggtgaggtgcagacagtccttgtccaggacagccccccagcaacagctgcagccacctctaacaccacctgtagcagccctgcatcccgtgctccccatctgagtgggaccagcaaaaagcactcagctgcaattctccgaaaagagcgtcccctgccaaagattgccccagccgggagcatcatcagcctgaatgcagcccagttggcggcagctgcccaggcaatgcagaccatcaacatcaatggtgtccaggtccagggcgtgcctgtcaccatcaccaacacaggcgggcagcagcagctgacagtgcagaatgtttctgggaacaacctgaccatcagtgggctgagccccacccagatccagctgcaaatggaacaagccctggccggagagacccagcccggggagaagcggcgccgcatggcctgcacgtgtcccaactgcaaggatggggagaagaggtctggagagcagggcaagaagaagcacgtttgccacatccccgactgtggcaagacgttccgtaagacgtccttgctgcgtgcccatgtgcgcctgcacactggcgagcggccctttgtctgcaactggttcttctgtgggaagaggttcacacggagtgacgagctccaacggcatgctcgcacccacacaggggacaaacgcttcgagtgcgcccagtgtcagaagcgcttcatgaggagtgaccacctcaccaagcattacaagacccacctggtcacgaagaacttgtaaggccaactgcggcgggaggccctgaagatgcagtcccccacctgtgtcctccctgggcccctggtggaaaggagccctgtggctgccttgggcctgccctcagccccactcctgttctgcaactgtccccacaggaaggggctctgttccctgtattgtcctccttctgaagccccttggctctgccttggcccttcccctcaccacgagctcccggcctgcccagactgtggacactggccgtgcccaatgagacgttctaaaccaggacgcgtgggaacccttatttccaaaggaaaaacatgcatttcactccgtcgaggagcaaagtgagcccctaccccccaccccgatccccgctcccaacactgccggagtcgcgtcatgccatgccccctctcctgcacctccctggccctgccggccactgtggacgccctggggcttggcacccacctctggagaaactcggggccacctccactccatgtgcccagccccgccacaacctctcctccagcacattccagctctatttaaaaagtaaagacacccaccgactcctgatccccctctttttctatggagaacgttgccttatactctctacttcagatgatgaacactgtgtactgtgtgtgctttaaagaagttttatttaattgctcccttcttcctttccttgttattcacctccctgatgcctgctttcagttgagggttgggggcaatgatgagcatatgaattttttctcactctagcaattcccttttctaaatgacacagcatttaaactcaaatctggattcagataacagcacctgcacatcctgcacctcctccctctcccttcacctcacccctgcccggcccaagctctacttgtgtacagtgtatattgtataatagacaattgtgtctactacatgtttaaaaacacattgcttgttatttttgaggcttttaaattaaacaaaaatccaactttatttttagttgtaactgcttgaggtatgttttatgaattaagtgacagatttgttatcctttattaacgtactttgttggtcagcactgggctgacaaaaattttttcttgctaataaatttagttgcctgaggcaaaatcttcaaaatagcag

SEQ ID NO: 281676 - DNA, 3065 bp, Homo sapiens
ggattggcggttgcttggcgggcggtgtcaggctctcggtggcggcggaggcggcggaggccagggaggaagatgtcgtaatgagcgatccacagaccagcatggctgccactgctgctgtgagtcccagtgactacctgcagcctgccgcctccaccacccaggactcccagccatctcccttagccctgcttgctgcaacatgtagcaaaattggccctccagcagttgaagctgctgtgacacctcctgctcccccacagcccacaccgcggaaacttgtccctatcaaacctgcccctctccctctcagccccggcaagaatagctttggaatcttgtcctccaaaggaaatatacttcagattcaggggtcacaactgagcgcctcctatcctggagggcagctggtgttcgctatccagaatcccaccatgatcaacaaagggacccgatcaaatgccaatatccagtaccaggcggtccctcagattcaggcaagcaattcccaaaccatccaagtacagcccaatctcaccaaccagatccagatcatccctggcaccaaccaagccatcatcaccccctcaccgtccagtcacaagcctgtccccatcaagccagcccccatccagaagtcgagtacgaccaccacccccgtgcagagcggggccaatgtggtgaagttgacaggtgggggcggcaatgtgacgctcactctgcccgtcaacaaccttgtgaacgccagtgacaccggggcccctactcagctcctcactgaaagccccccaaccccgctgtctaagactaacaagaaagcaaggaagaagagccttcctgcctcccagccccctgtggctgtggctgagcaggtggagacggtgctgatcgagaccaccgcggacaacatcatccaggcaggaaataacctgctcattgttcagagccctggtgggggccagccagctgtggtccagcaggtccaggtggtgccccccaaggccgagcagcagcaggtggtacagatcccccagcaggctctgcgggtggtgcaggcggcatctgccaccctccccactgtaccccagaagccctcccagaactttcagatccaggcagctgagccgacacctactcaggtctacatccgcacgccttccggtgaggtgcagacagtccttgtccaggacagccccccagcaacagctgcagccacctctaacaccacctgtagcagccctgcatcccgtgctccccatctgagtgggaccagcaaaaagcactcagctgcaattctccgaaaagagcgtcccctgccaaagattgccccagccgggagcatcatcagcctgaatgcagcccagttggcggcagctgcccaggcaatgcagaccatcaacatcaatggtgtccaggtccagggcgtgcctgtcaccatcaccaacacaggcgggcagcagcagctgacagtgcagaatgtttctgggaacaacctgaccatcagtgggctgagccccacccagatccagctgcaaatggaacaagccctggccggagagacccagcccggggagaagcggcgccgcatggcctgcacgtgtcccaactgcaaggatggggagaagaggtctggagagcagggcaagaagaagcacgtttgccacatccccgactgtggcaagacgttccgtaagacgtccttgctgcgtgcccatgtgcgcctgcacactggcgagcggccctttgtctgcaactggttcttctgtgggaagaggttcacacggagtgacgagctccaacggcatgctcgcacccacacaggggacaaacgcttcgagtgcgcccagtgtcagaagcgcttcatgaggagtgaccacctcaccaagcattacaagacccacctggtcacgaagaacttgtaaggccaactgcggcgggaggccctgaagatgcagtcccccacctgtgtcctccctgggcccctggtggaaaggagccctgtggctgccttgggcctgccctcagccccactcctgttctgcaactgtccccacaggaaggggctctgttccctgtattgtcctccttctgaagccccttggctctgccttggcccttcccctcaccacgagctcccggcctgcccagactgtggacactggccgtgcccaatgagacgttctaaaccaggacgcgtgggaacccttatttccaaaggaaaaacatgcatttcactccgtcgaggagcaaagtgagcccctaccccccaccccgatccccgctcccaacactgccggagtcgcgtcatgccatgccccctctcctgcacctccctggccctgccggccactgtggacgccctggggcttggcacccacctctggagaaactcggggccacctccactccatgtgcccagccccgccacaacctctcctccagcacattccagctctatttaaaaagtaaagacacccaccgactcctgatccccctctttttctatggagaacgttgccttatactctctacttcagatgatgaacactgtgtactgtgtgtgctttaaagaagttttatttaattgctcccttcttcctttccttgttattcacctccctgatgcctgctttcagttgagggttgggggcaatgatgagcatatgaattttttctcactctagcaattcccttttctaaatgacacagcatttaaactcaaatctggattcagataacagcacctgcacatcctgcacctcctccctctcccttcacctcacccctgcccggcccaagctctacttgtgtacagtgtatattgtataatagacaattgtgtctactacatgtttaaaaacacattgcttgttatttttgaggcttttaaattaaacaaaaatccaactttatttttagttgtaactgcttgaggtatgttttatgaattaagtgacagatttgttatcctttattaacgtactttgttggtcagcactgggctgacaaaaattttttcttgctaataaatttagttgcctgaggcaaaatcttcaaaatagcag

SEQ ID NO: 281677 - DNA, 1056 bp, Homo sapiens
  misc_feature (32)..(32): n is a, c, g, or t
  misc_feature (39)..(39): n is a, c, g, or t
agcagctggtcccggtcggagaagtatgaggnatcggangccagggaggaagatgtcgtaatgagcgatccacagaccagcatggctgccactgctgctgtgagtcccagtgactacctgcagcctgccgcctccaccacccaggactcccagccatctcccttagccctgcttgctgcaacatgtagcaaaattggccctccagcagttgaagctgctgtgacacctcctgctcccccacagcccacaccgcggaaacttgtccctatcaaacctgcccctctccctctcagccccggcaagaatagctttggaatcttgtcctccaaaggaaatatacttcagattcaggggtcacaactgagcgcctcctatcctggagggcagctggtgttcgctatccagaatcccaccatgatcaacaaagggacccgatcaaatgccaatatccagtaccaggcggtccctcagattcaggcaagcaattcccaaaccatccaagtacagcccaatctcaccaaccagatccagatcatccctggcaccaaccaagccatcatcaccccctcaccgtccagtcacaagcctgtccccatcaagccagcccccatccagaagtcgagtacgaccaccacccccgtgcagagcggggccaatgtggtgaagttgacaggtgggggcggcaatgtgacgctcactctgcccgtcaacaaccttgtgaacgccagtgacaccggggcccctactcagctcctcactgaaagccccccaaccccgctgtctaagactaacaagaaagcaaggaagaagagccttcctgcctcccagccccctgtggctgtggctgagcaggtggagacggtgctgatcgagaccaccgcggacaacatcatccaggcaggaaataacctgctcattgttcagagccctggtgggggccagccagctgtggtccagcaggtccaggtggtgccccccaaggccgagcagcagcaggtggtacagatcccccagcaggctcatgaacaatgagcaggtatttcctgcctggatgat

SEQ ID NO: 281678 - DNA, 414 bp, Homo sapiens
cggggcatggagttccactgcaggaatctccaggaaccctgaggtcctccctgagccagggccgggctgggcacaccctgagtgcccacagggcctaggggatgccaaattccagggtccagaaagagcttgggataaaatgaaacttcaaggggacggctttgacctgggctgagtctgtctgtgccatccaactggagtctcaagtcctgaggcaggacgtccagatgccccagtgcagggccctcctgatcaacacctgctcccctgtactcattagcaacctcacccaccctactctcaaagcacacttggctctcgtatccaggagctctgcatctatagattcggcaacagcagatggaaaatattcagaaaataaattggatggttatgtttctattgaacatgtgc

SEQ ID NO: 281679 - DNA, 462 bp, Homo sapiens
ccaggccggttactgcctctctgaccccagacgtctcatctgtcgaatggggacatttgggaacagcacccactctacgaagccaccatggagacgaaagagccaatcgtctacacgggcagtgtagaacgggcgcctgggcctaggggatgccaaattccagggtccagaaagagcttgggataaaatgaaacttcaaggggacggctttgacctgggctgagtctgtctgtgccatccaactggagtctcaagtcctgaggcaggacgtccagatgccccagtgcagggccctcctgatcaacacctgctcccctgtactcattagcaacctcacccaccctactctcaaagcacacttggctctcgtatccaggagctctgcatctatagattcggcaacagcagatggaaaatattcagaaaataaattggatggttatgtttctattgaacatgtgc

SEQ ID NO: 281680 - DNA, 480 bp, Homo sapiens
cctcagcttgcagacagcctattgtgggacctcgtgatcatgcatctgtgtgcaccaatgcagaaaagacggggactacaaggaaggaaaatgttgcatcaggaagggctgctggcacatctttgttccccctccccaaaacctcatccccaagcagggcctaggggatgccaaattccagggtccagaaagagcttgggataaaatgaaacttcaaggggacggctttgacctgggctgagtctgtctgtgccatccaactggagtctcaagtcctgaggcaggacgtccagatgccccagtgcagggccctcctgatcaacacctgctcccctgtactcattagcaacctcacccaccctactctcaaagcacacttggctctcgtatccaggagctctgcatctatagattcggcaacagcagatggaaaatattcagaaaataaattggatggttatgtttctattgaacatgtgc

SEQ ID NO: 281681 - DNA, 651 bp, Homo sapiens
ttctgaagttctggccctacatgaactatttcaagtctgaaattcccagggaaggcgggaggaaactcctgattggcccaggttggttcaggagcagactccctcctcgatcaactgtgatcatgcaggagcagcagagtctcagtgcataaaacagggagacttatttcctccacggctatttagtagacactggagccacagtccagtgagctaatttaagagagaaactcggagcacagaatgctcagttccacagaattccaacacacaagtctaacttattactgtatctcagttacctctaccattacctataaatggcataaagtaaaaattaagcatgtgaaacagttaacctcaattataaaaataaaatgcatttaaattatacacatggagtatacaatatatttacttattgcatacaaattctgctcaactagaaagttttgtgtacagtagaaacagtggtaagaatttctaataagtcccaattttatttctttgatcctaagcctctacttgtttccctcccacaattgggctgggtgttactaacccatgtgcacattaattacagcatttatttttccctaaaaagttgttattaagctaacagtatatcatctaaaaagtactgttaactta

SEQ ID NO: 281682 - DNA, 723 bp, Homo sapiens
gcttactagtgatcttgaacatgctatttaatctctagatacaaagtggtgatgacaatatcaataataactaccttgcagttccctgagagaatcagagataacatatccaaagtgtttagcaccatacttagcatacagtagcagagtaaaaactcagcaaatggaagctatgattttaaaagctaaacaaaactatacaatatcagctggtttttttttcccttagggagacttatttcctccacggctatttagtagacactggagccacagtccagtgagctaatttaagagagaaactcggagcacagaatgctcagttccacagaattccaacacacaagtctaacttattactgtatctcagttacctctaccattacctataaatggcataaagtaaaaattaagcatgtgaaacagttaacctcaattataaaaataaaatgcatttaaattatacacatggagtatacaatatatttacttattgcatacaaattctgctcaactagaaagttttgtgtacagtagaaacagtggtaagaatttctaataagtcccaattttatttctttgatcctaagcctctacttgtttccctcccacaattgggctgggtgttactaacccatgtgcacattaattacagcatttatttttccctaaaaagttgttattaagctaacagtatatcatctaaaaagtactgttaactta

SEQ ID NO: 281683 - DNA, 1423 bp, Homo sapiens
caaaccagtggctgatatcctggcctgcaacttccacgatgggtttcagcagcaggttcccttgaaaagagcagcacagccactgtcaatgccagcccttcgagaaccaggcaaacgcgcgcgtgcacacacacacactccggccccggcccaacgtgtggcccttacccttgtattcctgtgccaatgacgttaggtcgtacacgcgtcccaggtaagatacccagaggtcttcgggcctgttatgttgggccacctccgccggcgtgaaatagcgacgctgaaaatactccaagtctggcccagccaccaggccccggcgcggcatggctcttgctctgtcggtcactggatctcttggttactcctttgctcctcagcacgtactcactactactacgacctccgtcgcgtccgggagccgaggggagagcgtttatccgctgacatggaaaccattgtccttttccggccaccgtccactgagataaatatcaggggcggggtttggactgcacgtgttcacgggaaacgtagtatgagtcccgcgtggggcatataaggatcaagtaattgagttgcgccgctttcaggagttgcggggtggggcagagaacgaatacgctccgttttaattcagtggcctgggctacatgggatatttaggacagactatctctctgagacagaaaaacaagggaggaggcagtatgaaagaatgtattctcgctaaattccagtttctaaaggatgtgtaagaaaccagaggtaaaggtctcgcgatatcttaagacatccggcgtagtacgcttcagtgagccacagcgctagagaagtaggagaagctcgcgagatctgtgccgttgccgaggagactaggagggggaggagaggggatctcgcgaaaggaaagaggtcgggagcgctcgcgagatctcggaccacccaacctgaaaggtgcttaggaagttgaaaggcccagaggaggcctccgggcaaatggccggagctggaccgaccatgctgctacgagaagagaatggctgttgcagtcggcgtcagagcagctccagtgctggggattcggacggagagcgcgaggactcggcggctgagcgcgcccgacagcagctagaggcgctgctcaacaagactatgcgcattcgcatgacagatggacggacactggtcggctgcttcctctgcactgaccgtgactgcaatgtcatcctgggctcggcgcaggagttcctcaagccgtcggattccttctctgccggggagccccgtgtgctgggcctggccatggtacccggacaccacatcgtttccattgaggtgcagagggagagtctgaccgggcctccgtatctctgaccacgatggcgcttacctttcagacttcattaaacttatgaccgaa

SEQ ID NO: 281684 - DNA, 439 bp, Homo sapiens
tgttggagatcatggagggaaggcaaatatccgataaagtagaagcaactgaggtaccgtgaaagagaaaggagctggaactgagaaaaagcagaggattcggacggagagcgcgaggactcggcggctgagcgcgcccgacagcagctagaggcgctgctcaacaagactatgcgcattcgcatgacagatggacggacactggtcggctgcttcctctgcactgaccgtgactgcaatgtcatcctgggctcggcgcaggagttcctcaagccgtcggattccttctctgccggggagccccgtgtgctgggcctggccatggtacccggacaccacatcgtttccattgaggtgcagagggagagtctgaccgggcctccgtatctctgaccacgatggcgcttacctttcagacttcattaaacttatgaccgaa

SEQ ID NO: 281685 - DNA, 1683 bp, Homo sapiens
  misc_feature (1469)..(1469): n is a, c, g, or t
  misc_feature (1588)..(1589): n is a, c, g, or t
caaaccagtggctgatatcctggcctgcaacttccacgatgggtttcagcagcaggttcccttgaaaagagcagcacagccactgtcaatgccagcccttcgagaaccaggcaaacgcgcgcgtgcacacacacacactccggccccggcccaacgtgtggcccttacccttgtattcctgtgccaatgacgttaggtcgtacacgcgtcccaggtaagatacccagaggtcttcgggcctgttatgttgggccacctccgccggcgtgaaatagcgacgctgaaaatactccaagtctggcccagccaccaggccccggcgcggcatggctcttgctctgtcggtcactggatctcttggttactcctttgctcctcagcacgtactcactactactacgacctccgtcgcgtccgggagccgaggggagagcgtttatccgctgacatggaaaccattgtccttttccggccaccgtccactgagataaatatcaggggcggggtttggactgcacgtgttcacgggaaacgtagtatgagtcccgcgtggggcatataaggatcaagtaattgagttgcgccgctttcaggagttgcggggtggggcagagaacgaatacgctccgttttaattcagtggcctgggctacatgggatatttaggacagactatctctctgagacagaaaaacaagggaggaggcagtatgaaagaatgtattctcgctaaattccagtttctaaaggatgtgtaagaaaccagaggtaaaggtctcgcgatatcttaagacatccggcgtagtacgcttcagtgagccacagcgctagagaagtaggagaagctcgcgagatctgtgccgttgccgaggagactaggagggggaggagaggggatctcgcgaaaggaaagaggtcgggagcgctcgcgagatctcggaccacccaacctgaaaggtgcttaggaagttgaaaggcccagaggaggcctccgggcaaatggccggagctggaccgaccatgctgctacgagaagagaatggctgttgcagtcggcgtcagagcagctccagtgctggggattcggacggagagcgcgaggactcggcggctgagcgcgcccgacagcagctagaggcgctgctcaacaagactatgcgcattcgcatgacagatggacggacactggtcggctgcttcctctgcactgaccgtgactgcaatgtcatcctgggctcggcgcaggagttcctcaagccgtcggattccttctctgccggggagccccgtgtgctgggcctggccatggtacccggacaccacatcgtttccattgaggtgcagagggagagtctgaccgggcctccgtatctctgaccacgatggcgcttacctttcagacttcattaaacttatgaccgaaaaaaaaatctttttttgtacaagccttcaaacacacacgaacccanccgcctctcgggggggcccggttctcaatttgccctatagtggagggtttttccattaactggcccgcgtttaaaaaagtggtgaatgttaaaaccccggggatttcaaactcaattgnntttggggaaaatccccctttgccccagttgctgtacaccccaaaaagccacattcggaggggctttttaaaaactatttccgccgggaatttaa

SEQ ID NO: 281686 - DNA, 1330 bp, Homo sapiens
caaaccagtggctgatatcctggcctgcaacttccacgatgggtttcagcagcaggttcccttgaaaagagcagcacagccactgtcaatgccagcccttcgagaaccaggcaaacgcgcgcgtgcacacacacacactccggccccggcccaacgtgtggcccttacccttgtattcctgtgccaatgacgttaggtcgtacacgcgtcccaggtaagatacccagaggtcttcgggcctgttatgttgggccacctccgccggcgtgaaatagcgacgctgaaaatactccaagtctggcccagccaccaggccccggcgcggcatggctcttgctctgtcggtcactggatctcttggttactcctttgctcctcagcacgtactcactactactacgacctccgtcgcgtccgggagccgaggggagagcgtttatccgctgacatggaaaccattgtccttttccggccaccgtccactgagataaatatcaggggcggggtttggactgcacgtgttcacgggaaacgtagtatgagtcccgcgtggggcatataaggatcaagtaattgagttgcgccgctttcaggagttgcggggtggggcagagaacgaatacgctccgttttaattcagtggcctgggctacatgggatatttaggacagactatctctctgagacagaaaaacaagggaggaggcagtatgaaagaatgtattctcgctaaattccagtttctaaaggatgtgtaagaaaccagaggtaaaggtctcgcgatatcttaagacatccggcgtagtacgcttcagtgagccacagcgctagagaagtaggagaagctcgcgagatctgtgccgttgccgaggagactaggagggggaggagaggggatctcgcgaaaggaaagaggtcgggagctgtggttccgcgggcgggcagcctgggctgcgcggtctgagcgcttgttacaccccgcgcagggattcggacggagagcgcgaggactcggcggctgagcgcgcccgacagcagctagaggcgctgctcaacaagactatgcgcattcgcatgacagatggacggacactggtcggctgcttcctctgcactgaccgtgactgcaatgtcatcctgggctcggcgcaggagttcctcaagccgtcggattccttctctgccggggagccccgtgtgctgggcctggccatggtacccggacaccacatcgtttccattgaggtgcagagggagagtctgaccgggcctccgtatctctgaccacgatggcgcttacctttcagacttcattaaacttatgaccgaa

SEQ ID NO: 281687 - DNA, 448 bp, Homo sapiens
  misc_feature (56)..(56): n is a, c, g, or t
aaggctctgatgcaaagcttggggggcatttcagaaactgaaaggccaacgtgggnagaacaaagaagagcctgaaagaagccaaatcttaccttctggaccatggattcggacggagagcgcgaggactcggcggctgagcgcgcccgacagcagctagaggcgctgctcaacaagactatgcgcattcgcatgacagatggacggacactggtcggctgcttcctctgcactgaccgtgactgcaatgtcatcctgggctcggcgcaggagttcctcaagccgtcggattccttctctgccggggagccccgtgtgctgggcctggccatggtacccggacaccacatcgtttccattgaggtgcagagggagagtctgaccgggcctccgtatctctgaccacgatggcgcttacctttcagacttcattaaacttatgaccgaa

SEQ ID NO: 281688 - DNA, 1344 bp, Homo sapiens
caaaccagtggctgatatcctggcctgcaacttccacgatgggtttcagcagcaggttcccttgaaaagagcagcacagccactgtcaatgccagcccttcgagaaccaggcaaacgcgcgcgtgcacacacacacactccggccccggcccaacgtgtggcccttacccttgtattcctgtgccaatgacgttaggtcgtacacgcgtcccaggtaagatacccagaggtcttcgggcctgttatgttgggccacctccgccggcgtgaaatagcgacgctgaaaatactccaagtctggcccagccaccaggccccggcgcggcatggctcttgctctgtcggtcactggatctcttggttactcctttgctcctcagcacgtactcactactactacgacctccgtcgcgtccgggagccgaggggagagcgtttatccgctgacatggaaaccattgtccttttccggccaccgtccactgagataaatatcaggggcggggtttggactgcacgtgttcacgggaaacgtagtatgagtcccgcgtggggcatataaggatcaagtaattgagttgcgccgctttcaggagttgcggggtggggcagagaacgaatacgctccgttttaattcagtggcctgggctacatgggatatttaggacagactatctctctgagacagaaaaacaagggaggaggcagtatgaaagaatgtattctcgctaaattccagtttctaaaggatgtgtaagaaaccagaggtaaaggtctcgcgatatcttaagacatccggcgtagtacgcttcagtgagccacagcgctagagaagtaggagaagctcgcgagatctgtgccgttgccgaggagactaggagggggaggagaggggatctcgcgaaaggaaagaggtcgggagcgctcgcgagatctcggaccacccaacctgaaaggtgcttaggaagttgaaaggcccagaggaggcctccgggcaaatggccggagctggaccgaccatgctgctacgagaagagaatggctgttgcagtcggcgtcagagcagctccagtgctggggattcggacggagagcgcgaggactcggcggctgagcgcgcccgacagcagctagaggcgctgctcaacaagactatgcgcattcgcatgacagatggacgagaacaggtaggaggaacctcgggactgaccgggacgccatggacacccagggccagacaaacaccaagcgacgatacaccaagacgggaaccccggtgtaaggcccgtgcaggcacccggcaccaacggtcccctgaggcggaagcaacgcgcccgcaccgc

SEQ ID NO: 281689 - DNA, 322 bp, Homo sapiens
  misc_feature (56)..(56): n is a, c, g, or t
aaggctctgatgcaaagcttggggggcatttcagaaactgaaaggccaacgtgggnagaacaaagaagagcctgaaagaagccaaatcttaccttctggaccatggtaagggtttctaagttcatcttaagagaagtaggttgcctttgaagacttttaacatgggaactttaaaagttccccgtggcggccgggcgcaatggctcacacctgtaatcccagcactctgggaggccgaggcgggcggatcacgaggtcaggagatcaagaccatcctggctaacacggtaaaaccccgtctctactaaaaataccaaaaaaa

SEQ ID NO: 281690 - DNA, 147 bp, Homo sapiens
aattcaagcttctaacgatgtacggggacatggtacccggacaccacatcgtttccattgaggtgcagagggagagtctgaccgggcctccgtatctctgaccacgatggcgcttacctttcagacttcattaaacttatgaccgaa

SEQ ID NO: 281691 - DNA, 541 bp, Homo sapiens
  misc_feature (7)..(8): n is a, c, g, or t
  misc_feature (28)..(28): n is a, c, g, or t
  misc_feature (30)..(30): n is a, c, g, or t
  misc_feature (33)..(33): n is a, c, g, or t
gcggccnnctactactactaaattcgcngncgntccgggagcgctcgcgagatctcggaccacccaacctgaaaggtgcttaggaagttgaaaggcccagaggaggcctccgggcaaatggccggagctggaccgaccatgctgctacgagaagagaatggctgttgcagtcggcgtcagagcagctccagtgctggggattcggacggagagcgcgaggactcggcggctgagcgcgcccgacagcagctagaggcgctgctcaacaagactatgcgcattcgcatgacagatggacggacactggtcggctgcttcctctgcactgaccgtgactgcaatgtcatcctgggctcggcgcaggagttcctcaagccgtcggattccttctctgccggggagccccgtgtgctgggcctggccatggtacccggacaccacatcgtttccattgaggtgcagagggagagtctgaccgggcctccgtatctctgaccacgatggcgcttacctttcagacttcattaaacttatgaccgaa

SEQ ID NO: 281692 - DNA, 501 bp, Homo sapiens
  misc_feature (7)..(8): n is a, c, g, or t
  misc_feature (28)..(28): n is a, c, g, or t
  misc_feature (30)..(30): n is a, c, g, or t
  misc_feature (33)..(33): n is a, c, g, or t
gcggccnnctactactactaaattcgcngncgntcgtgcttaggaagttgaaaggcccagaggaggcctccgggcaaatggccggagctggaccgaccatgctgctacgagaagagaatggctgttgcagtcggcgtcagagcagctccagtgctggggattcggacggagagcgcgaggactcggcggctgagcgcgcccgacagcagctagaggcgctgctcaacaagactatgcgcattcgcatgacagatggacggacactggtcggctgcttcctctgcactgaccgtgactgcaatgtcatcctgggctcggcgcaggagttcctcaagccgtcggattccttctctgccggggagccccgtgtgctgggcctggccatggtacccggacaccacatcgtttccattgaggtgcagagggagagtctgaccgggcctccgtatctctgaccacgatggcgcttacctttcagacttcattaaacttatgaccgaa

SEQ ID NO: 281693 - DNA, 1455 bp, Homo sapiens
caaaccagtggctgatatcctggcctgcaacttccacgatgggtttcagcagcaggttcccttgaaaagagcagcacagccactgtcaatgccagcccttcgagaaccaggcaaacgcgcgcgtgcacacacacacactccggccccggcccaacgtgtggcccttacccttgtattcctgtgccaatgacgttaggtcgtacacgcgtcccaggtaagatacccagaggtcttcgggcctgttatgttgggccacctccgccggcgtgaaatagcgacgctgaaaatactccaagtctggcccagccaccaggccccggcgcggcatggctcttgctctgtcggtcactggatctcttggttactcctttgctcctcagcacgtactcactactactacgacctccgtcgcgtccgggagccgaggggagagcgtttatccgctgacatggaaaccattgtccttttccggccaccgtccactgagataaatatcaggggcggggtttggactgcacgtgttcacgggaaacgtagtatgagtcccgcgtggggcatataaggatcaagtaattgagttgcgccgctttcaggagttgcggggtggggcagagaacgaatacgctccgttttaattcagtggcctgggctacatgggatatttaggacagactatctctctgagacagaaaaacaagggaggaggcagtatgaaagaatgtattctcgctaaattccagtttctaaaggatgtgtaagaaaccagaggtaaaggtctcgcgatatcttaagacatccggcgtagtacgcttcagtgagccacagcgctagagaagtaggagaagctcgcgagatctgtgccgttgccgaggagactaggagggggaggagaggggatctcgcgaaaggaaagaggtcgggagcgctcgcgagatctcggaccacccaacctgaaaggtgcttaggaagttgaaaggcccagaggaggcctccgggcaaatggccggagctggaccgaccatgctgctacgagaagagaatggctgttgcagtcggcgtcagagcagctccagtgctggggattcggacggagagcgcgaggactcggcggctgagcgcgcccgacagcagctagaggcgctgctcaacaagactatgcgcattcgcatgacagatggacggacactggtcggctgcttcctctgcactgaccgtgactgcaatgtcatcctgggctcggcgcaggagttcctcaagccgtcggattccttctctgccggggagccccgtgtgctgggcctggccatggtacccggacaccacatcgtttccattgaggtgcagagggagagtctgaccgggcctccgtatctctgaccacgatggcgcttacctttcagacttcattaaacttatgaccgaaaagtcgacgcggccgcgaaattagtagtagta

SEQ ID NO: 281694 - DNA, 1432 bp, Homo sapiens
  misc_feature (1429)..(1429): n is a, c, g, or t
caaaccagtggctgatatcctggcctgcaacttccacgatgggtttcagcagcaggttcccttgaaaagagcagcacagccactgtcaatgccagcccttcgagaaccaggcaaacgcgcgcgtgcacacacacacactccggccccggcccaacgtgtggcccttacccttgtattcctgtgccaatgacgttaggtcgtacacgcgtcccaggtaagatacccagaggtcttcgggcctgttatgttgggccacctccgccggcgtgaaatagcgacgctgaaaatactccaagtctggcccagccaccaggccccggcgcggcatggctcttgctctgtcggtcactggatctcttggttactcctttgctcctcagcacgtactcactactactacgacctccgtcgcgtccgggagccgaggggagagcgtttatccgctgacatggaaaccattgtccttttccggccaccgtccactgagataaatatcaggggcggggtttggactgcacgtgttcacgggaaacgtagtatgagtcccgcgtggggcatataaggatcaagtaattgagttgcgccgctttcaggagttgcggggtggggcagagaacgaatacgctccgttttaattcagtggcctgggctacatgggatatttaggacagactatctctctgagacagaaaaacaagggaggaggcagtatgaaagaatgtattctcgctaaattccagtttctaaaggatgtgtaagaaaccagaggtaaaggtctcgcgatatcttaagacatccggcgtagtacgcttcagtgagccacagcgctagagaagtaggagaagctcgcgagatctgtgccgttgccgaggagactaggagggggaggagaggggatctcgcgaaaggaaagaggtcgggagcgctcgcgagatctcggaccacccaacctgaaaggtgcttaggaagttgaaaggcccagaggaggcctccgggcaaatggccggagctggaccgaccatgctgctacgagaagagaatggctgttgcagtcggcgtcagagcagctccagtgctggggattcggacggagagcgcgaggactcggcggctgagcgcgcccgacagcagctagaggcgctgctcaacaagactatgcgcattcgcatgacagatggacggacactggtcggctgcttcctctgcactgaccgtgactgcaatgtcatcctgggctcggcgcaggagttcctcaagccgtcggattccttctctgccggggagccccgtgtgctgggcctggccatggtacccggacaccacatcgtttccattgaggtgcagagggagagtctgaccgggcctccgtatctctgaccacgattgcaaataccccccaggggtcattggggtgaggggagggatttanaaa

SEQ ID NO: 281695 - DNA, 1594 bp, Homo sapiens
caaaccagtggctgatatcctggcctgcaacttccacgatgggtttcagcagcaggttcccttgaaaagagcagcacagccactgtcaatgccagcccttcgagaaccaggcaaacgcgcgcgtgcacacacacacactccggccccggcccaacgtgtggcccttacccttgtattcctgtgccaatgacgttaggtcgtacacgcgtcccaggtaagatacccagaggtcttcgggcctgttatgttgggccacctccgccggcgtgaaatagcgacgctgaaaatactccaagtctggcccagccaccaggccccggcgcggcatggctcttgctctgtcggtcactggatctcttggttactcctttgctcctcagcacgtactcactactactacgacctccgtcgcgtccgggagccgaggggagagcgtttatccgctgacatggaaaccattgtccttttccggccaccgtccactgagataaatatcaggggcggggtttggactgcacgtgttcacgggaaacgtagtatgagtcccgcgtggggcatataaggatcaagtaattgagttgcgccgctttcaggagttgcggggtggggcagagaacgaatacgctccgttttaattcagtggcctgggctacatgggatatttaggacagactatctctctgagacagaaaaacaagggaggaggcagtatgaaagaatgtattctcgctaaattccagtttctaaaggatgtgtaagaaaccagaggtaaaggtctcgcgatatcttaagacatccggcgtagtacgcttcagtgagccacagcgctagagaagtaggagaagctcgcgagatctgtgccgttgccgaggagactaggagggggaggagaggggatctcgcgaaaggaaagaggtcgggagcgctcgcgagatctcggaccacccaacctgaaaggtgcttaggaagttgaaaggcccagaggaggcctccgggcaaatggccggagctggaccgaccatgctgctacgagaagagaatggctgttgcagtcggcgtcagagcagctccagtgctggggattcggacggagagcgcgaggactcggcggctgagcgcgcccgacagcagctagaggcgctgctcaacaagactatgcgcattcgcatgacagatggacggacactggtcggctgcttcctctgcactgaccgtgactgcaatgtcatcctgggctcggcgcaggagttcctcaagccgtcgggtcagtgcccggggaatgcacacccgcctggtaatgtggcggaaccttacgcaaggcatttccccttaagggcctggctgcaacccttgttttctggggctcgttttcgtggctcagaggggcgggactgattctggcctactttcctgatgctctgatccttctttccagattccttctctgccggggagccccgtgtgctgggcctggccatggtacccggacaccacatcgtttccattgaggtgcagagggagagtctgaccgggcctccgtatctctgaccacgatggcgcttacctttcagacttcattaaacttatgaccgaa

SEQ ID NO: 281696 - DNA, 754 bp, Homo sapiens
gcagagaacgaatacgctccgttttaattcagtggcctgggctacatgggatatttaggacagactatctctctgagacagaaaaacaagggaggaggcagtatgaaagaatgtattctcgctaaattccagtttctaaaggatgtgtaagaaaccagaggtaaaggtctcgcgatatcttaagacatccggcgtagtacgcttcagtgagccacagcgctagagaagtaggagaagctcgcgagatctgtgccgttgccgaggagactaggagggggaggagaggggatctcgcgaaaggaaagaggtcgggagcgctcgcgagatctcggaccacccaacctgaaaggtgcttaggaagttgaaaggcccagaggaggcctccgggcaaatggccggagctggaccgaccatgctgctacgagaagagaatggctgttgcagtcggcgtcagagcagctccagtgctggggttagcacgggctctggttctgggactgaggggcagtcaagcagcaagatggagggggtggggaactgcagctcccggcagcctctgggctttgtgtgagtgccccgcgggctgccgggagctgtggttccgcgggcgggcagcctgggctgcgcggtctgagcgcttgttacaccccgcgcagggattcggacggagagcgcgaggactcggcggctgagcgcgcccgacagcagctagaggcgctgctcaacaagactatgcgcattcgcatgacagatg

SEQ ID NO: 281697 - DNA, 562 bp, Homo sapiens
ggaggcctggccccgcggtcgcagccgccaccgcccgccccgacctcccggaccgccgcggggccacgggcccgagccccggattcgcgctccggattcgcctcggctcggccgcgcgtatatttgccttccctccatgatctccaacactatccgataaagtagaagcaactgaggtaccgtgaaagagaaaggagctggaactgagaaaaagcagaggattcggacggagagcgcgaggactcggcggctgagcgcgcccgacagcagctagaggcgctgctcaacaagactatgcgcattcgcatgacagatggacggacactggtcggctgcttcctctgcactgaccgtgactgcaatgtcatcctgggctcggcgcaggagttcctcaagccgtcggattccttctctgccggggagccccgtgtgctgggcctggccatggtacccggacaccacatcgtttccattgaggtgcagagggagagtctgaccgggcctccgtatctctgaccacgatggcgcttacctttcagacttcattaaacttatgaccgaa

SEQ ID NO: 281698 - DNA, 1453 bp, Homo sapiens
caaaccagtggctgatatcctggcctgcaacttccacgatgggtttcagcagcaggttcccttgaaaagagcagcacagccactgtcaatgccagcccttcgagaaccaggcaaacgcgcgcgtgcacacacacacactccggccccggcccaacgtgtggcccttacccttgtattcctgtgccaatgacgttaggtcgtacacgcgtcccaggtaagatacccagaggtcttcgggcctgttatgttgggccacctccgccggcgtgaaatagcgacgctgaaaatactccaagtctggcccagccaccaggccccggcgcggcatggctcttgctctgtcggtcactggatctcttggttactcctttgctcctcagcacgtactcactactactacgacctccgtcgcgtccgggagccgaggggagagcgtttatccgctgacatggaaaccattgtccttttccggccaccgtccactgagataaatatcaggggcggggtttggactgcacgtgttcacgggaaacgtagtatgagtcccgcgtggggcatataaggatcaagtaattgagttgcgccgctttcaggagttgcggggtggggcagagaacgaatacgctccgttttaattcagtggcctgggctacatgggatatttaggacagactatctctctgagacagaaaaacaagggaggaggcagtatgaaagaatgtattctcgctaaattccagtttctaaaggatgtgtaagaaaccagaggtaaaggtctcgcgatatcttaagacatccggcgtagtacgcttcagtgagccacagcgctagagaagtaggagaagctcgcgagatctgtgccgttgccgaggagactaggagggggaggagaggggatctcgcgaaaggaaagaggtcgggagcgctcgcgagatctcggaccacccaacctgaaaggtgcttaggaagttgaaaggcccagaggaggcctccgggcaaatggccggagctggaccgaccatgctgctacgagaagagaatggctgttgcagtcggcgtcagagcagctccagtgctggggattcggacggagagcgcgaggactcggcggctgagcgcgcccgacagcagctagaggcgctgctcaacaagactatgcgcattcgcatgacagatggacggacactggtcggctgcttcctctgcactgaccgtgactgcaatgtcatcctgggctcggcgcaggagttcctcaagccgtcgggtcagtgcccggggaatgcacacccgcctgattccttctctgccggggagccccgtgtgctgggcctggccatggtacccggacaccacatcgtttccattgaggtgcagagggagagtctgaccgggcctccgtatctctgaccacgatggcgcttacctttcagacttcattaaacttatgaccgaa

SEQ ID NO: 281699 - DNA, 408 bp, Homo sapiens
  misc_feature (41)..(42): n is a, c, g, or t
tggcgatgtggccccgttgtggccacccgccggccaccgcnncggcttcagcatcaccacggaaagattcggacggagagcgcgaggactcggcggctgagcgcgcccgacagcagctagaggcgctgctcaacaagactatgcgcattcgcatgacagatggacggacactggtcggctgcttcctctgcactgaccgtgactgcaatgtcatcctgggctcggcgcaggagttcctcaagccgtcggattccttctctgccggggagccccgtgtgctgggcctggccatggtacccggacaccacatcgtttccattgaggtgcagagggagagtctgaccgggcctccgtatctctgaccacgatggcgcttacctttcagacttcattaaacttatgaccgaa

SEQ ID NO: 281700 - DNA, 259 bp, Homo sapiens
gggaactcctgcgccgagcccaggatgacattgcagtcacggtcagtgcaggagttcctcaagccgtcgggtcagtgcccggggaatgcacacccgcctgattccttctctgccggggagccccgtgtgctgggcctggccatggtacccggacaccacatcgtttccattgaggtgcagagggagagtctgaccgggcctccgtatctctgaccacgatggcgcttacctttcagacttcattaaacttatgaccgaa

SEQ ID NO: 281701 - DNA, 1917 bp, Homo sapiens
caaaccagtggctgatatcctggcctgcaacttccacgatgggtttcagcagcaggttcccttgaaaagagcagcacagccactgtcaatgccagcccttcgagaaccaggcaaacgcgcgcgtgcacacacacacactccggccccggcccaacgtgtggcccttacccttgtattcctgtgccaatgacgttaggtcgtacacgcgtcccaggtaagatacccagaggtcttcgggcctgttatgttgggccacctccgccggcgtgaaatagcgacgctgaaaatactccaagtctggcccagccaccaggccccggcgcggcatggctcttgctctgtcggtcactggatctcttggttactcctttgctcctcagcacgtactcactactactacgacctccgtcgcgtccgggagccgaggggagagcgtttatccgctgacatggaaaccattgtccttttccggccaccgtccactgagataaatatcaggggcggggtttggactgcacgtgttcacgggaaacgtagtatgagtcccgcgtggggcatataaggatcaagtaattgagttgcgccgctttcaggagttgcggggtggggcagagaacgaatacgctccgttttaattcagtggcctgggctacatgggatatttaggacagactatctctctgagacagaaaaacaagggaggaggcagtatgaaagaatgtattctcgctaaattccagtttctaaaggatgtgtaagaaaccagaggtaaaggtctcgcgatatcttaagacatccggcgtagtacgcttcagtgagccacagcgctagagaagtaggagaagctcgcgagatctgtgccgttgccgaggagactaggagggggaggagaggggatctcgcgaaaggaaagaggtcgggagcgctcgcgagatctcggaccacccaacctgaaaggtgcttaggaagttgaaaggcccagaggaggcctccgggcaaatggccggagctggaccgaccatgctgctacgagaagagaatggctgttgcagtcggcgtcagagcagctccagtgctggggattcggacggagagcgcgaggactcggcggctgagcgcgcccgacagcagctagaggcgctgctcaacaagactatgcgcattcgcatgacagatggacggacactggtcggctgcttcctctgcactgaccgtgactgcaatgtcatcctgggctcggcgcaggagttcctcaagccgtcggattccttctctgccggggagccccgtgtgctgggcctggccatggtacccggacaccacatcgtttccattgaggtgcagagggagagtctgaccgggcctccgtatctctgaccacgatggcgcttacctttcagacttcattaaacttatgaccgaaaaaaaaaaaaaaaaaaaaaaaaaaaaaaaaaaccggagagcaacaaagaggaggggggcggaaaaaaagggaaagaaaatgggccaggtgcacaaaccggaaccggaccccagtttcttgtaccaagggggaaacatgcggggaccccaatggcgccggaacaaatgcgaaaacccgggttaccgggttaaaaggctgcaaaaaaaacacacaaaacgccaacaacaaagacaagcaaaaaagcactaaacagacgaacacaaatcacacaacagaaggagagaacaccacaacacaaacacagggaacagagaaaagaaacaaaacggaaaagcaaaagcaagaagaggaacgaaagccacaagagaggaagagcagacaaggcgcaaggaaagaagaagaaaacgaggatagcaaaagagaggatcagcgggaagcgcaagaaagagacaaggaacaaaggcagagagaagaacaggacgagaacagacaaa

SEQ ID NO: 281702 - DNA, 1763 bp, Homo sapiens
caaaccagtggctgatatcctggcctgcaacttccacgatgggtttcagcagcaggttcccttgaaaagagcagcacagccactgtcaatgccagcccttcgagaaccaggcaaacgcgcgcgtgcacacacacacactccggccccggcccaacgtgtggcccttacccttgtattcctgtgccaatgacgttaggtcgtacacgcgtcccaggtaagatacccagaggtcttcgggcctgttatgttgggccacctccgccggcgtgaaatagcgacgctgaaaatactccaagtctggcccagccaccaggccccggcgcggcatggctcttgctctgtcggtcactggatctcttggttactcctttgctcctcagcacgtactcactactactacgacctccgtcgcgtccgggagccgaggggagagcgtttatccgctgacatggaaaccattgtccttttccggccaccgtccactgagataaatatcaggggcggggtttggactgcacgtgttcacgggaaacgtagtatgagtcccgcgtggggcatataaggatcaagtaattgagttgcgccgctttcaggagttgcggggtggggcagagaacgaatacgctccgttttaattcagtggcctgggctacatgggatatttaggacagactatctctctgagacagaaaaacaagggaggaggcagtatgaaagaatgtattctcgctaaattccagtttctaaaggatgtgtaagaaaccagaggtaaaggtctcgcgatatcttaagacatccggcgtagtacgcttcagtgagccacagcgctagagaagtaggagaagctcgcgagatctgtgccgttgccgaggagactaggagggggaggagaggggatctcgcgaaaggaaagaggtcgggagcgctcgcgagatctcggaccacccaacctgaaaggtgcttaggaagttgaaaggcccagaggaggcctccgggcaaatggccggagctggaccgaccatgctgctacgagaagagaatggctgttgcagtcggcgtcagagcagctccagtgctggggattcggacggagagcgcgaggactcggcggctgagcgcgcccgacagcagctagaggcgctgctcaacaagactatgcgcattcgcatgacagatggacggacactggtcggctgcttcctctgcactgaccgtgactgcaatgtcatcctgggctcggcgcaggagttcctcaagccgtcggattccttctctgccggggagccccgtgtgctgggcctggccatggtacccggacaccacatcgtttccattgaggtgcagagggagagtctgaccgggcctccgtatctctgaccacgatggcgcttacctttcagacttcattaaacttatgaccgaaaaaaaaaaaaaaaaaaaaaaaaaaaaaaaaccgtgtgtgtggggcggcccggggcccccggagagaaagttttcagagagacccatgcgggggggggcgcgggggccccaggagagggaaagggaaacgtggggccaaaagggggttccctaagggaaaccgggggccaggaaaaaggggcgggggattcttccccaataaaaaaggccgggggggaaacgcggagggtggggaaaaaactccgaaggggggctccggaggggccaaaagggggaccaactcaaggggggtcccaggggaacccgaaattcaaataggccgggggggggaacggaaagga

SEQ ID NO: 281703 - DNA, 1185 bp, Homo sapiens
cccaggagtttgagattggcctgggcaacatagggaggccccatctctacaaaaattaaaacttagctggttgtggtggtgaatgcccgcagtcccagctactcagaagactgaggtggactacgtgagcccaggaggtcagggatgcagtgagccgttgacagcaccactgctccagcctgtaggacacagcaagaccctgtttgactcagtcttaaacaaaaaaagcccagaagggagggcagagattccagaaccagaaagtggatgagacttgagagccccggggggtgagcatgagtgggattctctcccaaccctggacgaacgggtggagatcccaacacggagaatcagttctagttggtactactggagctagaggcagggggaattccctagtgtcctctcttcagctcctaggctcagaacttccctgtctccctctcaaatgagcagaagccctggaccaggcgggggtgggaggtgctgaaagcccctgacatagggcctggaagggatctcataaacttagacggagctggtctcaggaagtcagcctgggatggatgagggtttccagaaaggaggcggagtccggggcgccacgcagggaagggcgggcttccccgcggcctgaattggacaggggtcccctccagccctgtgcacgagaggatgacaggacccagggtggacgacaggacccgggtggacgagggtcccaggagaagcgcggagcggccccgggtcgtgggctcggccctagcgcgctctcccgcctcacgcccctgttccacccccagaccaggatcgtgctgattctccccctggacaagcggcagccgctggccaacgctgggcaacggattgactacgcgtccggcgctgggctgggctccccggcggcacccagattgcgcggagcgggcgaaggtagcgagcgcgagccgaggatgccggtactgctgctgctgcggcggcaagaggcgcggcggccggaagagggcggggccagggcagctctgagctggccgcggctgctctcgcgcttccggtccccggggaaggctccccgcgaagccggccccgccgaggagcagccgcgcaaacggtgccgctgccctcgcccgcagctttaaacgcttggcccggaccccgcccaataaagagtgcgtggcaacc

SEQ ID NO: 281704 - DNA, 572 bp, Homo sapiens
tgccagggcccagggggcagagcagacggagtgtgggccatcgtccccagtggtgaccagccctgccatgggaaactatagttcccacaaaaggaccaaagcacccaagcaggcccgcaaggagaggccggctgacatggacaaggcctggtggaaatcgttcctcaaccacctcactcggaagaagccggctaccaggatcgtgctgattctccccctggacaagcggcagccgctggccaacgctgggcaacggattgactacgcgtccggcgctgggctgggctccccggcggcacccagattgcgcggagcgggcgaaggtagcgagcgcgagccgaggatgccggtactgctgctgctgcggcggcaagaggcgcggcggccggaagagggcggggccagggcagctctgagctggccgcggctgctctcgcgcttccggtccccggggaaggctccccgcgaagccggccccgccgaggagcagccgcgcaaacggtgccgctgccctcgcccgcagctttaaacgcttggcccggaccccgcccaataaagagtgcgtggcaacc

SEQ ID NO: 281705 - DNA, 605 bp, Homo sapiens
acttggctgcgaggagcgccacgaaaggtcagaggaaggagctgtgggaagctcgcagcaggtatcggagcttaagccagtggatttgggggccctgggctccctagccggctgcggtgtgagaatggagtgggcaggaaagcagcgggactttcaggtaagggcagctccgggctgggatcatttggcctcctttcctggcccttctctccggctgttttctgggagtcaggcgagtgtctgtagtctctgctcggggtttggggctcaggaatgatgtcatgctccaacagttggattctattagcttaaggaggagggaaacagccaattttcttgactttgcaaatctagctgatctcactcttgctgaatctgaggtgtttagacttcactctaaaaagcatcattttacttttatttagcacaaaggcacaggatatttttacaggaagaatcttttatatggaaaaatctgagttaacatcactcccgtggtgtttgtagttcttacagggaaactccagtgccttttgagccgcttgttcgtcctagtgaacactgtctgttttgtctcttggtgctgctatgtctgacctgtaatg

SEQ ID NO: 281706 - DNA, 810 bp, Homo sapiens
  misc_feature (678)..(678): n is a, c, g, or t
  misc_feature (780)..(780): n is a, c, g, or t
  misc_feature (782)..(782): n is a, c, g, or t
  misc_feature (809)..(809): n is a, c, g, or t
cctcgatcccgctgtgaaccctgtccccaaacccaagcgcacctttgaatacgaggctgacaagaaccccaagagtaagcccagtaatggtctacctccttcacccacacctgctgctccacctcccttgccctccaccccagccccgccagtcacccggagacccaagaaggacatgcgtggtcaccgcaagtcccagagcagaaaatcctttgagtttgaggatgcatccagtctccagtccctgtacccctcttctcccactgagaatggtactgagaaccaacccaagtttggatccaaaagcactttagaagaaaatgcctatgaagatattgtgggagatctgcccaaggagaatccatatgaggatgtggacttaaagagccgaaaagcaggacgaaaatcccagcaactgtctgagaactccttggactctttgcacaggatgtggagtcctcaggacaggaagtacaacagcccgcccacacagctttccctgaaacccaacagccagtccctgcgcagtgggaactggtcagaaaggaagagccaccggctgccacgattacccaagaggcacagccatgacgacatgctgctgctggctcaactgagtctgccgtcctcaacctccaagcctcaatggaagacaagcctcagcaacaacaagcgaanctgctgtccaaaccgccgggcccggccgcaatcccaaagcttgtccaaaaggaatttaaactcccatcctacaaatggccaaagaagaagggaaagtaagangnatttaaaaaaaaggttgtcccaaggtnc

SEQ ID NO: 281707 - DNA, 862 bp, Homo sapiens
ctcagaggatcccgacgctctctgtaggggtgacgcttctcggtggggtgacgctctctctgtggggtgacgctctctctgtggggtgacgctctctctgtggggagcggctcctcctccgggccgcgcggctcccggcgagaccccatccaggcgccgcgcccggcccggctggggaacgcagagatttcacaccctttggagagtttctttcttggataattcaggaagatgagagactgcttaggcgccaccactagtaccatgagtccctgcactggttaaagccatcgccacaacctggacaggcagcaaggggctctgggtttgcagagagccgaaatgaccatgactgccaacaagaattccagcatcacccacggagctggtggcactaaagcccctcgggggactctgagcaggtctcagtcagtctctccacctccagttctctccccaccaaggagtcccatctacccgctcagtgatagtgaaacctcagcctgcaggtaccccagccactccagctcccgggtgctcctcaaggaccggcaccccccagctccttcaccccagaatcctcaagatccctccccagatacttccccacccacctgtcccttcaagaccgccagcttcggttatttggacagaagcccttcggcgtgcaagagagacgcccaaaaggaaagtgtccaaggcgcagcccaggatgtagcaggggtcgctgcctgcctcccccttgcccagagcacgccattcccggggccagcagctggcccccggggcgtcttgctgacccgtaccggtacccgcgcccacagcctgggcattccggagaagatatcagcatgggaaggtc

SEQ ID NO: 281708 - DNA, 4740 bp, Homo sapiens
agacccagacaactcttggtcggatggtgaggaggtgagggccgtccagtttgggggccaacttctcctccctgctgcccccggcccccgcctccctcacccctgtcccccaccctccctcgcacactctcggcgcggctttctcgctgcctccggcgcctccgagcgctcccctccgccgggctccagcagcccaccctctctgtcttgggtggaggcgcacatcctccacgccccctccactcaaatctgcgctccctcccctctctctccctgcagcccggccgcagcccggggcgcggatgcctgcccgccgcccgccctctctgcaggagcggctcctcctccgggccgcgcggctcccggcgagaccccatccaggcgccgcgcccggcccggctggggaacgcagagatttcacaccctttggagagtttctttcttggataattcaggaagatgagagactgcttaggcgccaccactagtaccatgagtccctgcactggttaaagccatcgccacaacctggacaggcagcaagggctctgggtttgcagagagccgaaatgaccatgactgccaacaagaattccagcatcacccacggagctggtggcactaaagcccctcgggggactctgagcaggtctcagtcagtctctccacctccagtcctctccccaccaaggagtcccatctacccgctcagtgatagtgaaacctcagcctgcaggtaccccagccactccagctcccgggtgctcctcaaggaccggcaccccccagctccttcaccccagaatcctcaagatccctccccagatacttccccacccacctgtcccttcaagaccgccagcttcggttatttggacagaagcccttcggcgtgcaagagagacacccaaaaggaaagtgtccaaggcgcagcccaggatgtagcaggggtcgctgcctgcctcccccttgcccagagcacgccattcccggggccagcagctggcccccggggcgtcttgctgacccgtaccggtacccgcagcccacagcctgggcatccgggagaagatatagcatgggaaggtcgccgagaggcgtcgcccaggatgagcatgtgtggagagaagcgggagggctctgggagcgagtgggcggccagtgagggctgccccagcctgggctgtcccagcgtggtgccgtccccctgcagctctgaaaagacctttgatttcaagggcctccggaggatgagcaggaccttctccgagtgttcctacccagagactgaggaggagggagaggcgctccctgtccgggactctttctaccggctggagaaacggctgggccggagtgagcccagcgccttcctcagggggcatggcagcaggaaggagagctcagcagtgctgagccggatccagaaaattgaacaggtcctgaaggagcagccgggccgggggctcccccagctccccagcagctgctacagcgtcgaccgggggaaaaggaagactggaaccttgggctccttggaggagccggcagggggcgcgagtgtgagcgctggcagccgggcagtcggagtggctggtgttgcgggggaggcgggcccacccccagagagggaaggcagtggttccactaagcccgggacccctggaaatagccctagctcccagcggctgccatcgaagagttccctcgatcccgctgtgaaccctgtccccaaacccaagcgcacctttgaatacgaggctgagaagaaccccaagagtaagcccagtaatggtctacctccttcacccacacctgctgctccacctcccttgccctccaccccagccccgccagtcacccggagacccaagaaggacatgcgtggtcaccgcaagtcccagagcagaaaatcctttgagtttgaggatgcatccagtctccagtccctgtacccctcttctcccactgagaatggtactgagaaccaacccaagtttggatccaaaagcactttagaagaaaatgcctatgaagatattgtgggagatctgcccaaggagaatccatatgaggatgtggacttaaagagccgaagagcaggacgaaaatcccagcaactgtctgagaactccttggactctttgcacaggatgtggagtcctcaggacaggaagtacaacagcccgcccacacagctttccctgaaacccaacagccagtccctgcgcagtgggaactggtcagaaaggaagagccaccggctgccacgattacccaagaggcacagccatgacgacatgctgctgctggctcagctgagtctgccgtcctcaccctccagcctcaatgaagacagcctcagcaccaccagcgagctgctgtccagccgccgggcccgccgcattcccaagcttgtccaaagaattaactccatctacaatgccaagagaggaaagaagagattaaaaaagttgtctatgtccagcattgaaacagcatcactgagagatgaaaacagtgagagcgagagcgactctgatgacaggttcaaagcccacacacagcgcctggtccacatccagtcgatgctgaagcgcgcccccagctatcgcacgctggagctggagctgctggagtggcaggagcgggagctttttgagtactttgtggtggtgtccctcaagaagaagccatcgcgaaacacctacctccccgaagtctcctaccagtttcccaagctggaccgacccaccaagcagatgcgagaggcagaggaaaggctcaaagccattccccagttttgcttccctgatgccaaggactggcttcctgtgtcagagtatagcagtgagaccttttctttcatgctgactggggaagatggcagcagacgctttggctactgcaggcgcttactgccaagtgggaaagggccccggttgccagaggtgtactgtgtcatcagccgccttggctgcttcggcttgttttccaaggtcctagatgaggtggagcgccggcgtgggatctccgctgcattggtctatcctttcatgagaagtctcatggagtcgcccttcccagccccagggaagaccatcaaagtgaagacattcctgccaggtgctggcaatgaggtgttagagctgcggcggcccatggactcaaggctggagcacgtggactttgagtgcctttttacctgcctcagtgtgcgccagctcatccgaatctttgcctcactgctgctggagcgccgggtcatttttgtggcagataagctcagtaccctctccagctgctcccacgcggtggtggccttgctctaccccttctcctggcagcacaccttcattcctgtcctcccggcctccatgattgacatcgtctgctgtcccacccccttcctggttggcctgctctccagctccctccccaaactgaaggagctgcctgtggaggaggcgctgatggtgaatctgggatctgaccgattcatccgacagatggacgacgaagacacgttgttacctaggaagttacaggcagctctggagcaggctctggagaggaagaatgagctgatctcccaggactctgacagcgactccgacgatgaatgtaataccctcaatgggctggtgtcggaggtgtttatccggttctttgtggagaccgttgggcactactccctctttctgacacagagtgagaagggagagagggcctttcagcgagaggccttccgcaaatctgtggcctccaaaagcatccgccgctttcttgaggtttttatggagtctcagatgtttgctggcttcatccaagacagggagctaagaaagtgtcgggcaaagggcctttttgagcagcgagtggagcagtacttagaagaactcccagacactgagcagagtggaatgaataagtttctccgaggtttgggcaacaaaatgaagtttctccacaagaagaattaagcctccttctcagtagcagagtccagtgccttgcagagcctgaagcctggggagaaggcccagcctgggaccctctgggctgctgtggctcctctgcccccacagatcctatcctccaagccagcccacctctgccttcatcatatcccaggatactgtttgtaaataatctgctgtaagctttcttaactgttttttgtaacaagcaaagagaatatggcaaatatttgtatattcccaaggggccgggtgctttcctgtcctgccagagcatggatgaagtttcgctgggtgctcgtgactggccagttttgtgcagctgactgtctcagccaaaccactgatcttccctggaggccttcggcctgcctgcctgcctgcctgaggtccccgctgccagtcccgggccctggagagcagatgctgtcttgttatgtacaggaggaccttttaaaaaaatcaagtttctattttttgctggtagtccgcatacccataccctctgtttttgaaaggcaaaggccaatcagtccccatttgtagcatggcaccagggtcttaggcctagtcctctcattcctcccaccctccgagatggtcagtgtgtcatgggaagcccacccccagctctgccagtgctctctgggcctggctcccagtcagtggtggccacgatgcggtacagggcatccctccttcccatctacgggtgttctcaataaacaatgtacagttgtttgggcccagaaaaaaaaaa

SEQ ID NO: 281709 - DNA, 2839 bp, Homo sapiens
cagctgcatgactcatgagctgaggggccaggcagaagccattctctttggttcacaggaattctgcttgtttatttgtgtgtgtgtgagttcgtgtgtttccttcttcccttctcccccttctctaactcttcctcctctgcaggagatctgcccaaggagaatccatatgaggatgtggacttaaagagccgaagagcaggacgaaaatcccagcaactgtctgagaactccttggactctttgcacaggatgtggagtcctcaggacaggaagtacaacagcccgcccacacagctttccctgaaacccaacagccagtccctgcgcagtgggaactggtcagaaaggaagagccaccggctgccacgattacccaagaggcacagccatgacgacatgctgctgctggctcagctgagtctgccgtcctcaccctccagcctcaatgaagacagcctcagcaccaccagcgagctgctgtccagccgccgggcccgccgcattcccaagcttgtccaaagaattaactccatctacaatgccaagagaggaaagaagagattaaaaaagttgtctatgtccagcattgaaacagcatcactgagagatgaaaacagtgagagcgagagcgactctgatgacaggttcaaagcccacacacagcgcctggtccacatccagtcgatgctgaagcgcgcccccagctatcgcacgctggagctggagctgctggagtggcaggagcgggagctttttgagtactttgtggtggtgtccctcaagaagaagccatcgcgaaacacctacctccccgaagtctcctaccagtttcccaagctggaccgacccaccaagcagatgcgagaggcagaggaaaggctcaaagccattccccagttttgcttccctgatgccaaggactggcttcctgtgtcagagtatagcagtgagaccttttctttcatgctgactggggaagatggcagcagacgctttggctactgcaggcgcttactgccaagtgggaaagggccccggttgccagaggtgtactgtgtcatcagccgccttggctgcttcggcttgttttccaaggtcctagatgaggtggagcgccggcgtgggatctccgctgcattggtctatcctttcatgagaagtctcatggagtcgcccttcccagccccagggaagaccatcaaagtgaagacattcctgccaggtgctggcaatgaggtgttagagctgcggcggcccatggactcaaggctggagcacgtggactttgagtgcctttttacctgcctcagtgtgcgccagctcatccgaatctttgcctcactgctgctggagcgccgggtcatttttgtggcagataagctcagtaccctctccagctgctcccacgcggtggtggccttgctctaccccttctcctggcagcacaccttcattcctgtcctcccggcctccatgattgacatcgtctgctgtcccacccccttcctggttggcctgctctccagctccctccccaaactgaaggagctgcctgtggaggaggcgctgatggtgaatctgggatctgaccgattcatccgacagatggacgacgaagacacgttgttacctaggaagttacaggcagctctggagcaggctctggagaggaagaatgagctgatctcccaggactctgacagcgactccgacgatgaatgtaataccctcaatgggctggtgtcggaggtgtttatccggttctttgtggagaccgttgggcactactccctctttctgacacagagtgagaagggagagagggcctttcagcgagaggccttccgcaaatctgtggcctccaaaagcatccgccgctttcttgaggtttttatggagtctcagatgtttgctggcttcatccaagacagggagctaagaaagtgtcgggcaaagggcctttttgagcagcgagtggagcagtacttagaagaactcccagacactgagcagagtggaatgaataagtttctccgaggtttgggcaacaaaatgaagtttctccacaagaagaattaagcctccttctcagtagcagagtccagtgccttgcagagcctgaagcctggggagaaggcccagcctgggaccctctgggctgctgtggctcctctgcccccacagatcctatcctccaagccagcccacctctgccttcatcatatcccaggatactgtttgtaaataatctgctgtaagctttcttaactgttttttgtaacaagcaaagagaatatggcaaatatttgtatattcccaaggggccgggtgctttcctgtcctgccagagcatggatgaagtttcgctgggtgctcgtgactggccagttttgtgcagctgactgtctcagccaaaccactgatcttccctggaggccttcggcctgcctgcctgcctgcctgaggtccccgctgccagtcccgggccctggagagcagatgctgtcttgttatgtacaggaggaccttttaaaaaaatcaagtttctattttttgctggtagtccgcatacccataccctctgtttttgaaaggcaaaggccaatcagtccccatttgtagcatggcaccagggtcttaggcctagtcctctcattcctcccaccctccgagatggtcagtgtgtcatgggaagcccacccccagctctgccagtgctctctgggcctggctcccagtcagtggtggccacgatgcggtacagggcatccctccttcccatctacgggtgttctcaataaacaatgtacagttgtttgggcccagaaaaaaaaaa

SEQ ID NO: 281710 - DNA, 2091 bp, Homo sapiens
actataccaccctataccaccctgataccaccaacatatatttattgagtacctactgtgtgccaggggctggtggggtggtataggaggctctggaccgacccaccaagcagatgcgagaggcagaggaaaggctcaaagccattccccagttttgcttccctgatgccaaggactggcttcctgtgtcagagtatagcagtgagaccttttctttcatgctgactggggaagatggcagcagacgctttggctactgcaggcgcttactgccaagtgggaaagggccccggttgccagaggtgtactgtgtcatcagccgccttggctgcttcggcttgttttccaaggtcctagatgaggtggagcgccggcgtgggatctccgctgcattggtctatcctttcatgagaagtctcatggagtcgcccttcccagccccagggaagaccatcaaagtgaagacattcctgccaggtgctggcaatgaggtgttagagctgcggcggcccatggactcaaggctggagcacgtggactttgagtgcctttttacctgcctcagtgtgcgccagctcatccgaatctttgcctcactgctgctggagcgccgggtcatttttgtggcagataagctcagtaccctctccagctgctcccacgcggtggtggccttgctctaccccttctcctggcagcacaccttcattcctgtcctcccggcctccatgattgacatcgtctgctgtcccacccccttcctggttggcctgctctccagctccctccccaaactgaaggagctgcctgtggaggaggcgctgatggtgaatctgggatctgaccgattcatccgacagatggacgacgaagacacgttgttacctaggaagttacaggcagctctggagcaggctctggagaggaagaatgagctgatctcccaggactctgacagcgactccgacgatgaatgtaataccctcaatgggctggtgtcggaggtgtttatccggttctttgtggagaccgttgggcactactccctctttctgacacagagtgagaagggagagagggcctttcagcgagaggccttccgcaaatctgtggcctccaaaagcatccgccgctttcttgaggtttttatggagtctcagatgtttgctggcttcatccaagacagggagctaagaaagtgtcgggcaaagggcctttttgagcagcgagtggagcagtacttagaagaactcccagacactgagcagagtggaatgaataagtttctccgaggtttgggcaacaaaatgaagtttctccacaagaagaattaagcctccttctcagtagcagagtccagtgccttgcagagcctgaagcctggggagaaggcccagcctgggaccctctgggctgctgtggctcctctgcccccacagatcctatcctccaagccagcccacctctgccttcatcatatcccaggatactgtttgtaaataatctgctgtaagctttcttaactgttttttgtaacaagcaaagagaatatggcaaatatttgtatattcccaaggggccgggtgctttcctgtcctgccagagcatggatgaagtttcgctgggtgctcgtgactggccagttttgtgcagctgactgtctcagccaaaccactgatcttccctggaggccttcggcctgcctgcctgcctgcctgaggtccccgctgccagtcccgggccctggagagcagatgctgtcttgttatgtacaggaggaccttttaaaaaaatcaagtttctattttttgctggtagtccgcatacccataccctctgtttttgaaaggcaaaggccaatcagtccccatttgtagcatggcaccagggtcttaggcctagtcctctcattcctcccaccctccgagatggtcagtgtgtcatgggaagcccacccccagctctgccagtgctctctgggcctggctcccagtcagtggtggccacgatgcggtacagggcatccctccttcccatctacgggtgttctcaataaacaatgtacagttgtttgggcccagaaaaaaaaaa

SEQ ID NO: 281711 - DNA, 2422 bp, Homo sapiens
  misc_feature (46)..(46): n is a, c, g, or t
tagtgcctggtctggcttggtctcctgtgcgtctctcagaatgctngctctgcccttgtgaagaaatctagcccaacagctggaatgagctgggtacagcagttccaagaggcccctcctgtgtaccagccatggtcattgtcagccaacaaagcccctgactgcccagctttggtgccctggcctggcctgaccttagtggcccctaagagagcctggaccatgaggtttcttttcctgaaggttctaccctctaattcagggctgagcttcctctttgccaccctgcccccccccaggccagctcccgtggggctgtgaatacagctattgtttcctgtggttgcagctgcctctgagcacattccaggaccattctgggagggacgatcccaaggtcttgttcttggcctggccgggtattcaagttctgccaatctggggtcttggaaaagatgtccttcctgttctgcctggggtctgcctctggctggagaggggaggggtaggtccagccagctcatgatccgttgctgatgttttaggttttccacaagttctttgtccctcttgcctagttctgatgtggggtgggagagggtacccacgatctgcattcactggccctaggggtttacaaaacctactgcctcctcagccacgggcccactgatgtgccccccaaacccgagacagcccttttccagatctttgtcagatgactgtcctgcgggttgctgcataccttcctggctgtttgcaggtacatttccctaagagagtagcattgttgtccttgaggcgctacgcagtgggaaagcggggactttaccagtctgcagggtccctgaaccccattagcatttttgttgcactgggaggtttacgatcaaaggctgtcctgagcctccagcgagctctaagttcctgggcctgggctcaggtactctgtctctctgtctgcccatcagtaccctctccagctgctcccacgcggtggtggccttgctctaccccttctcctggcagcacaccttcattcctgtcctcccggcctccatgattgacatcgtctgctgtcccacccccttcctggttggcctgctctccagctccctccccaaactgaaggagctgcctgtggaggaggcgctgatggtgaatctgggatctgaccgattcatccgacagatggacgacgaagacacgttgttacctaggaagttacaggcagctctggagcaggctctggagaggaagaatgagctgatctcccaggactctgacagcgactccgacgatgaatgtaataccctcaatgggctggtgtcggaggtgtttatccggttctttgtggagaccgttgggcactactccctctttctgacacagagtgagaagggagagagggcctttcagcgagaggccttccgcaaatctgtggcctccaaaagcatccgccgctttcttgaggtttttatggagtctcagatgtttgctggcttcatccaagacagggagctaagaaagtgtcgggcaaagggcctttttgagcagcgagtggagcagtacttagaagaactcccagacactgagcagagtggaatgaataagtttctccgaggtttgggcaacaaaatgaagtttctccacaagaagaattaagcctccttctcagtagcagagtccagtgccttgcagagcctgaagcctggggagaaggcccagcctgggaccctctgggctgctgtggctcctctgcccccacagatcctatcctccaagccagcccacctctgccttcatcatatcccaggatactgtttgtaaataatctgctgtaagctttcttaactgttttttgtaacaagcaaagagaatatggcaaatatttgtatattcccaaggggccgggtgctttcctgtcctgccagagcatggatgaagtttcgctgggtgctcgtgactggccagttttgtgcagctgactgtctcagccaaaccactgatcttccctggaggccttcggcctgcctgcctgcctgcctgaggtccccgctgccagtcccgggccctggagagcagatgctgtcttgttatgtacaggaggaccttttaaaaaaatcaagtttctattttttgctggtagtccgcatacccataccctctgtttttgaaaggcaaaggccaatcagtccccatttgtagcatggcaccagggtcttaggcctagtcctctcattcctcccaccctccgagatggtcagtgtgtcatgggaagcccacccccagctctgccagtgctctctgggcctggctcccagtcagtggtggccacgatgcggtacagggcatccctccttcccatctacgggtgttctcaataaacaatgtacagttgtttgggcccagaaaaaaaaaa

SEQ ID NO: 281712 - DNA, 1791 bp, Homo sapiens
caatcatggaggcgcggaggacaggaattaaggtgtgctcgccaggagccggggtagagcaaggccaccgccggcgtgggatctccgctgcattggtctatcctttcatgagaagtctcatggagtcgcccttcccagccccagggaagaccatcaaagtgaagacattcctgccaggtgctggcaatgaggtgttagagctgcggcggcccatggactcaaggctggagcacgtggactttgagtgcctttttacctgcctcagtgtgcgccagctcatccgaatctttgcctcactgctgctggagcgccgggtcatttttgtggcagataagctcagtaccctctccagctgctcccacgcggtggtggccttgctctaccccttctcctggcagcacaccttcattcctgtcctcccggcctccatgattgacatcgtctgctgtcccacccccttcctggttggcctgctctccagctccctccccaaactgaaggagctgcctgtggaggaggcgctgatggtgaatctgggatctgaccgattcatccgacagatggacgacgaagacacgttgttacctaggaagttacaggcagctctggagcaggctctggagaggaagaatgagctgatctcccaggactctgacagcgactccgacgatgaatgtaataccctcaatgggctggtgtcggaggtgtttatccggttctttgtggagaccgttgggcactactccctctttctgacacagagtgagaagggagagagggcctttcagcgagaggccttccgcaaatctgtggcctccaaaagcatccgccgctttcttgaggtttttatggagtctcagatgtttgctggcttcatccaagacagggagctaagaaagtgtcgggcaaagggcctttttgagcagcgagtggagcagtacttagaagaactcccagacactgagcagagtggaatgaataagtttctccgaggtttgggcaacaaaatgaagtttctccacaagaagaattaagcctccttctcagtagcagagtccagtgccttgcagagcctgaagcctggggagaaggcccagcctgggaccctctgggctgctgtggctcctctgcccccacagatcctatcctccaagccagcccacctctgccttcatcatatcccaggatactgtttgtaaataatctgctgtaagctttcttaactgttttttgtaacaagcaaagagaatatggcaaatatttgtatattcccaaggggccgggtgctttcctgtcctgccagagcatggatgaagtttcgctgggtgctcgtgactggccagttttgtgcagctgactgtctcagccaaaccactgatcttccctggaggccttcggcctgcctgcctgcctgcctgaggtccccgctgccagtcccgggccctggagagcagatgctgtcttgttatgtacaggaggaccttttaaaaaaatcaagtttctattttttgctggtagtccgcatacccataccctctgtttttgaaaggcaaaggccaatcagtccccatttgtagcatggcaccagggtcttaggcctagtcctctcattcctcccaccctccgagatggtcagtgtgtcatgggaagcccacccccagctctgccagtgctctctgggcctggctcccagtcagtggtggccacgatgcggtacagggcatccctccttcccatctacgggtgttctcaataaacaatgtacagttgtttgggcccagaaaaaaaaaa

SEQ ID NO: 281713 - DNA, 1633 bp, Homo sapiens
cctgacacccttcctctttgggctgctggcggtgggcacaggtcctagatgaggtggagcgccggcgtgggatctccgctgcattggtctatcctttcatgagaagtctcatggagtcgcccttcccagccccagggaagaccatcaaagtgaagacattcctgccaggtgctggcaatgagtaccctctccagctgctcccacgcggtggtggccttgctctaccccttctcctggcagcacaccttcattcctgtcctcccggcctccatgattgacatcgtctgctgtcccacccccttcctggttggcctgctctccagctccctccccaaactgaaggagctgcctgtggaggaggcgctgatggtgaatctgggatctgaccgattcatccgacagatggacgacgaagacacgttgttacctaggaagttacaggcagctctggagcaggctctggagaggaagaatgagctgatctcccaggactctgacagcgactccgacgatgaatgtaataccctcaatgggctggtgtcggaggtgtttatccggttctttgtggagaccgttgggcactactccctctttctgacacagagtgagaagggagagagggcctttcagcgagaggccttccgcaaatctgtggcctccaaaagcatccgccgctttcttgaggtttttatggagtctcagatgtttgctggcttcatccaagacagggagctaagaaagtgtcgggcaaagggcctttttgagcagcgagtggagcagtacttagaagaactcccagacactgagcagagtggaatgaataagtttctccgaggtttgggcaacaaaatgaagtttctccacaagaagaattaagcctccttctcagtagcagagtccagtgccttgcagagcctgaagcctggggagaaggcccagcctgggaccctctgggctgctgtggctcctctgcccccacagatcctatcctccaagccagcccacctctgccttcatcatatcccaggatactgtttgtaaataatctgctgtaagctttcttaactgttttttgtaacaagcaaagagaatatggcaaatatttgtatattcccaaggggccgggtgctttcctgtcctgccagagcatggatgaagtttcgctgggtgctcgtgactggccagttttgtgcagctgactgtctcagccaaaccactgatcttccctggaggccttcggcctgcctgcctgcctgcctgaggtccccgctgccagtcccgggccctggagagcagatgctgtcttgttatgtacaggaggaccttttaaaaaaatcaagtttctattttttgctggtagtccgcatacccataccctctgtttttgaaaggcaaaggccaatcagtccccatttgtagcatggcaccagggtcttaggcctagtcctctcattcctcccaccctccgagatggtcagtgtgtcatgggaagcccacccccagctctgccagtgctctctgggcctggctcccagtcagtggtggccacgatgcggtacagggcatccctccttcccatctacgggtgttctcaataaacaatgtacagttgtttgggcccagaaaaaaaaaa

SEQ ID NO: 281714 - DNA, 4158 bp, Homo sapiens
agacccagacaactcttggtcggatggtgaggaggtgagggccgtccagtttgggggccaacttctcctccctgctgcccccggcccccgcctccctcacccctgtcccccaccctccctcgcacactctcggcgcggctttctcgctgcctccggcgcctccgagcgctcccctccgccgggctccagcagcccaccctctctgtcttgggtggaggcgcacatcctccacgccccctccactcaaatctgcgctccctcccctctctctccctgcagcccggccgcagcccggggcgcggatgcctgcccgccgcccgccctctctgcaggagcggctcctcctccgggccgcgcggctcccggcgagaccccatccaggcgccgcgcccggcccggctggggaacgcagagatttcacaccctttggagagtttctttcttggataattcaggaagatgagagactgcttaggcgccaccactagtaccatgagtccctgcactggttaaagccatcgccacaacctggacaggcagcaagggctctgggtttgcagagagccgaaatgaccatgactgccaacaagaattccagcatcacccacggagctggtggcactaaagcccctcgggggactctgagcaggtctcagtcagtctctccacctccagtcctctccccaccaaggagtcccatctacccgctcagtgatagtgaaacctcagcctgcaggtaccccagccactccagctcccgggtgctcctcaaggaccggcaccccccagctccttcaccccagaatcctcaagatccctccccagatacttccccacccacctgtcccttcaagaccgccagcttcggttatttggacagaagcccttcggcgtgcaagagagacacccaaaaggaaagtgtccaaggcgcagcccaggatgtagcaggggtcgctgcctgcctcccccttgcccagagcacgccattcccggggccagcagctggcccccggggcgtcttgctgacccgtaccggtacccgcagcccacagcctgggcatccgggagaagatatagcatgggaaggtcgccgagaggcgtcgcccaggatgagcatgtgtggagagaagcgggagggctctgggagcgagtgggcggccagtgagggctgccccagcctgggctgtcccagcgtggtgccgtccccctgcagctctgaaaagacctttgatttcaagggcctccggaggatgagcaggaccttctccgagtgttcctacccagagactgaggaggagggagaggcgctccctgtccgggactctttctaccggctggagaaacggctgggccggagtgagcccagcgccttcctcagggggcatggcagcaggaaggagagctcagcagtgctgagccggatccagaaaattgaacaggtcctgaaggagcagccgggccgggggctcccccagctccccagcagctgctacagcgtcgaccgggggaaaaggaagactggaaccttgggctccttggaggagccggcagggggcgcgagtgtgagcgctggcagccgggcagtcggagtggctggtgttgcgggggaggcgggcccacccccagagagggaaggcagtggttccactaagcccgggacccctggaaatagccctagctcccagcggctgccatcgaagagttccctcgatcccgctgtgaaccctgtccccaaacccaagcgcacctttgaatacgaggctgagaagaaccccaagagtaagcccagtaatggtctacctccttcacccacacctgctgctccacctcccttgccctccaccccagccccgccagtcacccggagacccaagaaggacatgcgtggtcaccgcaagtcccagagcagaaaatcctttgagtttgaggatgcatccagtctccagtccctgtacccctcttctcccactgagaatggtactgagaaccaacccaagtttggatccaaaagcactttagaagaaaatgcctatgaagatattgtgggagatctgcccaaggagaatccatatgaggatgtggacttaaagagccgaagagcaggacgaaaatcccagcaactgtctgagaactccttggactctttgcacaggatgtggagtcctcaggacaggaagtacaacagcccgcccacacagctttccctgaaacccaacagccagtccctgcgcagtgggaactggtcagaaaggaagagccaccggctgccacgattacccaagaggcacagccatgacgacatgctgctgctggctcagctgagtctgccgtcctcaccctccagcctcaatgaagacagcctcagcaccaccagcgagctgctgtccagccgccgggcccgccgcattcccaagcttgtccaaagaattaactccatctacaatgccaagagaggaaagaagagattaaaaaagttgtctatgtccagcattgaaacagcatcactgagagatgaaaacagtgagagcgagagcgactctgatgacaggttcaaagcccacacacagcgcctggtccacatccagtcgatgctgaagcgcgcccccagctatcgcacgctggagctggagctgctggagtggcaggagcgggagctttttgagtactttgtggtggtgtccctcaagaagaagccatcgcgaaacacctacctccccgaagtctcctaccagtttcccaagctggaccgacccaccaagcagatgcgagaggcagaggaaaggctcaaagccattccccagttttgcttccctgatgccaaggactggcttcctgtgtcagagtatagcagtgagaccttttctttcatgctgactggggaagatggcagcagacgctttggctactgcaggcgcttactgccaagtgggaaagggccccggttgccagaggtgtactgtgtcatcagccgccttggctgcttcggcttgttttccaaggtcctagatgaggtggagcgccggcgtgggatctccgctgcattggtctatcctttcatgagaagtctcatggagtcgcccttcccagccccagggaagaccatcaaagtgaagacattcctgccaggtgctggcaatgagtaccctctccagctgctcccacgcggtggtggccttgctctaccccttctcctggcagcacaccttcattcctgtcctcccggcctccatgattgacatcgtctgctgtcccacccccttcctggttggcctgctctccagctccctccccaaactgaaggagctgcctgtggaggaggcgctgatggtgaatctgggatctgaccgattcatccgacagatggacgacgaagacacgttgttacctaggaagttacaggcagctctggagcaggctctggagaggaagaatgagctgatctcccaggactctgacagcgactccgacgatgcctctgggctgctgtggctcctctgcccccacagatcctatcctccaagccagcccacctctgccttcatcatatcccaggatactgtttgtaaataatctgctgtaagctttcttaactgttttttgtaacaagcaaagagaatatggcaaatatttgtatattcccaaggggccgggtgctttcctgtcctgccagagcatggatgaagtttcgctgggtgctcgtgactggccagttttgtgcagctgactgtctcagccaaaccactgatcttccctggaggccttcggcctgcctgcctgcctgcctgaggtccccgctgccagtcccgggccctggagagcagatgctgtcttgttatgtacaggaggaccttttaaaaaaatcaagtttctattttttgctggtagtccgcatacccataccctctgtttttgaaaggcaaaggccaatcagtccccatttgtagcatggcaccagggtcttaggcctagtcctctcattcctcccaccctccgagatggtcagtgtgtcatgggaagcccacccccagctctgccagtgctctctgggcctggctcccagtcagtggtggccacgatgcggtacagggcatccctccttcccatctacgggtgttctcaataaacaatgtacagttgtttgggcccagaaaaaaaaaa

SEQ ID NO: 281715 - DNA, 909 bp, Homo sapiens
agttggttgaatctataaacatggaacccatggacgcagaactcatggatatggaggacaggctgtatttaccatattgcattacaaagaggaatcccaggttcccacatacatcaggcaacaaaatgaagtttctccacaagaagaattaagcctccttctcagtagcagagtccagtgccttgcagagcctgaagcctggggagaaggcccagcctgggaccctctgggctgctgtggctcctctgcccccacagatcctatcctccaagccagcccacctctgccttcatcatatcccaggatactgtttgtaaataatctgctgtaagctttcttaactgttttttgtaacaagcaaagagaatatggcaaatatttgtatattcccaaggggccgggtgctttcctgtcctgccagagcatggatgaagtttcgctgggtgctcgtgactggccagttttgtgcagctgactgtctcagccaaaccactgatcttccctggaggccttcggcctgcctgcctgcctgcctgaggtccccgctgccagtcccgggccctggagagcagatgctgtcttgttatgtacaggaggaccttttaaaaaaatcaagtttctattttttgctggtagtccgcatacccataccctctgtttttgaaaggcaaaggccaatcagtccccatttgtagcatggcaccagggtcttaggcctagtcctctcattcctcccaccctccgagatggtcagtgtgtcatgggaagcccacccccagctctgccagtgctctctgggcctggctcccagtcagtggtggccacgatgcggtacagggcatccctccttcccatctacgggtgttctcaataaacaatgtacagttgtttgggcccagaaaaaaaaaa

SEQ ID NO: 281716 - DNA, 4493 bp, Homo sapiens
agacccagacaactcttggtcggatggtgaggaggtgagggccgtccagtttgggggccaacttctcctccctgctgcccccggcccccgcctccctcacccctgtcccccaccctccctcgcacactctcggcgcggctttctcgctgcctccggcgcctccgagcgctcccctccgccgggctccagcagcccaccctctctgtcttgggtggaggcgcacatcctccacgccccctccactcaaatctgcgctccctcccctctctctccctgcagcccggccgcagcccggggcgcggatgcctgcccgccgcccgccctctctgcaggagcggctcctcctccgggccgcgcggctcccggcgagaccccatccaggcgccgcgcccggcccggctggggaacgcagagatttcacaccctttggagagtttctttcttggataattcaggaagatgagagactgcttaggcgccaccactagtaccatgagtccctgcactggttaaagccatcgccacaacctggacaggcagcaagggctctgggtttgcagagagccgaaatgaccatgactgccaacaagaattccagcatcacccacggagctggtggcactaaagcccctcgggggactctgagcaggtctcagtcagtctctccacctccagtcctctccccaccaaggagtcccatctacccgctcagtgatagtgaaacctcagcctgcaggtaccccagccactccagctcccgggtgctcctcaaggaccggcaccccccagctccttcaccccagaatcctcaagatccctccccagatacttccccacccacctgtcccttcaagaccgccagcttcggttatttggacagaagcccttcggcgtgcaagagagacacccaaaaggaaagtgtccaaggcgcagcccaggatgtagcaggggtcgctgcctgcctcccccttgcccagagcacgccattcccggggccagcagctggcccccggggcgtcttgctgacccgtaccggtacccgcagcccacagcctgggcatccgggagaagatatagcatgggaaggtcgccgagaggcgtcgcccaggatgagcatgtgtggagagaagcgggagggctctgggagcgagtgggcggccagtgagggctgccccagcctgggctgtcccagcgtggtgccgtccccctgcagctctgaaaagacctttgatttcaagggcctccggaggatgagcaggaccttctccgagtgttcctacccagagactgaggaggagggagaggcgctccctgtccgggactctttctaccggctggagaaacggctgggccggagtgagcccagcgccttcctcagggggcatggcagcaggaaggagagctcagcagtgctgagccggatccagaaaattgaacaggtcctgaaggagcagccgggccgggggctcccccagctccccagcagctgctacagcgtcgaccgggggaaaaggaagactggaaccttgggctccttggaggagccggcagggggcgcgagtgtgagcgctggcagccgggcagtcggagtggctggtgttgcgggggaggcgggcccacccccagagagggaaggcagtggttccactaagcccgggacccctggaaatagccctagctcccagcggctgccatcgaagagttccctcgatcccgctgtgaaccctgtccccaaacccaagcgcacctttgaatacgaggctgagaagaaccccaagagtaagcccagtaatggtctacctccttcacccacacctgctgctccacctcccttgccctccaccccagccccgccagtcacccggagacccaagaaggacatgcgtggtcaccgcaagtcccagagcagaaaatcctttgagtttgaggatgcatccagtctccagtccctgtacccctcttctcccactgagaatggtactgagaaccaacccaagtttggatccaaaagcactttagaagaaaatgcctatgaagatattgtgggagatctgcccaaggagaatccatatgaggatgtggacttaaagagccgaagagcaggacgaaaatcccagcaactgtctgagaactccttggactctttgcacaggatgtggagtcctcaggacaggaagtacaacagcccgcccacacagctttccctgaaacccaacagccagtccctgcgcagtgggaactggtcagaaaggaagagccaccggctgccacgattacccaagaggcacagccatgacgacatgctgctgctggctcagctgagtctgccgtcctcaccctccagcctcaatgaagacagcctcagcaccaccagcgagctgctgtccagccgccgggcccgccgcattcccaagcttgtccaaagaattaactccatctacaatgccaagagaggaaagaagagattaaaaaagttgtctatgtccagcattgaaacagcatcactgagagatgaaaacagtgagagcgagagcgactctgatgacaggttcaaagcccacacacagcgcctggtccacatccagtcgatgctgaagcgcgcccccagctatcgcacgctggagctggagctgctggagtggcaggagcgggagctttttgagtactttgtggtggtgtccctcaagaagaagccatcgcgaaacacctacctccccgaagtctcctaccagtttcccaagctggaccgacccaccaagcagatgcgagaggcagaggaaaggctcaaagccattccccagttttgcttccctgatgccaaggactggcttcctgtgtcagagtatagcagtgagaccttttctttcatgctgactggggaagatggcagcagacgctttggctactgcaggcgcttactgccaagtgggaaagggccccggttgccagaggtgtactgtgtcatcagccgccttggctgcttcggcttgttttccaaggtcctagatgaggtggagcgccggcgtgggatctccgctgcattggtctatcctttcatgagaagtctcatggagtcgcccttcccagccccagggaagaccatcaaagtgaagacattcctgccaggtgctggcaatgaggtgttagagctgcggcggcccatggactcaaggctggagcacgtggactttgagtgcctttttacctgcctcagtgtgcgccagctcatccgaatctttgcctcactgctgctggagcgccgggtcatttttgtggcagataagctcagtaccctctccagctgctcccacgcggtggtggccttgctctaccccttctcctggcagcacaccttcattcctgtcctcccggcctccatgattgacatcgtctgctgtcccacccccttcctggttggcctgctctccagctccctccccaaactgaaggagctgcctgtggaggaggcgctgatggtgaatctgggatctgaccgattcatccgacagatggacgacgaagacacgttgttacctaggaagttacaggcagctctggagcaggctctggagaggaagaatgagctgatctcccaggactctgacagcgactccgacgatgaatgtaataccctcaatgggctggtgtcggaggtgtttatccggttctttgtggagaccgttgggcactactccctctttctgacacagagtgagaagggagagagggcctttcagcgagaggccttccgcaaatctgtggcctccaaaagcatccgccgctttcttgaggtttttatggagtctcagatgtttgctggcttcatccaagacagggagctaagaaagtgtcgggcaaagggcctttttgagcagcgagtggagcagtacttagaagaactcccagacactgagcagagtggaatgaataagtttctccgaggtttgggcaacaaaatgaagtttctccacaagaagaattaagcctccttctcagtagcagagtccagtgccttgcagagcctgaagcctggggagaaggcccagcctgggaccctctgggctgctgtggctcctctgcccccacagatcctatcctccaagccagcccacctctgccttcatcatatcccaggatactgtttgtaaataatctgctgtaagctttcttaactgttttttgtaacaagcaaagagaatatggcaaatatttgtatattcccaaggggccgggtgctttcctgtcctgccagagcatggatgaagtttcgctgggtgctcgtgactggccagttttgtgcagctgactgtctcagccaaaccactgatcttccctggaggccttcggcctgcctgcctgcctgcctgaggtccccgctgccagtcccgggccctggagagcagatgctgtcttgttatgtacaggaggaccttttaaaaaaatcaagtttctattttttgcttgttccgctgggaccggctcgatctaccttt

SEQ ID NO: 281717 - DNA, 508 bp, Homo sapiens
gatcctgatctgtcgtgcagcacgtcagtgcagtacgcttagtctgtcgtgactggccagttttgtgcagctgactgtctcagccaaaccactgatcttccctggaggccttcggcctgcctgcctgcctgcctgaggtccccgctgccagtcccgggccctggagagcagatgctgtcttgttatgtacaggaggaccttttaaaaaaatcaagtttctattttttgctggtagtccgcatacccataccctctgtttttgaaaggcaaaggccaatcagtccccatttgtagcatggcaccagggtcttaggcctagtcctctcattcctcccaccctccgagatggtcagtgtgtcatgggaagcccacccccagctctgccagtgctctctgggcctggctcccagtcagtggtggccacgatgcggtacagggcatccctccttcccatctacgggtgttctcaataaacaatgtacagttgtttgggcccagaaaaaaaaaa

SEQ ID NO: 281718 - DNA, 2808 bp, Homo sapiens
agacccagacaactcttggtcggatggtgaggaggtgagggccgtccagtttgggggccaacttctcctccctgctgcccccggcccccgcctccctcacccctgtcccccaccctccctcgcacactctcggcgcggctttctcgctgcctccggcgcctccgagcgctcccctccgccgggctccagcagcccaccctctctgtcttgggtggaggcgcacatcctccacgccccctccactcaaatctgcgctccctcccctctctctccctgcagcccggccgcagcccggggcgcggatgcctgcccgccgcccgccctctctgcaggagcggctcctcctccgggccgcgcggctcccggcgagaccccatccaggcgccgcgcccggcccggctggggaacgcagagatttcacaccctttggagagtttctttcttggataattcaggaagatgagagactgcttaggcgccaccactagtaccatgagtccctgcactggttaaagccatcgccacaacctggacaggcagcaagggctctgggtttgcagagagccgaaatgaccatgactgccaacaagaattccagcatcacccacggagctggtggcactaaagcccctcgggggactctgagcaggtctcagtcagtctctccacctccagtcctctccccaccaaggagtcccatctacccgctcagtgatagtgaaacctcagcctgcaggtaccccagccactccagctcccgggtgctcctcaaggaccggcaccccccagctccttcaccccagaatcctcaagatccctccccagatacttccccacccacctgtcccttcaagaccgccagcttcggttatttggacagaagcccttcggcgtgcaagagagacacccaaaaggaaagtgtccaaggcgcagcccaggatgtagcaggggtcgctgcctgcctcccccttgcccagagcacgccattcccggggccagcagctggcccccggggcgtcttgctgacccgtaccggtacccgcagcccacagcctgggcatccgggagaagatatagcatgggaaggtcgccgagaggcgtcgcccaggatgagcatgtgtggagagaagcgggagggctctgggagcgagtgggcggccagtgagggctgccccagcctgggctgtcccagcgtggtgccgtccccctgcagctctgaaaagacctttgatttcaagggcctccggaggatgagcaggaccttctccgagtgttcctacccagagactgaggaggagggagaggcgctccctgtccgggactctttctaccggctggagaaacggctgggccggagtgagcccagcgccttcctcagggggcatggcagcaggaaggagagctcagcagtgctgagccggatccagaaaattgaacaggtcctgaaggagcagccgggccgggggctcccccagctccccagcagctgctacagcgtcgaccgggggaaaaggaagactggaaccttgggctccttggaggagccggcagggggcgcgagtgtgagcgctggcagccgggcagtcggagtggctggtgttgcgggggaggcgggcccacccccagagagggaaggcagtggttccactaagcccgggacccctggaaatagccctagctcccagcggctgccatcgaagagttccctcgatcccgctgtgaaccctgtccccaaacccaagcgcacctttgaatacgaggctgagaagaaccccaagagtaagcccagtaatggtctacctccttcacccacacctgctgctccacctcccttgccctccaccccagccccgccagtcacccggagacccaagaaggacatgcgtggtcaccgcaagtcccagagcagaaaatcctttgagtttgaggatgcatccagtctccagtccctgtacccctcttctcccactgagaatggtactgagaaccaacccaagtttggatccaaaagcactttagaagaaaatgcctatgaagatattgtgggagatctgcccaaggagaatccatatgaggatgtggacttaaagagccgaagagcaggacgaaaatcccagcaactgtctgagaactccttggactctttgcacaggatgtggagtcctcaggacaggaagtacaacagcccgcccacacagctttccctgaaacccaacagccagtccctgcgcagtgggaactggtcagaaaggaagagccaccggctgccacgattacccaagaggcacagccatgacgacatgctgctgctggctcagctgagtctgccgtcctcaccctccagcctcaatgaagacagcctcagcaccaccagcgagctgctgtccagccgccgggcccgccgcattcccaagcttgtccaaagaattaactccatctacaatgccaagagaggaaagaagagattaaaaaagttgtcttgttatgtacaggaggaccttttaaaaaaatcaagtttctattttttgctggtagtccgcatacccataccctctgtttttgaaaggcaaaggccaatcagtccccatttgtagcatggcaccagggtcttaggcctagtcctctcattcctcccaccctccgagatggtcagtgtgtcatgggaagcccacccccagctctgccagtgctctctgggcctggctcccagtcagtggtggccacgatgcggtacagggcatccctccttcccatctacgggtgttctcaataaacaatgtacagttgtttgggcccagaaaaaaaaaa

SEQ ID NO: 281719 - DNA, 778 bp, Homo sapiens
tctggctgatgaggaccttggtctcactctagcgtcttttctaccccaggtagtttaggaaggaaaacccaaagacatgtggcaaccccaaagatactttctgctgacagaaaactaattattcctccttctgaggccttgcctcaagccattgcaggagatgaaaggcacttcctcttccttggaagccagaaaaatcacttagggtgagggatatgatgaaagtggtgctctggtttctactttaattcatccagcaattatgtttcaacttccatgttcagaacatagtttctggccttctgcagctcgtaggctagttacaaggctatgagcacaagaaagcaagcttccagaggccgggtgtggtggctcacgcctgtaatctcagcacttggggaggccaaggcgggtggatcacctgaggtcaggagttcgagaccagcctggctaacatggtgaaaccccatctctactaaaaatacaaaaagtgcacctgtaatcccagctacttgggaggctgaggcaggagaattgcttgaacccaggaggcggaggttgcaatgagctgagatggcgccattgcactctaacttgggcaacaagagtgaaactcggtctcaaaaagagcttccagaacagaagagtggtactggctggaagtcttgttggggagaggaagactacaccaggaagattgaggaaggctttgcaggctcttgacctgaacctcaaagattgtcttttcccttccagaatgtaataccctcaatgggct

SEQ ID NO: 281720 - DNA, 164 bp, Homo sapiens
tagcagggtagacgagagacctggaaaagagcaggttggaaggggaaagcagctccagttgcttcgtggagggccagagggcagcacccacttggctggccccggcccactttcccatcgctctcctgcaggtgttagagctgcggcggcccatggactcaagg

SEQ ID NO: 281721 - DNA, 362 bp, Homo sapiens
catagcatgtttctgtttaaagagaaattgagaccaaagaggttaagtggcttgcgtaaaaccacacagtgattaataccggtgccctaattagagctctcacgtgttttcactaccctggatcagatcacagttataatccagtcttcctaatccttcctctcccactgacagggttagggctacaaggaggagagggagtggaggttggaagggataacactgaacattctctcttgtcctctctggcccacaggcaacaaaatgaagtttctccacaagaagaattaagcctccttctcagtagcagagtccagtgccttgcagagcctgaagcctggggagaaggcccagcctgggac

SEQ ID NO: 281722 - DNA, 702 bp, Homo sapiens
acttggctgcgaggagcgccacgaaaggtcagaggaaggagctgtgggaagctcgcagcaggtatcggagcttaagccagtggatttgggggccctgggctccctagccggctgcggtgtgagaatggagtgggcaggaaagcagcgggactttcagggctctgggtttgcagagagccgaaatgaccatgactgccaacaagaattccagcatcacccacggagctggtggcactaaagcccctcgggggactctgagcaggtctcagtcagtctctccacctccagttctctccccaccaaggagtcccatctacccgctcagtgatagtgaaacctcagcctgcaggtaccccagccactccagctcccgggtgctcctcaaggaccggcaccccccagctccttcaccccagaatcctcaagatccctccccagatacttccccacccacctgtcccttcaagaccgccagcttcggttatttggacagaagcccttcggcgtgcaagagagacgcccaaaaggaaagtgtccaaggcgcagcccaggatgtagcaggggtcgctgcctgcctcccccttgcccagagcacgccattcccggggccagcagctggcccccggggcgtcttgctgacccgtaccggtacccgcgcccacagcctgggcattccggagaagatatcagcatgggaaggtc

SEQ ID NO: 281723 - DNA, 914 bp, Homo sapiens
gggggtcgggggtcgggggtcgggggctgggggctgaggactgagtcgagccagcagcccagggcatctgtccacgctgtcagaggagcctctgggcgtggggctggcccttagagggctactgcgctgcttaacttgcctttcacagaaaaccactggaggagatactcacaaaaatgaaggggaagaacaggaaacaggaagacatgagatgaaggaaacaggagattcaacatggatttcacaccctttggagagtttctttcttggataattcaggaagatgagagactgcttaggcgccaccactagtaccatgagtccctgcactggttaaagccatcgccacaacctggacaggcagcaaggggctctgggtttgcagagagccgaaatgaccatgactgccaacaagaattccagcatcacccacggagctggtggcactaaagcccctcgggggactctgagcaggtctcagtcagtctctccacctccagttctctccccaccaaggagtcccatctacccgctcagtgatagtgaaacctcagcctgcaggtaccccagccactccagctcccgggtgctcctcaaggaccggcaccccccagctccttcaccccagaatcctcaagatccctccccagatacttccccacccacctgtcccttcaagaccgccagcttcggttatttggacagaagcccttcggcgtgcaagagagacgcccaaaaggaaagtgtccaaggcgcagcccaggatgtagcaggggtcgctgcctgcctcccccttgcccagagcacgccattcccggggccagcagctggcccccggggcgtcttgctgacccgtaccggtacccgcgcccacagcctgggcattccggagaagatatcagcatgggaaggtc

SEQ ID NO: 281724 - DNA, 797 bp, Homo sapiens
agacccagacaactcttggtcggatggtgaggaggtgagggccgtccagtttgggggccaacttctcctccctgctgcccccggcccccgcctccctcacccctgtcccccaccctccctcgcacactctcggcgcggctttctcgctgcctccggcgcctccgagcgctcccctccgccgggctccagcagcccaccctctctgtcttgggtggaggcgcacatcctccacgccccctccactcaaatctgcgctccctcccctctctctccctgcagcccggccgcagcccggggcgcggatgcctgcccgccgcccgccctctctgcaggagcggctcctcctccgggccgcgcggctcccggcgagaccccatccaggcgccgcgcccggcccggctggggaacgcagaggaagatgagagactgcttaggcgccaccactagtaccatgagtccctgcactggttaaagccatcgccacaacctggacaggcagcaaggggctctgggtttgcagagagccgaaatgaccatgactgccaacaagaattccagcatcacccacggagctggtggcactaaagcccctcgggggactctgagcaggtctcagtcagtctctccacctccagttctctccccaccccccacagagagagcgtcaggaaacgaccctgcaggccccacagagagagcgtcgctttgtgagcttcccctgaaggacagacttctccttttggggtgcgttggctttcttcttctcccgctcctccatctccccacagagagagcgt

SEQ ID NO: 281725 - DNA, 3252 bp, Homo sapiens
ctcagaggatcccgacgctctctgtaggggtgacgcttctcggtggggtgacgctctctctgtggggtgacgctctctctgtggggtgacgctctctctgtggggagcggctcctcctccgggccgcgcggctcccggcgagaccccatccaggcgccgcgcccggcccggctggggaacgcagagatttcacaccctttggagagtttctttcttggataattcaggaagatgagagactgcttaggcgccaccactagtaccatgagtccctgcactggttaaagccatcgccacaacctggacaggcagcaagggctctgggtttgcagagagccgaaatgaccatgactgccaacaagaattccagcatcacccacggagctggtggcactaaagcccctcgggggactctgagcagaaaatcctttgagtttgaggatgcatccagtctccagtccctgtacccctcttctcccactgagaatggtactgagaaccaacccaagtttggatccaaaagcactttagaagaaaatgcctatgaagatattgtgggagatctgcccaaggagaatccatatgaggatgtggacttaaagagccgaagagcaggacgaaaatcccagcaactgtctgagaactccttggactctttgcacaggatgtggagtcctcaggacaggaagtacaacagcccgcccacacagctttccctgaaacccaacagccagtccctgcgcagtgggaactggtcagaaaggaagagccaccggctgccacgattacccaagaggcacagccatgacgacatgctgctgctggctcagctgagtctgccgtcctcaccctccagcctcaatgaagacagcctcagcaccaccagcgagctgctgtccagccgccgggcccgccgcattcccaagcttgtccaaagaattaactccatctacaatgccaagagaggaaagaagagattaaaaaagttgtctatgtccagcattgaaacagcatcactgagagatgaaaacagtgagagcgagagcgactctgatgacaggttcaaagcccacacacagcgcctggtccacatccagtcgatgctgaagcgcgcccccagctatcgcacgctggagctggagctgctggagtggcaggagcgggagctttttgagtactttgtggtggtgtccctcaagaagaagccatcgcgaaacacctacctccccgaagtctcctaccagtttcccaagctggaccgacccaccaagcagatgcgagaggcagaggaaaggctcaaagccattccccagttttgcttccctgatgccaaggactggcttcctgtgtcagagtatagcagtgagaccttttctttcatgctgactggggaagatggcagcagacgctttggctactgcaggcgcttactgccaagtgggaaagggccccggttgccagaggtgtactgtgtcatcagccgccttggctgcttcggcttgttttccaaggtcctagatgaggtggagcgccggcgtgggatctccgctgcattggtctatcctttcatgagaagtctcatggagtcgcccttcccagccccagggaagaccatcaaagtgaagacattcctgccaggtgctggcaatgaggtgttagagctgcggcggcccatggactcaaggctggagcacgtggactttgagtgcctttttacctgcctcagtgtgcgccagctcatccgaatctttgcctcactgctgctggagcgccgggtcatttttgtggcagataagctcagtaccctctccagctgctcccacgcggtggtggccttgctctaccccttctcctggcagcacaccttcattcctgtcctcccggcctccatgattgacatcgtctgctgtcccacccccttcctggttggcctgctctccagctccctccccaaactgaaggagctgcctgtggaggaggcgctgatggtgaatctgggatctgaccgattcatccgacagatggacgacgaagacacgttgttacctaggaagttacaggcagctctggagcaggctctggagaggaagaatgagctgatctcccaggactctgacagcgactccgacgatgaatgtaataccctcaatgggctggtgtcggaggtgtttatccggttctttgtggagaccgttgggcactactccctctttctgacacagagtgagaagggagagagggcctttcagcgagaggccttccgcaaatctgtggcctccaaaagcatccgccgctttcttgaggtttttatggagtctcagatgtttgctggcttcatccaagacagggagctaagaaagtgtcgggcaaagggcctttttgagcagcgagtggagcagtacttagaagaactcccagacactgagcagagtggaatgaataagtttctccgaggtttgggcaacaaaatgaagtttctccacaagaagaattaagcctccttctcagtagcagagtccagtgccttgcagagcctgaagcctggggagaaggcccagcctgggaccctctgggctgctgtggctcctctgcccccacagatcctatcctccaagccagcccacctctgccttcatcatatcccaggatactgtttgtaaataatctgctgtaagctttcttaactgttttttgtaacaagcaaagagaatatggcaaatatttgtatattcccaaggggccgggtgctttcctgtcctgccagagcatggatgaagtttcgctgggtgctcgtgactggccagttttgtgcagctgactgtctcagccaaaccactgatcttccctggaggccttcggcctgcctgcctgcctgcctgaggtccccgctgccagtcccgggccctggagagcagatgctgtcttgttatgtacaggaggaccttttaaaaaaatcaagtttctattttttgctggtagtccgcatacccataccctctgtttttgaaaggcaaaggccaatcagtccccatttgtagcatggcaccagggtcttaggcctagtcctctcattcctcccaccctccgagatggtcagtgtgtcatgggaagcccacccccagctctgccagtgctctctgggcctggctcccagtcagtggtggccacgatgcggtacagggcatccctccttcccatctacgggtgttctcaataaacaatgtacagttgtttgggcccagaaaaaaaaaa

SEQ ID NO: 281726 - DNA, 4695 bp, Homo sapiens
agacccagacaactcttggtcggatggtgaggaggtgagggccgtccagtttgggggccaacttctcctccctgctgcccccggcccccgcctccctcacccctgtcccccaccctccctcgcacactctcggcgcggctttctcgctgcctccggcgcctccgagcgctcccctccgccgggctccagcagcccaccctctctgtcttgggtggaggcgcacatcctccacgccccctccactcaaatctgcgctccctcccctctctctccctgcagcccggccgcagcccggggcgcggatgcctgcccgccgcccgccctctctgcaggagcggctcctcctccgggccgcgcggctcccggcgagaccccatccaggcgccgcgcccggcccggctggggaacgcagagatttcacaccctttggagagtttctttcttggataattcaggaagatgagagactgcttaggcgccaccactagtaccatgagtccctgcactggttaaagccatcgccacaacctggacaggcagcaagggctctgggtttgcagagagccgaaatgaccatgactgccaacaagaattccagcatcacccacggagctggtggcactaaagcccctcgggggactctgagcaggtctcagtcagtctctccacctccagtcctctccccaccaaggagtcccatctacccgctcagtgatagtgaaacctcagcctgcaggtaccccagccactccagctcccgggtgctcctcaaggaccggcaccccccagctccttcaccccagaatcctcaagatccctccccagatacttccccacccacctgtcccttcaagaccgccagcttcggttatttggacagaagcccttcggcgtgcaagagagacacccaaaaggaaagtgtccaaggcgcagcccaggatgtagcaggggtcgctgcctgcctcccccttgcccagagcacgccattcccggggccagcagctggcccccggggcgtcttgctgacccgtaccggtacccgcagcccacagcctgggcatccgggagaagatatagcatgggaaggtcgccgagaggcgtcgcccaggatgagcatgtgtggagagaagcgggagggctctgggagcgagtgggcggccagtgagggctgccccagcctgggctgtcccagcgtggtgccgtccccctgcagctctgaaaagacctttgatttcaagggcctccggaggatgagcaggaccttctccgagtgttcctacccagagactgaggaggagggagaggcgctccctgtccgggactctttctaccggctggagaaacggctgggccggagtgagcccagcgccttcctcagggggcatggcagcaggaaggagagctcagcagtgctgagccggatccagaaaattgaacaggtcctgaaggagcagccgggccgggggctcccccagctccccagcagctgctacagcgtcgaccgggggaaaaggaagactggaaccttgggctccttggaggagccggcagggggcgcgagtgtgagcgctggcagccgggcagtcggagtggctggtgttgcgggggaggcgggcccacccccagagagggaaggcagtggttccactaagcccgggacccctggaaatagccctagctcccagcggctgccatcgaagagttccctcgatcccgctgtgaaccctgtccccaaacccaagcgcacctttgaatacgaggctgagaagaaccccaagagtaagcccagtaatggtctacctccttcacccacacctgctgctccacctcccttgccctccaccccagccccgccagtcacccggagacccaagaaggacatgcgtggtcaccgcaagtcccagagcagaaaatcctttgagtttgaggatgcatccagtctccagtccctgtacccctcttctcccactgagaatggtactgagaaccaacccaagtttggatccaaaagcactttagaagaaaatgcctatgaagatattgtgggagatctgcccaaggagaatccatatgaggatgtggacttaaagagccgaagagcaggacgaaaatcccagcaactgtctgagaactccttggactctttgcacaggatgtggagtcctcaggacaggaagtacaacagcccgcccacacagctttccctgaaacccaacagccagtccctgcgcagtgggaactggtcagaaaggaagagccaccggctgccacgattacccaagaggcacagccatgacgacatgctgctgctggctcagctgagtctgccgtcctcaccctccagcctcaatgaagacagcctcagcaccaccagcgagctgctgtccagccgccgggcccgccgcattcccaagcttgtccaaagaattaactccatctacaatgccaagagaggaaagaagagattaaaaaagttgtctatgtccagcattgaaacagcatcactgagagcccacacacagcgcctggtccacatccagtcgatgctgaagcgcgcccccagctatcgcacgctggagctggagctgctggagtggcaggagcgggagctttttgagtactttgtggtggtgtccctcaagaagaagccatcgcgaaacacctacctccccgaagtctcctaccagtttcccaagctggaccgacccaccaagcagatgcgagaggcagaggaaaggctcaaagccattccccagttttgcttccctgatgccaaggactggcttcctgtgtcagagtatagcagtgagaccttttctttcatgctgactggggaagatggcagcagacgctttggctactgcaggcgcttactgccaagtgggaaagggccccggttgccagaggtgtactgtgtcatcagccgccttggctgcttcggcttgttttccaaggtcctagatgaggtggagcgccggcgtgggatctccgctgcattggtctatcctttcatgagaagtctcatggagtcgcccttcccagccccagggaagaccatcaaagtgaagacattcctgccaggtgctggcaatgaggtgttagagctgcggcggcccatggactcaaggctggagcacgtggactttgagtgcctttttacctgcctcagtgtgcgccagctcatccgaatctttgcctcactgctgctggagcgccgggtcatttttgtggcagataagctcagtaccctctccagctgctcccacgcggtggtggccttgctctaccccttctcctggcagcacaccttcattcctgtcctcccggcctccatgattgacatcgtctgctgtcccacccccttcctggttggcctgctctccagctccctccccaaactgaaggagctgcctgtggaggaggcgctgatggtgaatctgggatctgaccgattcatccgacagatggacgacgaagacacgttgttacctaggaagttacaggcagctctggagcaggctctggagaggaagaatgagctgatctcccaggactctgacagcgactccgacgatgaatgtaataccctcaatgggctggtgtcggaggtgtttatccggttctttgtggagaccgttgggcactactccctctttctgacacagagtgagaagggagagagggcctttcagcgagaggccttccgcaaatctgtggcctccaaaagcatccgccgctttcttgaggtttttatggagtctcagatgtttgctggcttcatccaagacagggagctaagaaagtgtcgggcaaagggcctttttgagcagcgagtggagcagtacttagaagaactcccagacactgagcagagtggaatgaataagtttctccgaggtttgggcaacaaaatgaagtttctccacaagaagaattaagcctccttctcagtagcagagtccagtgccttgcagagcctgaagcctggggagaaggcccagcctgggaccctctgggctgctgtggctcctctgcccccacagatcctatcctccaagccagcccacctctgccttcatcatatcccaggatactgtttgtaaataatctgctgtaagctttcttaactgttttttgtaacaagcaaagagaatatggcaaatatttgtatattcccaaggggccgggtgctttcctgtcctgccagagcatggatgaagtttcgctgggtgctcgtgactggccagttttgtgcagctgactgtctcagccaaaccactgatcttccctggaggccttcggcctgcctgcctgcctgcctgaggtccccgctgccagtcccgggccctggagagcagatgctgtcttgttatgtacaggaggaccttttaaaaaaatcaagtttctattttttgctggtagtccgcatacccataccctctgtttttgaaaggcaaaggccaatcagtccccatttgtagcatggcaccagggtcttaggcctagtcctctcattcctcccaccctccgagatggtcagtgtgtcatgggaagcccacccccagctctgccagtgctctctgggcctggctcccagtcagtggtggccacgatgcggtacagggcatccctccttcccatctacgggtgttctcaataaacaatgtacagttgtttgggcccagaaaaaaaaaa

SEQ ID NO: 281727 - DNA, 2200 bp, Homo sapiens
gcacgtcctctcccccacgccagctttccctgaaacccaacagccagtccctgcgcagtgggaactggtcagaaaggaagagccaccggctgccacgattacccaagaggcacagccatgacgacatgctgctgctggctcagctgagtctgccgtcctcaccctccagcctcaatgaagacagcctcagcaccaccagcgagctgctgtccagccgccgggcccgccgcattcccaagcttgtccaaagaattaactccatctacaatgccaagagaggaaagaagagattaaaaaagttgtctatgtccagcattgaaacagcatcactgagagatgaaaacagtgagagcgagagcgactctgatgacaggttcaaagccaagtgggaaagggccccggttgccagaggtgtactgtgtcatcagccgccttggctgcttcggcttgttttccaaggtcctagatgaggtggagcgccggcgtgggatctccgctgcattggtctatcctttcatgagaagtctcatggagtcgcccttcccagccccagggaagaccatcaaagtgaagacattcctgccaggtgctggcaatgaggtgttagagctgcggcggcccatggactcaaggctggagcacgtggactttgagtgcctttttacctgcctcagtgtgcgccagctcatccgaatctttgcctcactgctgctggagcgccgggtcatttttgtggcagataagctcagtaccctctccagctgctcccacgcggtggtggccttgctctaccccttctcctggcagcacaccttcattcctgtcctcccggcctccatgattgacatcgtctgctgtcccacccccttcctggttggcctgctctccagctccctccccaaactgaaggagctgcctgtggaggaggcgctgatggtgaatctgggatctgaccgattcatccgacagatggacgacgaagacacgttgttacctaggaagttacaggcagctctggagcaggctctggagaggaagaatgagctgatctcccaggactctgacagcgactccgacgatgaatgtaataccctcaatgggctggtgtcggaggtgtttatccggttctttgtggagaccgttgggcactactccctctttctgacacagagtgagaagggagagagggcctttcagcgagaggccttccgcaaatctgtggcctccaaaagcatccgccgctttcttgaggtttttatggagtctcagatgtttgctggcttcatccaagacagggagctaagaaagtgtcgggcaaagggcctttttgagcagcgagtggagcagtacttagaagaactcccagacactgagcagagtggaatgaataagtttctccgaggtttgggcaacaaaatgaagtttctccacaagaagaattaagcctccttctcagtagcagagtccagtgccttgcagagcctgaagcctggggagaaggcccagcctgggaccctctgggctgctgtggctcctctgcccccacagatcctatcctccaagccagcccacctctgccttcatcatatcccaggatactgtttgtaaataatctgctgtaagctttcttaactgttttttgtaacaagcaaagagaatatggcaaatatttgtatattcccaaggggccgggtgctttcctgtcctgccagagcatggatgaagtttcgctgggtgctcgtgactggccagttttgtgcagctgactgtctcagccaaaccactgatcttccctggaggccttcggcctgcctgcctgcctgcctgaggtccccgctgccagtcccgggccctggagagcagatgctgtcttgttatgtacaggaggaccttttaaaaaaatcaagtttctattttttgctggtagtccgcatacccataccctctgtttttgaaaggcaaaggccaatcagtccccatttgtagcatggcaccagggtcttaggcctagtcctctcattcctcccaccctccgagatggtcagtgtgtcatgggaagcccacccccagctctgccagtgctctctgggcctggctcccagtcagtggtggccacgatgcggtacagggcatccctccttcccatctacgggtgttctcaataaacaatgtacagttgtttgggcccagaaaaaaaaaa

SEQ ID NO: 281728 - DNA, 1639 bp, Homo sapiens
ctgcatagcagggtagacgagagacctggaaaagagcaggtgttagagctgcggcggcccatggactcaaggctggagcacgtggactttgagtgcctttttacctgcctcagtgtgcgccagctcatccgaatctttgcctcactgctgctggagcgccgggtcatttttgtggcagataagctcagtaccctctccagctgctcccacgcggtggtggccttgctctaccccttctcctggcagcacaccttcattcctgtcctcccggcctccatgattgacatcgtctgctgtcccacccccttcctggttggcctgctctccagctccctccccaaactgaaggagctgcctgtggaggaggcgctgatggtgaatctgggatctgaccgattcatccgacagatggacgacgaagacacgttgttacctaggaagttacaggcagctctggagcaggctctggagaggaagaatgagctgatctcccaggactctgacagcgactccgacgatgaatgtaataccctcaatgggctggtgtcggaggtgtttatccggttctttgtggagaccgttgggcactactccctctttctgacacagagtgagaagggagagagggcctttcagcgagaggccttccgcaaatctgtggcctccaaaagcatccgccgctttcttgaggtttttatggagtctcagatgtttgctggcttcatccaagacagggagctaagaaagtgtcgggcaaagggcctttttgagcagcgagtggagcagtacttagaagaactcccagacactgagcagagtggaatgaataagtttctccgaggtttgggcaacaaaatgaagtttctccacaagaagaattaagcctccttctcagtagcagagtccagtgccttgcagagcctgaagcctggggagaaggcccagcctgggaccctctgggctgctgtggctcctctgcccccacagatcctatcctccaagccagcccacctctgccttcatcatatcccaggatactgtttgtaaataatctgctgtaagctttcttaactgttttttgtaacaagcaaagagaatatggcaaatatttgtatattcccaaggggccgggtgctttcctgtcctgccagagcatggatgaagtttcgctgggtgctcgtgactggccagttttgtgcagctgactgtctcagccaaaccactgatcttccctggaggccttcggcctgcctgcctgcctgcctgaggtccccgctgccagtcccgggccctggagagcagatgctgtcttgttatgtacaggaggaccttttaaaaaaatcaagtttctattttttgctggtagtccgcatacccataccctctgtttttgaaaggcaaaggccaatcagtccccatttgtagcatggcaccagggtcttaggcctagtcctctcattcctcccaccctccgagatggtcagtgtgtcatgggaagcccacccccagctctgccagtgctctctgggcctggctcccagtcagtggtggccacgatgcggtacagggcatccctccttcccatctacgggtgttctcaataaacaatgtacagttgtttgggcccagaaaaaaaaaa

SEQ ID NO: 281729 - DNA, 985 bp, Homo sapiens
gggtgtctagaggatccctttgggtcttgctctgacgtttttatggagtctcagatgtttgctggcttcatccaagacagggagctaagaaagtgtcgggcaaagggcctttttgagcagcgagtggagcagtacttagaagaactcccagacactgagcagagtggaatgaataagtttctccgaggtttgggcaacaaaatgaagtttctccacaagaagaattaagcctccttctcagtagcagagtccagtgccttgcagagcctgaagcctggggagaaggcccagcctgggaccctctgggctgctgtggctcctctgcccccacagatcctatcctccaagccagcccacctctgccttcatcatatcccaggatactgtttgtaaataatctgctgtaagctttcttaactgttttttgtaacaagcaaagagaatatggcaaatatttgtatattcccaaggggccgggtgctttcctgtcctgccagagcatggatgaagtttcgctgggtgctcgtgactggccagttttgtgcagctgactgtctcagccaaaccactgatcttccctggaggccttcggcctgcctgcctgcctgcctgaggtccccgctgccagtcccgggccctggagagcagatgctgtcttgttatgtacaggaggaccttttaaaaaaatcaagtttctattttttgctggtagtccgcatacccataccctctgtttttgaaaggcaaaggccaatcagtccccatttgtagcatggcaccagggtcttaggcctagtcctctcattcctcccaccctccgagatggtcagtgtgtcatgggaagcccacccccagctctgccagtgctctctgggcctggctcccagtcagtggtggccacgatgcggtacagggcatccctccttcccatctacgggtgttctcaataaacaatgtacagttgtttgggcccagaaaaaaaaaa

SEQ ID NO: 281730 - DNA, 550 bp, Homo sapiens
aagatcgtaggatcactaatagttatccgcagggatgcgggctggtgactggtccggctatatacatggatgaagtttcgctgggtgctcgtgactggccagttttgtgcagctgactgtctcagccaaaccactgatcttccctggaggccttcggcctgcctgcctgcctgcctgaggtccccgctgccagtcccgggccctggagagcagatgctgtcttgttatgtacaggaggaccttttaaaaaaatcaagtttctattttttgctggtagtccgcatacccataccctctgtttttgaaaggcaaaggccaatcagtccccatttgtagcatggcaccagggtcttaggcctagtcctctcattcctcccaccctccgagatggtcagtgtgtcatgggaagcccacccccagctctgccagtgctctctgggcctggctcccagtcagtggtggccacgatgcggtacagggcatccctccttcccatctacgggtgttctcaataaacaatgtacagttgtttgggcccagaaaaaaaaaa

SEQ ID NO: 281731 - DNA, 2556 bp, Homo sapiens
agacccagacaactcttggtcggatggtgaggaggtgagggccgtccagtttgggggccaacttctcctccctgctgcccccggcccccgcctccctcacccctgtcccccaccctccctcgcacactctcggcgcggctttctcgctgcctccggcgcctccgagcgctcccctccgccgggctccagcagcccaccctctctgtcttgggtggaggcgcacatcctccacgccccctccactcaaatctgcgctccctcccctctctctccctgcagcccggccgcagcccggggcgcggatgcctgcccgccgcccgccctctctgcaggagcggctcctcctccgggccgcgcggctcccggcgagaccccatccaggcgccgcgcccggcccggctggggaacgcagagatttcacaccctttggagagtttctttcttggataattcaggaagatgagagactgcttaggcgccaccactagtaccatgagtccctgcactggttaaagccatcgccacaacctggacaggcagcaagggctctgggtttgcagagagccgaaatgaccatgactgccaacaagaattccagcatcacccacggagctggtggcactaaagcccctcgggggactctgagcaggtctcagtcagtctctccacctccagtcctctccccaccaaggagtcccatctacccgctcagtgatagtgaaacctcagcctgcaggtaccccagccactccagctcccgggtgctcctcaaggaccggcaccccccagctccttcaccccagaatcctcaagatccctccccagatacttccccacccacctgtcccttcaagaccgccagcttcggttatttggacagaagcccttcggcgtgcaagagagacacccaaaaggaaagtgtccaaggcgcagcccaggatgtagcaggggtcgctgcctgcctcccccttgcccagagcacgccattcccggggccagcagctggcccccggggcgtcttgctgacccgtaccggtacccgcagcccacagcctgggcatccgggagaagatatagcatgggaaggtcgccgagaggcgtcgcccaggatgagcatgtgtggagagaagcgggagggctctgggagcgagtgggcggccagtgagggctgccccagcctgggctgtcccagcgtggtgccgtccccctgcagctctgaaaagacctttgatttcaagggcctccggaggatgagcaggaccttctccgagtgttcctacccagagactgaggaggagggagaggcgctccctgtccgggactctttctaccggctggagaaacggctgggccggagtgagcccagcgccttcctcagggggcatggcagcaggaaggagagctcagcagtgctgagccggatccagaaaattgaacaggtcctgaaggagcagccgggccgggggctcccccagctccccagcagctgctacagcgtcgaccgggggaaaaggaagactggaaccttgggctccttggaggagccggcagggggcgcgagtgtgagcgctggcagccgggcagtcggagtggctggtgttgcgggggaggcgggcccacccccagagagggaaggcagtggttccactaagcccgggacccctggaaatagccctagctcccagcggctgccatcgaagagttccctcgatcccgctgtgaaccctgtccccaaacccaagcgcacctttgaatacgaggctgagaagaaccccaagagtaagcccagtaatggtctacctccttcacccacacctgctgctccacctcccttgccctccaccccagccccgccagtcacccggagacccaagaaggacatgcgtggtcaccgcaagtcccagagcagaaaatcctttgagtttgaggatgcatccagtctccagtccctgtacccctcttctcccactgagaatggtactgagaaccaacccaagtttggatccaaaagcactttagaagaaaatgcctatgaagatattgtgggagatctgcccaaggagaatccatatgaggatgtggacttaaagagccgaagagcaggacgaaaatcccagcaactgtctgagaactccttggactctttgcacaggatgtggagtcctcaggacaggaagtacaacagcccgcccacacagctttccctgaaacccaacagccagtccctgcgcagtgggaactggtcagaaaggaagagccaccggctgccacgattacccaagaggcacagccatgacgacatgctgctgctggctcagctgagtctgccgtcctcaccctccagcctcaatgaagacagcctcagcaccaccagcgagctgctgtccagccgccgggcccgccgcattcccaaggtaccctccccagaggcagcccactggagccgggcaggtgggcgggcaggcagccagcctttctctctctttcctggcttccttccttccctaatctggactgcttcctcgattccctttgaataaattctgggtccgtgca

SEQ ID NO: 281732 - DNA, 634 bp, Homo sapiens
ttctaggtgttctgtgggcccatcaggcccttgtgaagaaatctagcccaacagctggaatgagctgggtacagcagttccaagaggcccctcctgtgtaccagccatggtcattgtcagccaacaaagcccctgactgcccagctttggtgccctggcctggcctgaccttagtggcccctaagagagcctggaccatgaggtttcttttcctgaaggttctaccctctaattcagggctgagcttcctctttgccaccctgcccccccccaggccagctcccgtggggctgtgaatacagctattgtttcctgtggttgcagctgcctctgagcacattccaggaccattctgggagggacgatcccaaggtcttgttcttggcctggccgggtattcaagttctgccaatctggggtcttggaaaagatgtccttcctgttctgcctggggtctgcctctggctggagaggggaggggtaggtccagccagctcatgatccgttgctgatgttttaggttttccacaagttctttgtccctcttgcctagttctgatgtggggtgggagagggtacccacgatctgcattcactggccctaggggtttacaaaacctactgcctcctcagc

SEQ ID NO: 281733 - DNA, 435 bp, Homo sapiens
ttccccaaacactggaaactctctgatgtgcccttctgactgcagggtaggaatcagcaaaagtatgttcagaaacttaattgcccaagcatcttctttagtggtgactgggacagtcacaagatcatgaagttctagttctctagctaggtgtatgctggcaccagtgtccaacacagctgccttctcaggtgccaagaaaccaggaagctccttcccatatgctgtttgcagttcacaccagttctgagtagccaggtccagaaactccaggaactctgagtcactcaagtctgagaaccctgaggcttctgctgacactgtctcctcttctcttgtctctgccatggtacagctctggattgggctagaagggccctgcataacatgttaaagaaatgcattgttcaaataaaaacgttctcaaaagcaaat

SEQ ID NO: 281734 - DNA, 2087 bp, Homo sapiens
atggcgccggaggagaactcggggagcgaactcttgctgcagagtttcaagcgccgcttcctggcggcgcgcgccctgcgctccttcccctggcagagcttagaagcaaagttaagagactcatcagattctgagctgctgcgggatattttgcagaagcacgaggctgtccacacagagcctttggatgagctgtacgaggtgctggcggagaccctgatggccaaggagtccacccagggccaccggagctatttgctgacgtgctgtattgcccagaagccatcgtgtcgctggtcggggtcctgcggaggctggctgcctgccgggagcaccagcgggctcctcaattctacatggcccttaccgtctgcaacccagagatgtgccagctgttcaccaccgagctatgctggactgggatcagatgggaagcggaagctcatcatgaccagaaactgtttccctacagagagcacttggagatggcaaagctgaacctcacactgtaggactcacacatgactccaacgggattgtgagaattaagtcactctcgtgggaagaatttttatatgggaaagcggataaaactttcattggactggaatgtttggagaatgttaaattccaaatcaggaaccacaaactgcgctctaataagacatcggctatctaagcatgtgggttccccctttctgccagcagttctggttcttaagaaaatcaccataaatcagacatgaaaattctggctccaaaaatagcattttcattgtgcaaatgaaaacgtgtgtatcaagtatgacattcccccaacgtggacacacttggttcctcacaaagccaagcccgctgcagctgccacatccctggacacactcgtttcctcacaaagccaagcccgctgcagctgccacatccctggacacactcggttcctcacaaagccaagcccgctgcagctgccacatccctggacacactcgtttcctcacaaagccaagcccgctgcagctgccacatccctggacacactcgtttcctcacaaagccaagcccgctgcagctgccacatccctggacacacttggttcctcacaaagccaagccggctgcagctgccacatccctgggtttatgatgcagcaggtgcttttttcaagacaggaatcaaagtgttaggaacatggcagaaaggtgacacctggagaccaaatgcagggtaaggagtactgcagaggtcacagggaagtcacagaacagtaatacgctagcaggggcatggggcgtgaagaacagaagacaggaagcgtttcagagactccaaagaagaaatcagggccaaccacagcttcccgagtcattcaccaggtggcaccactgccttcatttcagcttccggccactgggaggcgctgctcgaaagggtttgccctgagacaccaagaagaagctgcgggaaggacagcaggggccctggggttttagcctctggcccaggagttatgtgtccataaccaaagggagcacagtctgcacccagctctcatcccatcagagctgctgcgactcccgcaggttcttccagaactggtttagcttgcctgcaggatcaggaaagtttgagaaaagcatctgcaaaatactaaagagcagagcttacttcattgtctgtccccaccccatcccaggtcaccacctggctgaacccaggtccccgacccaaaaacaacccctcccaagtccctaactccctcacttggacttgagacccttcacaacccagcagcgctccgcctccaacttgacatcatgctttctggaaacttccccgtgtgtcccactttcccacacttggtgcgctggagcaccttccggcctctacatgctgtacgttcccctgtgagcaccctcctctcagcctctggccaacacagtcccacccatctgtgggtaacaagggggtgtgggtgttcttttcagccttgctaaactgtctgaatcaaggatcacaaactacagcctgcaggccaaatccagcccacagcctgtgtttgtaaataaagctttattggaacaaagcc

SEQ ID NO: 281735 - DNA, 2127 bp, Homo sapiens
atggcgccggaggagaactcggggagcgaactcttgctgcagagtttcaagcgccgcttcctggcggcgcgcgccctgcgctccttcccctggcagagcttagaagcaaagttaagagactcatcagattctgagctgctgcgggatattttgcagaagacgtgctgtattgcccagaagccatcgtgtcgctggtcggggtcctgcggaggctggctgcctgccgggagcaccagcgggctcctcaattctacatggcccttaccgtctgcaacccagagatgtgccagctgttcaccaccgagctatgtgagcccccacgcccacccgggcctgcatggtccccaagctgtccctacaggactccagtggaagtgaaagaactgggggccggggaaaagctaggaagccccacactcccacaccatgcggggaactagggcagaggccggctggactgggatcagatgggaagcggaagctcatcatgaccagaaactgtttccctacagagagcacttggagatggcaaagctgaacctcacactgtaggactcacacatgactccaacgggattgtgagaattaagtcactctcgtgggaagaatttttatatgggaaagcggataaaactttcattggactggaatgtttggagaatgttaaattccaaatcaggaaccacaaactgcgctctaataagacatcggctatctaagcatgtgggttccccctttctgccagcagttctggttcttaagaaaatcaccataaatcagacatgaaaattctggctccaaaaatagcattttcattgtgcaaatgaaaacgtgtgtatcaagtatgacattcccccaacgtggacacacttggttcctcacaaagccaagcccgctgcagctgccacatccctggacacactcgtttcctcacaaagccaagcccgctgcagctgccacatccctggacacactcggttcctcacaaagccaagcccgctgcagctgccacatccctggacacactcgtttcctcacaaagccaagcccgctgcagctgccacatccctggacacactcgtttcctcacaaagccaagcccgctgcagctgccacatccctggacacacttggttcctcacaaagccaagccggctgcagctgccacatccctgggtttatgatgcagcaggtgcttttttcaagacaggaatcaaagtgttaggaacatggcagaaaggtgacacctggagaccaaatgcagggtaaggagtactgcagaggtcacagggaagtcacagaacagtaatacgctagcaggggcatggggcgtgaagaacagaagacaggaagcgtttcagagactccaaagaagaaatcagggccaaccacagcttcccgagtcattcaccaggtggcaccactgccttcatttcagcttccggccactgggaggcgctgctcgaaagggtttgccctgagacaccaagaagaagctgcgggaaggacagcaggggccctggggttttagcctctggcccaggagttatgtgtccataaccaaagggagcacagtctgcacccagctctcatcccatcagagctgctgcgactcccgcaggttcttccagaactggtttagcttgcctgcaggatcaggaaagtttgagaaaagcatctgcaaaatactaaagagcagagcttacttcattgtctgtccccaccccatcccaggtcaccacctggctgaacccaggtccccgacccaaaaacaacccctcccaagtccctaactccctcacttggacttgagacccttcacaacccagcagcgctccgcctccaacttgacatcatgctttctggaaacttccccgtgtgtcccactttcccacacttggtgcgctggagcaccttccggcctctacatgctgtacgttcccctgtgagcaccctcctctcagcctctggccaacacagtcccacccatctgtgggtaacaagggggtgtgggtgttcttttcagccttgctaaactgtctgaatcaaggatcacaaactacagcctgcaggccaaatccagcccacagcctgtgtttgtaaataaagctttattggaacaaagcc

SEQ ID NO: 281736 - DNA, 934 bp, Homo sapiens
atggcgccggaggagaactcggggagcgaactcttgctgcagagtttcaagcgccgcttcctggcggcgcgcgccctgcgctccttcccctggcagagcttagaagcaaagttaagagactcatcagattctgagctgctgcgggatattttgcagaagactgtgaagcatcctgtgtgtgtgaagcacccgccgtcagtcaagtatgcccggtgctttctctcagaactcatcaaaaagccctcgggaggctcagtcacactctccaagagcacagccatcatctcccacggcatcacagtcctggtcacatgggatgccgccctctaccttgcagaatgggccatcgagaacccagcagccttcactgataggactgtcctagagcttggcagtggtgctggcctcacaggcctggccatctgcaagatgtgccacccccgggcatacatcttcagggactgtcacagctgggtcctctagcagctctgagggaatgtccttctcaatggcctctcattaggtgcagatatcactgccaacttagacagccccagggtgacagtggcccagctggactgggacgtcgcgacggtctgtcagctctctgccatccagccagatgttgtcattgcagcaggtaatgcccagccccgggcatcctgtgcaggcggtgtccttgcagctctaaccagctcttggctctgggaaaagggaacaatggatgctgttgggcatggacatgatggggcttccagaagagttactctgggcctccagggtgacatcaaaggacaggggtgcctcttaagctgaccttcaagccacagccctcttgttggagacaggcatactcccgttacagtcgtcaccacatggctctgtcccagagccatgcctgtgtgtttcagagaccacaggaggaaaacaacca

SEQ ID NO: 281737 - DNA, 965 bp, Homo sapiens
accacaaaggaaaaacatagcatattgaatcatcacaaggcagccaccccttcatagccacacccggcccctggccacaactgacctgtgctccatcgccagaattccattgtctcaggaatgttcaatgaatggaatcctgtgtggcctgagatgagtgtctttcatgtcctgtcatggtttattcagccatgtggtggatggctgcttgtcttctaagccacttgccttctgatcgctggactgactctctcgccttctcttggtgctgccctcgggaggctcagtcacactctccaagagcacagccatcatctcccacggcatcacagtcctggtcacatgggatgccgccctctaccttgcagaatgggccatcgagaacccagcagccttcactgataggactgtcctagagcttggcagtggtgctggcctcacaggcctggccatctgcaagatgtgccacccccgggcatacatcttcagggactgtcacagctgggtcctctagcagctctgagggaatgtccttctcaatggcctctcattaggtgcagatatcactgccaacttagacagccccagggtgacagtggcccagctggactgggacgtcgcgacggtctgtcagctctctgccatccagccagatgttgtcattgcagcaggtaatgcccagccccgggcatcctgtgcaggcggtgtccttgcagctctaaccagctcttggctctgggaaaagggaacaatggatgctgttgggcatggacatgatggggcttccagaagagttactctgggcctccagggtgacatcaaaggacaggggtgcctcttaagctgaccttcaagccacagccctcttgttggagacaggcatactcccgttacagtcgtcaccacatggctctgtcccagagccatgcctgtgtgtttcagagaccacaggaggaaaacaacca

SEQ ID NO: 281738 - DNA, 260 bp, Homo sapiens
catagatacagaaaaccacaaaggaaaaacatagcatattgaatcatcacaaggcagccaccccttcatagccacacccggcccctggccacaactgacctgtgctccatcgccagaattccattgtctcaggaatgttcaatgaatggaatcctgtgtggcctgagatgagtgtctttcatgccacgtgacacccttgaggcctgtgcaagctgttggcatgtcaacagttagctgcttctcattgctgagtggcgatt

SEQ ID NO: 281739 - DNA, 1985 bp, Homo sapiens
atggcgccggaggagaactcggggagcgaactcttgctgcagagtttcaagcgccgcttcctggcggcgcgcgccctgcgctccttcccctggcagagcttagaagcaaagttaagagactcatcagattctgagctgctgcgggatattttgcagaagacgtgctgtattgcccagaagccatcgtgtcgctggtcggggtcctgcggaggctggctgcctgccgggagcaccagcgggctcctcaattctacatggcccttaccgtctgcaacccagagatgtgccagctgttcaccaccgagctatgctggactgggatcagatgggaagcggaagctcatcatgaccagaaactgtttccctacagagagcacttggagatggcaaagctgaacctcacactgtaggactcacacatgactccaacgggattgtgagaattaagtcactctcgtgggaagaatttttatatgggaaagcggataaaactttcattggactggaatgtttggagaatgttaaattccaaatcaggaaccacaaactgcgctctaataagacatcggctatctaagcatgtgggttccccctttctgccagcagttctggttcttaagaaaatcaccataaatcagacatgaaaattctggctccaaaaatagcattttcattgtgcaaatgaaaacgtgtgtatcaagtatgacattcccccaacgtggacacacttggttcctcacaaagccaagcccgctgcagctgccacatccctggacacactcgtttcctcacaaagccaagcccgctgcagctgccacatccctggacacactcggttcctcacaaagccaagcccgctgcagctgccacatccctggacacactcgtttcctcacaaagccaagcccgctgcagctgccacatccctggacacactcgtttcctcacaaagccaagcccgctgcagctgccacatccctggacacacttggttcctcacaaagccaagccggctgcagctgccacatccctgggtttatgatgcagcaggtgcttttttcaagacaggaatcaaagtgttaggaacatggcagaaaggtgacacctggagaccaaatgcagggtaaggagtactgcagaggtcacagggaagtcacagaacagtaatacgctagcaggggcatggggcgtgaagaacagaagacaggaagcgtttcagagactccaaagaagaaatcagggccaaccacagcttcccgagtcattcaccaggtggcaccactgccttcatttcagcttccggccactgggaggcgctgctcgaaagggtttgccctgagacaccaagaagaagctgcgggaaggacagcaggggccctggggttttagcctctggcccaggagttatgtgtccataaccaaagggagcacagtctgcacccagctctcatcccatcagagctgctgcgactcccgcaggttcttccagaactggtttagcttgcctgcaggatcaggaaagtttgagaaaagcatctgcaaaatactaaagagcagagcttacttcattgtctgtccccaccccatcccaggtcaccacctggctgaacccaggtccccgacccaaaaacaacccctcccaagtccctaactccctcacttggacttgagacccttcacaacccagcagcgctccgcctccaacttgacatcatgctttctggaaacttccccgtgtgtcccactttcccacacttggtgcgctggagcaccttccggcctctacatgctgtacgttcccctgtgagcaccctcctctcagcctctggccaacacagtcccacccatctgtgggtaacaagggggtgtgggtgttcttttcagccttgctaaactgtctgaatcaaggatcacaaactacagcctgcaggccaaatccagcccacagcctgtgtttgtaaataaagctttattggaacaaagcc

SEQ ID NO: 281740 - DNA, 463 bp, Homo sapiens
ctgagatactctagacctccgctcatctggaaaagggggacaggcaggcccctccaggcccaccagcccggttcccgcggcccatttggtcagcttccccgccacgggcacctcgttcttccacaccctgtcctggtggggctgtccgggaagacacctaccctgtgggcactcagggtgtgcccagcccggccctggctcagggaggacctcagggttcctggagattcctgcagtggaactccatgccccgcctcccaacggacctggacgtagagggcccttggttccgccattatgatttcagacagagctgctgggtccgtgccatatcccaggaggaccagctggccccctgctggcaggctgaacaccctgcggagcgggtgagatcggctttcgctgcacccagcactgattccgaccagggcacccccttcagagctagggacgaacagcagta

SEQ ID NO: 281741 - DNA, 821 bp, Homo sapiens
caggacaagaaagatctatgtgggcagtgttccccgttaggctgcctcatccggatattgattgacgggatctctctcgggctcaccctgcgcctgtgggacgtgtatctggtagaaggcgaacaggcgttgatgccgataacaagaatcgcctttaaggttcagcagaagcgcctcacgaagacgtccaggtgtggcccgtgggcacgtttttgcaaccggttcgttgatacctgggccagggatgaggacactgtgctcaagcatcttagggcctctatgaagaaactaacaagaaagcagggggacctgcaacccccagccaaacccgagcaagggtcgtcggcatccaggcctgtgccggcttcacgtggcgggaagaccctctgcaagggggacaggcaggcccctccaggcccaccagcccggttcccgcggcccatttggtcagcttccccgccacgggcacctcgttcttccacaccctgtcctggtggggctgtccgggaagacacctaccctgtgggcactcagggtgtgcccagcccggccctggctcagggaggacctcagggttcctggagattcctgcagtggaactccatgccccgcctcccaacggacctggacgtagagggcccttggttccgccattatgatttcagacagagctgctgggtccgtgccatatcccaggaggaccagctggccccctgctggcaggctgaacaccctgcggagcgggtgagatcggctttcgctgcacccagcactgattccgaccagggcacccccttcagagctagggacgaacagcagta

SEQ ID NO: 281742 - DNA, 505 bp, Homo sapiens
actgggggccgtatcccaggcccaacagccctgggacgaaggtgtgtggcaggaagcccccagccagtctgaaccctgggggcagtcccaggagccacccgccatgccacgacagcttccccacgccaggcagcatgcacccctccctctgggatcagcagactacaggcgtgtcctcggtgtcaggccacgggggccacacagggaccccgaggactccgagatgcaggcaggtggggcccagcccggaaaggcctgcgtgggctcactggagatgctgaccgcgtctgttttcctttcagccaaacccgagcaagggtcgtcggcatccaggcctgtgccggcttcacgtggcgggaagaccctctgcaagggggacaggcaggcccctccaggcccaccagcccggttcccgcggcccatttggtcagcttccccgccacgggcacctcgttcttccacaccctgtcctggtggggctgtccgggaagacacctaccctgtg

SEQ ID NO: 281743 - DNA, 522 bp, Homo sapiens
attaaaaaaaagagccagtgtctttcgcataggatcttttacagctggtggggggaagaaagggatgttagtgtgtggagggtggggtggtgcgggatgagcaaaacaggaactccgaatgtacacataacacctgttttgttgttcttgtttatgcctgtcgtgcatctattacacttcctcccttaaagaccttaagggtattttaacttctcactctgcttgaacctccttaagggtattttaacttctcactctgcttgaacctccgtccttcgggacgcaaggattcagggagcttcctttcctggctgcgagggatcttcctgagcagagctctccgggttccccggctcgcggggcccggcgaagggcaggtgggtgcggccgtgcgggtgctgggggtgcggcgccccaaggggcgccacctcgtgcggcaggagggtcgcggcggcggcgcccgccttctcgggagggggcgacaacaccgaggacaggcaggggaacgcggcggcggcggcg

SEQ ID NO: 281744 - DNA, 656 bp, Homo sapiens
attaaaaaaaagagccagtgtctttcgcataggatcttttacagctggtggggggaagaaagggatgttagtgtgtggagggtggggtggtgcgggatgagcaaaacaggaactccgaatgtacacataacacctgttttgttgttcttgtttatgcctgtcgtgcatctattacacttcctcccttaaagaccttaagggtattttaacttctcactctgcttgaacctccttaagggtattttaacttctcactctgcttgaacctccgtccttcgggacgcaaggattcagggagcttcctttcctggctgcgagggatcttcctgagcagagctctccgggttccccggctcgcggggcccggcgaagggcagatccattgtcatgacttctgagctgtttgaaagagaatgttctcagaatcaagatgtgccagtaaatatgaattggttggatttgacttctcaatgatacacaatgattctctacctggactaacaccacagaggatgccatagaaacttctgagatttcgatgataaatataaaaagttgaagctttggggagcccaagccaggaagctggagacactgtggcagaaagtgaaagaggaagaagccattcgacgtctgtttttaaaaatgtgttctgt

SEQ ID NO: 281745 - DNA, 2384 bp, Homo sapiens
tgacgccacaaaaatggcggacgctggaaagcgccgttcctgactctaatgtacttagacacttgaagccacaaaaggatttatccccgaggttcctcatctgctcgcgaggatgccttttctcttctgccttgcgaaataacagcagcctagctgttgcccgtgaccagtgagaaaggcagcgtcgcgggctgattaggtttcacccaaagggtgccggcgccgaattggtttctaacgagaacttttaaaatgatccgttccaaaaaagggtaggagccgcgagaccctccaactgcccagagaaaacaagtctcgtctggcaaagttctcggcccacgcggtccgcggccaagggccaacggtccctcgccccacgttgccgcagcactgcgcgtgcgcgagccgctgtcaaacgcgctgacggaggccgagaagaaaaaaaggcgggagccgtcaatcccgggttgagcaaaatggcgcgggagaaggagatgcaggagttcacccgtagcttcttccgaggccgcccggacctcagcacgcttacgcattccatcgtgcggcggaggtacttagctcactcgggccgcagccacctggagcccgaggagaagcaggcactgaagcggctggtggaggaggagctgctgaagatgcaggtggatgaagccgcttccagggaagacaaactggaccttaccaagaagggcaagaggcctcccaccccttgtagcgacccggagagaaaaaggttccgcttcaattcagagtcggagtccggctctgaagcctccagcccagactactttggacccccagcaaagaatggggtggcagcagaagtcagcccagccaaagaggagaatccaaggcgagcctcaaaggcagttgaggagagcagtgatgaggaacggcagagggacctgcccgcacagaggggagaggagagcagtgaggaggaggaaaaggggtacaaggggaagactaggaagaaacctgtggtaaagaagcaggcaccaggcaaggcctcagtcagtaggaagcaggccagggaagaaagtgaggagagcgaggcagaacccgttcagaggacagcaaagaaggtggagggaaataaaggaactaaaagcctgaaggaaagtgaacaggagagtgaagaggagatcctagcccagaagaaagagcagagagaggaggaagtggaggaggaagagaaagaagaggatgaggaaaagggggattggaaacccagaaccaggagcaatggccggagaaagtcagctagggaggagaggagctgtaagcagaaaagccaggcaaagaggctcttgggagactcagacagcgaggaagagcagaaagaggcagccagcagtggggatgacagtgggagagatagagaacccccagtgcagaggaagagtgaggacaggacccagcttaagggtgggaagaggttgagtggaagcagcgaggacgaggaagacagtgggaagggggaacccacagctaaaggctctagaaagatggccagactgggcagcaccagtggtgaggaaagtgacttggagagggaggtaagtgacagcgaggcagggggaggcccccagggggagaggaagaaccgctcttccaagaagagctccaggaaaggcaggacacgaagctcctcttcctcctcagatggaagtccagaggccaaaggagggaaggctggctcaggtcgccgtggagaggaccacccggctgtgatgaggctgaagcgctacattcgggcctgtggtgcccatcgaaactacaagaagctgttgggctcctgttgctcacacaaggagcgcctgagtatcctccgggcagaactggaagcgctaggcatgaagggtaccccttccctagggaagtgtcgggccctgaaggagcagagggaggaggcagctgaggtggcctccttggatgttgcgaacatcatcagtggctcgggccggccacgcagacgtacagcctggaaccctttaggagaagcagcacccccaggggagctgtaccgacggaccctggactcagatgaagagcggccccgtcccgcacccccagactggtcacatatgcgtggcatcatcagcagtgatggcgagagtaactgagctctgccacccccaggagggacccttgatacatgtacaaagcatacatagcaccccttgccctgtgtctgtggaacagaagcagcttccttcagagaagactgcagctcccaaggacacaagctgttgggatgctacttctcagcttcacgctgtccctttaaggtgtttattttttaagactcaataaaggagtgtttttaatcacctcaaaaaaaaaaaaagtcgacgcggccg

SEQ ID NO: 281746 - DNA, 2359 bp, Homo sapiens
tgacgccacaaaaatggcggacgctggaaagcgccgttcctgactctaatgtacttagacacttgaagccacaaaaggatttatccccgaggttcctcatctgctcgcgaggatgccttttctcttctgccttgcgaaataacagcagcctagctgttgcccgtgaccagtgagaaaggcagcgtcgcgggctgattaggtttcacccaaagggtgccggcgccgaattggtttctaacgagaacttttaaaatgatccgttccaaaaaagggtaggagccgcgagaccctccaactgcccagagaaaacaagtctcgtctggcaaagttctcggcccacgcggtccgcggccaagggccaacggtccctcgccccacgttgccgcagcactgcgcgtgcgcgagccgctgtcaaacgcgctgacggaggccgagaagaaaaaaaggcgggagccgtcaatcccgggttgagcaaaatggcgcgggagaaggagatgcaggagttcacccgtagcttcttccgaggccgcccggacctcagcacgcttacgcattccatcgtgcggcggaggtacttagctcactcgggccgcagccacctggagcccgaggagaagcaggcactgaagcggctggtggaggaggagctgctgaagatgcaggtggatgaagccgcttccagggaagacaaactggaccttaccaagaagggcaagaggcctcccaccccttgtagcgacccggagagaaaaaggttccgcttcaattcagagtcggagtccggctctgaagcctccagcccagactactttggacccccagcaaagaatggggtggcagcagaagtcagcccagccaaagaggagaatccaaggcgagcctcaaaggcagttgaggagagcagtgatgaggaacggcagagggacctgcccgcacagaggggagaggagagcagtgaggaggaggaaaaggggtacaaggggaagactaggaagaaacctgtggtaaagaagcaggcaccaggcaaggcctcagtcagtaggaagcaggccagggaagaaagtgaggagagcgaggcagaacccgttcagaggacagcaaagaaggtggagggaaataaaggaactaaaagcctgaaggaaagtgaacaggagagtgaagaggagatcctagcccagaagaaagagcagagagaggaggaagtggaggaggaagagaaagaagaggatgaggaaaagggggattggaaacccagaaccaggagcaatggccggagaaagtcagctagggaggagaggagctgtaagcagaaaagccaggcaaagaggctcttgggagactcagacagcgaggaagagcagaaagaggcagccagcagtggggatgacagtgggagagatagagaacccccagtgcagaggaagagtgaggacaggacccagcttaagggtgggaagaggttgagtggaagcagcgaggacgaggaagacagtgggaagggggaacccacagctaaaggctctagaaagatggccagactgggcagcaccagtggtgaggaaagtgacttggagagggaggtaagtgacagcgaggcagggggaggcccccagggggagaggaagaaccgctcttccaagaagagctccaggaaaggcaggacacgaagctcctcttcctcctcagatggaagtccagaggccaaaggagggaaggctggctcaggtcgccgtggagaggaccacccggctgtgatgaggctgaagcgctacattcgggcctgtggtgcccatcgaaactacaagaagctgttgggctcctgttgctcacacaaggagcgcctgagtatcctccgggcagaactggaagcgctaggcatgaagggtaccccttccctagggaagtgtcgggccctgaaggagcagagggaggaggcagctgaggtggcctccttggatgttgcgaacatcatcagtggctcgggccggccacgcagacgtacagcctggaaccctttaggagaagcagcacccccaggggagctgtaccgacggaccctggactcagatgaagagcggccccgtcccgcacccccagactggtcacatatgcgtggcatcatcagcagtgatggcgagagtaactgagctctgccacccccaggagggacccttgatacatgtacaaagcatacatagcaccccttgccctgtgtctgtggaacagaagcagcttccttcagagaagactgcagctcccaaggacacaagctgttgggatgctacttctcagcttcacgctgtccctttaaggtgtttattttttaagactcaataaaggagtgtttttaatcacctca

SEQ ID NO: 281747 - DNA, 799 bp, Homo sapiens
taaggctaggtaggaggctgggtggttaatcggccgaggagatgcaggagttcacccgtagcttcttccgaggccgcccggacctcagcacgcttacgcattccatcgtgcggcggaggtacttagctcactcgggccgcagccacctggagcccgaggagaagcaggcactgaagcggctggtggaggaggagctgctgaagatgcaggtggatgaagccgcttccagggaagacaaactggaccttaccaagaagggcaagaggcctcccaccccttgtagcgacccggagagaaaaaggttccgcttcaattcagagtcggagtccggctctgaagcctccagcccagactactttggacccccagcaaagaatggggtggcagcagaagtcagcccagccaaagaggagaatccaaggcgagcctcaaaggcagttgaggagagcagtgatgaggaacggcagagggacctgcccgcacagaggggagaggagagcagtgaggaggaggaaaaggggtacaaggggaagactaggaagaaacctgtggtaaagaagcaggcaccaggcaaggcctcagtcagtaggaagcaggccagggaagaaagtgaggagagcgaggcagaacccgttcagaggacagcaaagaaggtggagggaaataaaggaactaaaagcctgaaggaaagtgaacaggagagtgaagaggagatcctagcccagaagaaagagcagagagaggaggaagtggaggaggaagagaaagaagcgctacgcatgaagggtacccttcctag

SEQ ID NO: 281748 - DNA, 500 bp, Homo sapiens
  misc_feature (27)..(27): n is a, c, g, or t
tctgcccatggcgtctgccagagcccncaggcaggctggcctactaattcccaagactcagagcctaatgcccacttgggagagggatagaatgacttgagggcagccagtgcttaagccttctcccttatgcaaacagccactttgtccatgggctgttagcctcaaaggggtggggaaaagcccatacctcctgggccagtcctagccctctaggcctctggctacaggcccagcctctgcagtcacatgaggtctccactgaactctggctgctgaggcttgcgggaagattcgtgagcatggagctgcctggggtctgtgtgggaggcaaacctaagaatctttgaagtcaaagcaaagaaaacaggaattagaggtcaaggggttgaagaccacctttgagatccgagatctggtcacacctaaagtcattaaaatcactgaaatgtttagatacacagcccaataaattctctttataaaacacaaaaaaacta

SEQ ID NO: 281749 - DNA, 2323 bp, Homo sapiens
tgacgccacaaaaatggcggacgctggaaagcgccgttcctgactctaatgtacttagacacttgaagccacaaaaggatttatccccgaggttcctcatctgctcgcgaggatgccttttctcttctgccttgcgaaataacagcagcctagctgttgcccgtgaccagtgagaaaggcagcgtcgcgggctgattaggtttcacccaaagggtgccggcgccgaattggtttctaacgagaacttttaaaatgatccgttccaaaaaagggtaggagccgcgagaccctccaactgcccagagaaaacaagtctcgtctggcaaagttctcggcccacgcggtccgcggccaagggccaacggtccctcgccccacgttgccgcagcactgcgcgtgcgcgagccgctgtcaaacgcgctgacggaggccgagaagaaaaaaaggcgggagccgtcaatcccgggttgagcaaaatggcgcgggagaaggagatgcaggagttcacccgtagcttcttccgaggccgcccggacctcagcacgcttacgcattccatcgtgcggcggaggtacttagctcactcgggccgcagccacctggagcccgaggagaagcaggcactgaagcggctggtggaggaggagctgctgaagatgcaggtggatgaagccgcttccagggaagacaaactggaccttaccaagaagggcaagaggcctcccaccccttgtagcgacccggagagaaaaaggttccgcttcaattcagagtcggagtccggctctgaagcctccagcccagactactttggacccccagcaaagaatggggtggcagcagaagtcagcccagccaaagaggagaatccaaggcgagcctcaaaggcagttgaggagagcagtgatgaggaacggcagagggacctgcccgcacagaggggagaggagagcagtgaggaggaggaaaaggggtacaaggggaagactaggaagaaacctgtggtaaagaagcaggcaccaggcaaggcctcagtcagtaggaagcaggccagggaagaaagtgaggagagcgaggcagaacccgttcagaggacagcaaagaaggtggagggaaataaaggaactaaaagcctgaaggaaagtgaacaggagagtgaagaggagatcctagcccagaagaaagagcagagagaggaggaagtggaggaggaagagaaagaagaggatgaggaaaagggggattggaaacccagaaccaggagcaatggccggagaaagtcagctagggaggagaggagctgtaagcagaaaagccaggcaaagaggctcttgggagactcagacagcgaggaagagcagaaagaggcagccagcagtggggatgacagtgggagagatagagaacccccagtgcagaggaagagtgaggacaggacccagcttaagggtgggaagaggttgagtggaagcagcgaggacgaggaagacagtgggaagggggaacccacagctaaaggctctagaaagatggccagactgggcagcaccagtggtgaggaaagtgacttggagagggaggtaagtgacagcgaggcagggggaggcccccagggggagaggaagaaccgctcttccaagaactcctcagatggaagtccagaggccaaaggagggaaggctggctcaggtcgccgtggagaggaccacccggctgtgatgaggctgaagcgctacattcgggcctgtggtgcccatcgaaactacaagaagctgttgggctcctgttgctcacacaaggagcgcctgagtatcctccgggcagaactggaagcgctaggcatgaagggtaccccttccctagggaagtgtcgggccctgaaggagcagagggaggaggcagctgaggtggcctccttggatgttgcgaacatcatcagtggctcgggccggccacgcagacgtacagcctggaaccctttaggagaagcagcacccccaggggagctgtaccgacggaccctggactcagatgaagagcggccccgtcccgcacccccagactggtcacatatgcgtggcatcatcagcagtgatggcgagagtaactgagctctgccacccccaggagggacccttgatacatgtacaaagcatacatagcaccccttgccctgtgtctgtggaacagaagcagcttccttcagagaagactgcagctcccaaggacacaagctgttgggatgctacttctcagcttcacgctgtccctttaaggtgtttattttttaagactcaataaaggagtgtttttaatcacctca

SEQ ID NO: 281750 - DNA, 2036 bp, Homo sapiens
tgacgccacaaaaatggcggacgctggaaagcgccgttcctgactctaatgtacttagacacttgaagccacaaaaggatttatccccgaggttcctcatctgctcgcgaggatgccttttctcttctgccttgcgaaataacagcagcctagctgttgcccgtgaccagtgagaaaggcagcgtcgcgggctgattaggtttcacccaaagggtgccggcgccgaattggtttctaacgagaacttttaaaatgatccgttccaaaaaagggtaggagccgcgagaccctccaactgcccagagaaaacaagtctcgtctggcaaagttctcggcccacgcggtccgcggccaagggccaacggtccctcgccccacgttgccgcagcactgcgcgtgcgcgagccgctgtcaaacgcgctgacggaggccgagaagaaaaaaaggcgggagccgtcaatcccgggttgagcaaaatggcgcgggagaaggagatgcaggagttcacccgtagcttcttccgaggccgcccggacctcagcacgcttacgcattccatcgtgcggcggaggtacttagctcactcgggccgcagccacctggagcccgaggagaagcaggcactgaagcggctggtggaggaggagctgctgaagatgcaggtggatgaagccgcttccagggaagacaaactggaccttaccaagaagggcaagaggcctcccaccccttgtagcgacccggagagaaaaaggttccgcttcaattcagagtcggagtccggctctgaagcctccagcccagactactttggacccccagcaaagaatggggtggcagcagaagtcagcccagccaaagaggagaatccaaggcgagcctcaaaggcagttgaggagagcagtgatgaggaacggcagagggacctgcccgcacagaggggagaggagagcagtgaggaggaggaaaaggggtacaaggggaagactaggaagaaacctgtggtaaagaagcaggcaccaggcaaggcctcagtcagtaggaagcaggccagggaagaaagtgaggagagcgaggcagaacccgttcagaggacagcaaagaaggtggagggaaataaaggaactaaaagcctgaaggaaagtgaacaggagagtgaagaggagatcctagcccagaagaaagagcagagagaggaggaagtggaggaggaagagaaagaagaggatgaggaaaagggggattggaaacccagaaccaggagcaatggccggagaaagtcagctagggaggagaggagctgtaagcagaaaagccaggagctccaggaaaggcaggacacgaagctcctcttcctcctcagatggaagtccagaggccaaaggagggaaggctggctcaggtcgccgtggagaggaccacccggctgtgatgaggctgaagcgctacattcgggcctgtggtgcccatcgaaactacaagaagctgttgggctcctgttgctcacacaaggagcgcctgagtatcctccgggcagaactggaagcgctaggcatgaagggtaccccttccctagggaagtgtcgggccctgaaggagcagagggaggaggcagctgaggtggcctccttggatgttgcgaacatcatcagtggctcgggccggccacgcagacgtacagcctggaaccctttaggagaagcagcacccccaggggagctgtaccgacggaccctggactcagatgaagagcggccccgtcccgcacccccagactggtcacatatgcgtggcatcatcagcagtgatggcgagagtaactgagctctgccacccccaggagggacccttgatacatgtacaaagcatacatagcaccccttgccctgtgtctgtggaacagaagcagcttccttcagagaagactgcagctcccaaggacacaagctgttgggatgctacttctcagcttcacgctgtccctttaaggtgtttattttttaagactcaataaaggagtgtttttaatcacctca

SEQ ID NO: 281751 - DNA, 2381 bp, Homo sapiens
  misc_feature (2333)..(2333): n is a, c, g, or t
  misc_feature (2365)..(2365): n is a, c, g, or t
tgacgccacaaaaatggcggacgctggaaagcgccgttcctgactctaatgtacttagacacttgaagccacaaaaggatttatccccgaggttcctcatctgctcgcgaggatgccttttctcttctgccttgcgaaataacagcagcctagctgttgcccgtgaccagtgagaaaggcagcgtcgcgggctgattaggtttcacccaaagggtgccggcgccgaattggtttctaacgagaacttttaaaatgatccgttccaaaaaagggtaggagccgcgagaccctccaactgcccagagaaaacaagtctcgtctggcaaagttctcggcccacgcggtccgcggccaagggccaacggtccctcgccccacgttgccgcagcactgcgcgtgcgcgagccgctgtcaaacgcgctgacggaggccgagaagaaaaaaaggcgggagccgtcaatcccgggttgagcaaaatggcgcgggagaaggagatgcaggagttcacccgtagcttcttccgaggccgcccggacctcagcacgcttacgcattccatcgtgcggcggaggtacttagctcactcgggccgcagccacctggagcccgaggagaagcaggcactgaagcggctggtggaggaggagctgctgaagatgcaggtggatgaagccgcttccagggaagacaaactggaccttaccaagaagggcaagaggcctcccaccccttgtagcgacccggagagaaaaaggttccgcttcaattcagagtcggagtccggctctgaagcctccagcccagactactttggacccccagcaaagaatggggtggcagcagaagtcagcccagccaaagaggagaatccaaggcgagcctcaaaggcagttgaggagagcagtgatgaggaacggcagagggacctgcccgcacagaggggagaggagagcagtgaggaggaggaaaaggggtacaaggggaagactaggaagaaacctgtggtaaagaagcaggcaccaggcaaggcctcagtcagtaggaagcaggccagggaagaaagtgaggagagcgaggcagaacccgttcagaggacagcaaagaaggtggagggaaataaaggaactaaaagcctgaaggaaagtgaacaggagagtgaagaggagatcctagcccagaagaaagagcagagagaggaggaagtggaggaggaagagaaagaagaggatgaggaaaagggggattggaaacccagaaccaggagcaatggccggagaaagtcagctagggaggagaggagctgtaagcagaaaagccaggcaaagaggctcttgggagactcagacagcgaggaagagcagaaagaggcagccagcagtggggatgacagtgggagagatagagaacccccagtgcagaggaagagtgaggacaggacccagcttaagggtgggaagaggttgagtggaagcagcgaggacgaggaagacagtgggaagggggaacccacagctaaaggctctagaaagatggccagactgggcagcaccagtggtgaggaaagtgacttggagagggaggtaagtgacagcgaggcagggggaggcccccagggggagaggaagaaccgctcttccaagaagagctccaggaaaggcaggacacgaagctcctcttcctcctcagatggaagtccagaggccaaaggagggaaggctggctcaggtcgccgtggagaggaccacccggctgtgatgaggctgaagcgctacattcgggcctgtggtgcccatcgaaactacaagaagctgttgggctcctgttgctcacacaaggagcgcctgagtatcctccgggcagaactggaagcgctaggcatgaagggtaccccttccctagggaagtgtcgggccctgaaggagcagagggaggaggcagctgaggtggcctccttggatgttgcgaacatcatcagtggctcgggccggccacgcagacgtacagcctggaaccctttaggagaagcagcacccccaggggagctgtaccgacggaccctggactcagatgaagagcggccccgtcccgcacccccagactggtcacatatgcgtggcatcatcagcagtgatggcgagagtaactgagctctgccacccccaggagggacccttgatacatgtacaaagcatacatagcaccccttgccctgtgtctgtggaacagaagcagcttccttcagagaagactgcagctcccaaggacacaagctgttgggatgctacttctcagcttcacgctgtccctttaaggtgttattcttagaactaaanaagagggtttatccccaaaaaaaaaaaacatnctatccactataaaaa

SEQ ID NO: 281752 - DNA, 1894 bp, Homo sapiens
aagtacacgcacgagagacgatcataccagaggagcgaccgaaacctcagacacgcttacgcattccatcgtgcggcggaggtacttagctcactcgggccgcagccacctggagcccgaggagaagcaggcactgaagcggctggtggaggaggagctgctgaagatgcaggtggatgaagccgcttccagggaagacaaactggaccttaccaagaagggcaagaggcctcccaccccttgtagcgacccggagagaaaaaggttccgcttcaattcagagtcggagtccggctctgaagcctccagcccagactactttggacccccagcaaagaatggggtggcagcagaagtcagcccagccaaagaggagaatccaaggcgagcctcaaaggcagttgaggagagcagtgatgaggaacggcagagggacctgcccgcacagaggggagaggagagcagtgaggaggaggaaaaggggtacaaggggaagactaggaagaaacctgtggtaaagaagcaggcaccaggcaaggcctcagtcagtaggaagcaggccagggaagaaagtgaggagagcgaggcagaacccgttcagaggacagcaaagaaggtggagggaaataaaggaactaaaagcctgaaggaaagtgaacaggagagtgaagaggagatcctagcccagaagaaagagcagagagaggaggaagtggaggaggaagagaaagaagaggatgaggaaaagggggattggaaacccagaaccaggagcaatggccggagaaagtcagctagggaggagaggagctgtaagcagaaaagccaggcaaagaggctcttgggagactcagacagcgaggaagagcagaaagaggcagccagcagtggggatgacagtgggagagatagagaacccccagtgcagaggaagagtgaggacaggacccagcttaagggtgggaagaggttgagtggaagcagcgaggacgaggaagacagtgggaagggggaacccacagctaaaggctctagaaagatggccagactgggcagcaccagtggtgaggaaagtgacttggagagggaggtaagtgacagcgaggcagggggaggcccccagggggagaggaagaaccgctcttccaagaagagctccaggaaaggcaggacacgaagctcctcttcctcctcagatggaagtccagaggccaaaggagggaaggctggctcaggtcgccgtggagaggaccacccggctgtgatgaggctgaagcgctacattcgggcctgtggtgcccatcgaaactacaagaagctgttgggctcctgttgctcacacaaggagcgcctgagtatcctccgggcagaactggaagcgctaggcatgaagggtaccccttccctagggaagtgtcgggccctgaaggagcagagggaggaggcagctgaggtggcctccttggatgttgcgaacatcatcagtggctcgggccggccacgcagacgtacagcctggaaccctttaggagaagcagcacccccaggggagctgtaccgacggaccctggactcagatgaagagcggccccgtcccgcacccccagactggtcacatatgcgtggcatcatcagcagtgatggcgagagtaactgagctctgccacccccaggagggacccttgatacatgtacaaagcatacatagcaccccttgccctgtgtctgtggaacagaagcagcttccttcagagaagactgcagctcccaaggacacaagctgttgggatgctacttctcagcttcacgctgtccctttaaggtgtttattttttaagactcaataaaggagtgtttttaatcacctcaaaaaaaaaaaaagtcgacgcggccg

SEQ ID NO: 281753 - DNA, 2059 bp, Homo sapiens
tgacgccacaaaaatggcggacgctggaaagcgccgttcctgactctaatgtacttagacacttgaagccacaaaaggatttatccccgaggttcctcatctgctcgcgaggatgccttttctcttctgccttgcgaaataacagcagcctagctgttgcccgtgaccagtgagaaaggcagcgtcgcgggctgattaggtttcacccaaagggtgccggcgccgaattggtttctaacgagaacttttaaaatgatccgttccaaaaaagggtaggagccgcgagaccctccaactgcccagagaaaacaagtctcgtctggcaaagttctcggcccacgcggtccgcggccaagggccaacggtccctcgccccacgttgccgcagcactgcgcgtgcgcgagccgctgtcaaacgcgctgacggaggccgagaagaaaaaaaggcgggagccgtcaatcccgggttgagcaaaatggcgcgggagaaggagatgcaggagttcacccgtagcttcttccgaggccgcccggacctcagcacgcttacgcattccatcgtgcggcggaggtacttagctcactcgggccgcagccacctggagcccgaggagaagcaggcactgaagcggctggtggaggaggagctgctgaagatgcaggaggaaaaggggtacaaggggaagactaggaagaaacctgtggtaaagaagcaggcaccaggcaaggcctcagtcagtaggaagcaggccagggaagaaagtgaggagagcgaggcagaacccgttcagaggacagcaaagaaggtggagggaaataaaggaactaaaagcctgaaggaaagtgaacaggagagtgaagaggagatcctagcccagaagaaagagcagagagaggaggaagtggaggaggaagagaaagaagaggatgaggaaaagggggattggaaacccagaaccaggagcaatggccggagaaagtcagctagggaggagaggagctgtaagcagaaaagccaggcaaagaggctcttgggagactcagacagcgaggaagagcagaaagaggcagccagcagtggggatgacagtgggagagatagagaacccccagtgcagaggaagagtgaggacaggacccagcttaagggtgggaagaggttgagtggaagcagcgaggacgaggaagacagtgggaagggggaacccacagctaaaggctctagaaagatggccagactgggcagcaccagtggtgaggaaagtgacttggagagggaggtaagtgacagcgaggcagggggaggcccccagggggagaggaagaaccgctcttccaagaagagctccaggaaaggcaggacacgaagctcctcttcctcctcagatggaagtccagaggccaaaggagggaaggctggctcaggtcgccgtggagaggaccacccggctgtgatgaggctgaagcgctacattcgggcctgtggtgcccatcgaaactacaagaagctgttgggctcctgttgctcacacaaggagcgcctgagtatcctccgggcagaactggaagcgctaggcatgaagggtaccccttccctagggaagtgtcgggccctgaaggagcagagggaggaggcagctgaggtggcctccttggatgttgcgaacatcatcagtggctcgggccggccacgcagacgtacagcctggaaccctttaggagaagcagcacccccaggggagctgtaccgacggaccctggactcagatgaagagcggccccgtcccgcacccccagactggtcacatatgcgtggcatcatcagcagtgatggcgagagtaactgagctctgccacccccaggagggacccttgatacatgtacaaagcatacatagcaccccttgccctgtgtctgtggaacagaagcagcttccttcagagaagactgcagctcccaaggacacaagctgttgggatgctacttctcagcttcacgctgtccctttaaggtgtttattttttaagactcaataaaggagtgtttttaatcacctca

SEQ ID NO: 281754 - DNA, 192 bp, Homo sapiens
cctatccgaagtgaagggagaagggacaggaggagcctgtctcaaccctctctcctctccatattccagagtccggctctgaagcctccagcccagactactttggacccccagcaaagaatggggtggcagcagaagtcagcccagccaaagaggagaatccaaggcgagcctcaaaggcagttgaggaga

SEQ ID NO: 281755 - DNA, 822 bp, Homo sapiens
agcgggatggggcgcggtgagcgcagccttggtgcatagtttgccctcttggcgcacacacaggtggatgaagccgcttccagggaagacaaactggaccttaccaagaagggcaagaggcctcccaccccttgtagcgacccggagagaaaaaggttccgcttcaattcagagtcgggctggctcaggtcgccgtggagaggaccacccggctgtgatgaggctgaagcgctacattcgggcctgtggtgcccatcgaaactacaagaagctgttgggctcctgttgctcacacaaggagcgcctgagtatcctccgggcagaactggaagcgctaggcatgaagggtaccccttccctagggaagtgtcgggccctgaaggagcagagggaggaggcagctgaggtggcctccttggatgttgcgaacatcatcagtggctcgggccggccacgcagacgtacagcctggaaccctttaggagaagcagcacccccaggggagctgtaccgacggaccctggactcagatgaagagcggccccgtcccgcacccccagactggtcacatatgcgtggcatcatcagcagtgatggcgagagtaactgagctctgccacccccaggagggacccttgatacatgtacaaagcatacatagcaccccttgccctgtgtctgtggaacagaagcagcttccttcagagaagactgcagctcccaaggacacaagctgttgggatgctacttctcagcttcacgctgtccctttaaggtgtttattttttaagactcaataaaggagtgtttttaatcacctca

SEQ ID NO: 281756 - DNA, 422 bp, Homo sapiens
ctacaacaaaataagcggccgggcgacaacatcatcagtggctcgggccggccacgcagacgtacagcctggaaccctttaggagaagcagcacccccaggggagctgtaccgacggaccctggactcagatgaagagcggccccgtcccgcacccccagactggtcacatatgcgtggcatcatcagcagtgatggcgagagtaactgagctctgccacccccaggagggacccttgatacatgtacaaagcatacatagcaccccttgccctgtgtctgtggaacagaagcagcttccttcagagaagactgcagctcccaaggacacaagctgttgggatgctacttctcagcttcacgctgtccctttaaggtgtttattttttaagactcaataaaggagtgtttttaatcacctca

SEQ ID NO: 281757 - DNA, 3034 bp, Homo sapiens
tgacgccacaaaaatggcggacgctggaaagcgccgttcctgactctaatgtacttagacacttgaagccacaaaaggatttatccccgaggttcctcatctgctcgcgaggatgccttttctcttctgccttgcgaaataacagcagcctagctgttgcccgtgaccagtgagaaaggcagcgtcgcgggctgattaggtttcacccaaagggtgccggcgccgaattggtttctaacgagaacttttaaaatgatccgttccaaaaaagggtaggagccgcgagaccctccaactgcccagagaaaacaagtctcgtctggcaaagttctcggcccacgcggtccgcggccaagggccaacggtccctcgccccacgttgccgcagcactgcgcgtgcgcgagccgctgtcaaacgcgctgacggaggccgagaagaaaaaaaggcgggagccgtcaatcccgggttgagcaaaatggcgcgggagaaggagatgcaggagttcacccgtagcttcttccgaggccgcccggacctcagcacgcttacgcattccatcgtgcggcggaggtacttagctcactcgggccgcagccacctggagcccgaggagaagcaggcactgaagcggctggtggaggaggagctgctgaagatgcaggtggatgaagccgcttccagggaagacaaactggaccttaccaagaagggcaagaggcctcccaccccttgtagcgacccggagagaaaaaggttccgcttcaattcagagtcggagtccggctctgaagcctccagcccagactactttggacccccagcaaagaatggggtggcagcagaagtcagcccagccaaagaggagaatccaaggcgagcctcaaaggcagttgaggagagcagtgatgaggaacggcagagggacctgcccgcacagaggggagaggagagcagtgaggaggaggaaaaggggtacaaggggaagactaggaagaaacctgtggtaaagaagcaggcaccaggcaaggcctcagtcagtaggaagcaggccagggaagaaagtgaggagagcgaggcagaacccgttcagaggacagcaaagaaggtggagggaaataaaggaactaaaagcctgaaggaaagtgaacaggagagtgaagaggagatcctagcccagaagaaagagcagagagaggaggaagtggaggaggaagagaaagaagaggatgaggaaaagggggattggaaacccagaaccaggagcaatggccggagaaagtcagctagggaggagaggagctgtaagcagaaaagccaggcaaagaggctcttgggagactcagacagcgaggaagagcagaaagaggcagccagcagtggggatgacagtgggagagatagagaacccccagtgcagaggaagagtgaggacaggacccagcttaagggtgggaagaggttgagtggaagcagcgaggacgaggaagacagtgggaagggggaacccacagctaaaggctctagaaagatggccagactgggcagcaccagtggtgaggaaagtgacttggagagggaggtaagtgacagcgaggcagggggaggcccccagggggagaggaagaaccgctcttccaagaagagctccaggaaaggcaggacacgaagctcctcttcctcctcagatggaagtccagaggccaaaggagggaaggctggctcaggtcgccgtggagaggaccacccggctgtgatgaggctgaagcgctacattcgggcctgtggtgcccatcgaaactacaagaagctgttgggctcctgttgctcacacaaggagcgcctgagtatcctccgggcagaactggaagcgctaggcatgaagggtaccccttccctagggaagtgtcgggccctgaaggagcagagggaggaggcagctgaggtggcctccttggatgttgcgaacatcatcagtggctcgggccggccacgcagacgtacagcctggaaccctttaggagaagcagcacccccaggggagctgtaccgacggaccctggactcagatgaagagcggccccgtcccgcacccccagactggtcacatatgcgtggcatcatcagcagtgatggcgagagtaactgagctctgccacccccaggagggacccttgatacatgtacaaagcatacatagcaccccttgccctgtgtctgtggaacagaagcagcttccttcagagaagactgcagctcccaaggacacaagctgttgggatgctacttctcagcttcacgctgtccctttaaggtgtttattttttaagactcaataaaggagtgtttttaatcacctcatcaaatttggtcccccattctcacctcctgtattttgggccaggaaactgagcagtagtcactgcctccacctcctcccctggcctggttccctttaatttcccccgggttcctggaagaagtccctgcctccagaccctgtcatccaacagccaccagacccttttggagaagggtgtgtggctcctgtgctgcccgcctaccccgtggcccctctgcttttagcctagtctgataacctaatgcccacttgggagagggatagaatgacttgagggcagccagtgcttaagccttctcccttatgcaaacagccactttgtccatgggctgttagcctcaaaggggtggggaaaagcccatacctcctgggccagtcctagccctctaggcctctggctacaggcccagcctctgcagtcacatgaggtctccactgaactctggctgctgaggcttgcgggaagattcgtgagcatggagctgcctggggtctgtgtgggaggcaaacctaagaatctttgaagtcaaagcaaagaaaacaggaattagaggtcaaggggttgaagaccacctttgagatccgagatctggtcacacctaaagtcattaaaatcactgaaatgtttagatacacagcccaataaattctctttataaaacacaaaaaaacta

SEQ ID NO: 281758 - DNA, 1931 bp, Homo sapiens
taaggctaggtaggaggctgggtggttaatcggccgaggagatgcaggagttcacccgtagcttcttccgaggccgcccggacctcagcacgcttacgcattccatcgtgcggcggaggtacttagctcactcgggccgcagccacctggagcccgaggagaagcaggcactgaagcggctggtggaggaggagctgctgaagatgcaggtggatgaagccgcttccagggaagacaaactggaccttaccaagaagggcaagaggcctcccaccccttgtagcgacccggagagaaaaaggttccgcttcaattcagagtcggagtccggctctgaagcctccagcccagactactttggacccccagcaaagaatggggtggcagcagaagtcagcccagccaaagaggagaatccaaggcgagcctcaaaggcagttgaggagagcagtgatgaggaacggcagagggacctgcccgcacagaggggagaggagagcagtgaggaggaggaaaaggggtacaaggggaagactaggaagaaacctgtggtaaagaagcaggcaccaggcaaggcctcagtcagtaggaagcaggccagggaagaaagtgaggagagcgaggcagaacccgttcagaggacagcaaagaaggtggagggaaataaaggaactaaaagcctgaaggaaagtgaacaggagagtgaagaggagatcctagcccagaagaaagagcagagagaggaggaagtggaggaggaagagaaagaagaggatgaggaaaagggggattggaaacccagaaccaggagcaatggccggagaaagtcagctagggaggagaggagctgtaagcagaaaagccaggcaaagaggctcttgggagactcagacagcgaggaagagcagaaagaggcagccagcagtggggatgacagtgggagagatagagaacccccagtgcagaggaagagtgaggacaggacccagcttaagggtgggaagaggttgagtggaagcagcgaggacgaggaagacagtgggaagggggaacccacagctaaaggctctagaaagatggccagactgggcagcaccagtggtgaggaaagtgacttggagagggaggtaagtgacagcgaggcagggggaggcccccagggggagaggaagaaccgctcttccaagaagagctccaggaaaggcaggacacgaagctcctcttcctcctcagatggaagtccagaggccaaaggagggaaggctggctcaggtcgccgtggagaggaccacccggctgtgatgaggctgaagcgctacattcgggcctgtggtgcccatcgaaactacaagaagctgttgggctcctgttgctcacacaaggagcgcctgagtatcctccgggcagaactggaagcgctaggcatgaagggtaccccttccctagggaagtgtcgggccctgaaggagcagagggaggaggcagctgaggtggcctccttggatgttgcgaacatcatcagtggctcgggccggccacgcagacgtacagcctggaaccctttaggagaagcagcacccccaggggagctgtaccgacggaccctggactcagatgaagagcggccccgtcccgcacccccagactggtcacatatgcgtggcatcatcagcagtgatggcgagagtaactgagctctgccacccccaggagggacccttgatacatgtacaaagcatacatagcaccccttgccctgtgtctgtggaacagaagcagcttccttcagagaagactgcagctcccaaggacacaagctgttgggatgctacttctcagcttcacgctgtccctttaaggtgtttattttttaagactcaataaaggagtgtttttaatcacctcaaaaaaaaaaaaagtcgacgcggccg

SEQ ID NO: 281759 - DNA, 1421 bp, Homo sapiens
tgacgccacaaaaatggcggacgctggaaagcgccgttcctgactctaatgtacttagacacttgaagccacaaaaggatttatccccgaggttcctcatctgctcgcgaggatgccttttctcttctgccttgcgaaataacagcagcctagctgttgcccgtgaccagtgagaaaggcagcgtcgcgggctgattaggtttcacccaaagggtgccggcgccgaattggtttctaacgagaacttttaaaatgatccgttccaaaaaagggtaggagccgcgagaccctccaactgcccagagaaaacaagtctcgtctggcaaagttctcggcccacgcggtccgcggccaagggccaacggtccctcgccccacgttgccgcagcactgcgcgtgcgcgagccgctgtcaaacgcgctgacggaggccgagaagaaaaaaaggcgggagccgtcaatcccgggttgagcaaaatggcgcgggagaaggagatgcaggagttcacccgtagcttcttccgaggccgcccggacctcagcacgcttacgcattccatcgtgcggcggaggtacttagctcactcgggccgcagccacctggagcccgaggagaagcaggcactgaagcggctggtggaggaggagctgctgaagatgcaggtggatgaagccgcttccagggaagacaaactggaccttaccaagaagggcaagaggcctcccaccccttgtagcgacccggagagaaaaaggttccgcttcaattcagagtcgggctggctcaggtcgccgtggagaggaccacccggctgtgatgaggctgaagcgctacattcgggcctgtggtgcccatcgaaactacaagaagctgttgggctcctgttgctcacacaaggagcgcctgagtatcctccgggcagaactggaagcgctaggcatgaagggtaccccttccctagggaagtgtcgggccctgaaggagcagagggaggaggcagctgaggtggcctccttggatgttgcgaacatcatcagtggctcgggccggccacgcagacgtacagcctggaaccctttaggagaagcagcacccccaggggagctgtaccgacggaccctggactcagatgaagagcggccccgtcccgcacccccagactggtcacatatgcgtggcatcatcagcagtgatggcgagagtaactgagctctgccacccccaggagggacccttgatacatgtacaaagcatacatagcaccccttgccctgtgtctgtggaacagaagcagcttccttcagagaagactgcagctcccaaggacacaagctgttgggatgctacttctcagcttcacgctgtccctttaaggtgtttattttttaagactcaataaaggagtgtttttaatcacctca

SEQ ID NO: 281760 - DNA, 574 bp, Homo sapiens
gaaagaggagggacagctggggccctaggagctccccctgagggtctgtccctgggaacggggcgctaggacgggcactccttctggctggaatgctacgccggtgagggaaaggagtccactagggaagtacctggaggtggagacggggagagaaatcacagaaactcagtttacaaacgactgcttgggagcagtcatgtcacccagtccagagggagccggtcagctgcgttccgcgaacttgggaggcgactgctggggtagcggcggggccctcactgcgcgtcgtcagggaccagaccctggggtggccccgaagcgtcgagactacaactcccgggatgccgcgggccaggctgcatcccgcctgcgcagaagtggtggcaactccgcccctcgccaggcggcggcgctgcggactcagtcctaagcgggcgaaggcggcgagcgccgtgggtctgggcgggccaggagaaccgggtgcttcgaggagatctgcgggctgggttgggggcgtttgaccccttggcttgtcccagtgggtaggcgggactccaacccccgcctcctc

SEQ ID NO: 281761 - DNA, 493 bp, Homo sapiens
gcggccgcggtggcccgcggtggcagaagttgcaagagaggctcctggcctactcaggggcgccgcctctccgagttttgcggcccaaggcttgggcgaatcagttcacatcaacacccctactagcctctccctccggggtcgaccatttatctccagcagcggaccaggcgcccgggccagggtgacatgcgcgccctgcctacacgcagctcggatcctctgctgtttctggagaggcctccacaggtagaagctccctggaacaactgctggaataaggttccagagtggaaggtggaagctccctcttgggataaaggatccacagtggaaaaaaaaaaagttgccctctgctggaaaacagcatctttgtcctctgagaaaaacagtctcccttcttacggaggccagtggattccatcctagaggctgtgttgaccgtatctccaaatagacaataacgaggcatcttgattcccacaactccagc

SEQ ID NO: 281762 - DNA, 705 bp, Homo sapiens
gcggccgcggtggcccgcggtggcagaagttgcaagagaggctcctggcctactcaggggcgccgcctctccgaggtggggcgtcctcaactttcctctttcttgagcccggcctgctccgggctctgaggggcgaggacgcttcacgtggtggcctggggcccaccccgcctaggaaaggcggatcctttacgtctgaccctctagcaacccctgggccggtctgggaaagttccccagctgcacttctgggaaatgcagaggctgcctgccgctttctttcgcagttttgcggcccaaggcttgggcgaatcagttcacatcaacacccctactagcctctccctccggggtcgaccatttatctccagcagcggaccaggcgcccgggccagggtgacatgcgcgccctgcctacacgcagctcggatcctctgctgtttctggagaggcctccacaggtagaagctccctggaacaactgctggaataaggttccagagtggaaggtggaagctccctcttgggataaaggatccacagtggaaaaaaaaaaagttgccctctgctggaaaacagcatctttgtcctctgagaaaaacagtctcccttcttacggaggccagtggattccatcctagaggctgtgttgaccgtatctccaaatagacaataacgaggcatcttgattcccacaactccagc

SEQ ID NO: 281763 - DNA, 609 bp, Homo sapiens
cagtggtcttcatttccgacctaagagtactttgggaaagtgttcttaggtttgatatacttctacagtatcttcattttcattattaaaggtacctattaactttttctttcctgagctttctgcaacttgcctattaattctataatctccattccattctagatctagttctttttcagtatctatttaggaagaaaggtgtaagaactttatggatgcagtgttagaaagcagtccctttaaagtaggaactgggtctgtggtgaggcatgtaaaaatcttaagatatgaggagaaagaaatagcagctaactttggccatgtagcaggtgctattcttcattaatcaggtttgtttcgtaatgaaactttgatagtacttccactctctaatagataaataagtacttggaagttcgtattgacttgttacacaaggtgattatagttagtagtggacacaaaatgctgcaatacagatcttctatacctaacttattgaatttgttatgtaatgatgtaataaacttaatttttttcaagtagtttctacaaacaagtagttaaaagtcaaggaatgggaagtttaatcatacatattacact

SEQ ID NO: 281764 - DNA, 471 bp, Homo sapiens
tccggtcccggagttgaatagtttttgaagtaatgagacgggaacgagacttgggacgaactggagaaaaacataaccgcgaaaggaggaggcggctatcacttactggctgtgtcagaagtcgccgggaacgcgttgctcccgaggccgaagggcccagagagctccagccaggcagcgggttcgtctccggcgcaagaaggctggctgtctttagtcaagtcaagctcattctgaagcctttcctgggagtcctgaagactagcaataagtccttctgcagagccaagaccttgttcacttttccttaccatatcttggaggtggccaatcttgtgacgacacatcaagaaggtgaccacctgcaagccaggaacagagcgctcactgtggaactgaattggctgctaccttgatcttggacttcccagctcccagactgtaagaaataaatttttattgtttgagcca

SEQ ID NO: 281765 - DNA, 3555 bp, Homo sapiens
  misc_feature (1563)..(1563): n is a, c, g, or t
gaaagttttcactgcatctcttgtgggatacgtataatgtttggcagatgatacttttaaatgacaataacaatagttatttttcagagagaggaatcaagatagccctgcaaattcagtgtagttgttaattctctgtattcttattaacaagattcctttattcatttatttatcaaatagttatcgagggccttatataccagacatcagtttaggtgtttaggatacattagagttaaaaaaagacaaaaatccctgccctcgtcaacttaaattttagtgagggaaacaatacataataaacataataaatagtaaatgacatggtatgtaggaaagtgataagtgttatgggaaaatcagagggaaagggggttagtgagtgctgagggaatgtgggttgccattgaaatggagtggttagtatatgcttcattaagaaggtgtcatatgaataaagactttgaaagagatgtatgagttaccaactgctacataaaaaactaccccaaaactcagtggcttaaaacaattaaacatttgttcactcatgaatcagtagatctgttagttcttagtctgagccaggcttgttttttctctatagggcttgctcacacagttatggttagctacaggttagctggtggctggctttgctaatcttggctgggttctttcttacgtatgaagtcccatctgggacaacttgactcagcctcatatgatctttaattatccttcagtaaactagcctggacctgttctcttggcacaataggatctcctgaggtttgggctcagaaccagcacaatgttacttcgttatattctgttgctcacagaaagtcacaaggcaagtccagattcataggctggggaaatagacttgatctcttgatggaaaagctgcaaagtcacattgcaaaaggctgtagatactgagggggacagccatttttgctgtcttccacagaaggcaagggagtaagccttgtgggtgtatggtgctggaagggatgggtgaagagtggaggaggtggcagagtattccaggtagacagaatactctgtgcagaggctctgtgagagtgtactggtgttaaaagaacagaggctagagtgtctcaaatggagtaagtgaggagagagttgtaggagatgaaaccagggagaaacaaggacaaaatcaggaagaggtttctttttgccataattaggacttgggcttttgatcagagaaatgaggtttccccctcgttttttgtgagttttattctccatatataaggtcaagattttatcttaatctttcattttcagcagtttgactgtgtgtctaggtagtttttgtttttgttgttgatgctgttgcctgggtttttttgttttttggtattaatcctgcttggggttctctgagcttcttggatatgtggcttgttgcctttcattatttttagaaaatcctctgccttatttcttcaaatatttcttctgccctctttcttcttcttccacttgtatggtacctgacatctcttcctgttctgctccacnacaggtaagccagtgcttgcatctcgtctctcctgggaaagatctgtctttccttggattttaagcttatagttgtcctgtaaccccagctctgatgggatcaagaaaagttatgattttgtagttcattaactttttcttattgttaggaaaggagcaatattctcccaactctgctccattagagggttttgagtagaaggcaggacataatctgatttatattttaacaagagcagttaggttactgtattgaaagtaggtagaaggcagggttggctctaacgaatttgaatgaggagcctcagcacttttcggcgccattttcgagtgatacctgatctcatcaatctagcggaagagacaggataacctatccaagagtatagcgccactatgactccgccggaaaaattactttaaaaatcgccaaaaattacttggagcaaagggcagtaggcggagcttcgccaaggctggcgcagtcggttttgacctgtagcagagaaccaattctggagaacagcctcacttctttgattgaatactcacataatgctttggaacaggacatgagattaaggtttaataatgatagaatgaagaccataataaaagagacctctacttacctcagcaattcttacctttcttacctatttgatgaagatgtcttttgaaaggtgtactgcaaggaacaaaatgtttgtaaattctgcttttaccaaggtttcttttttagttgatgccaaagagttccaatattgaacatcttaagtctgttacttggagtatggattgagtttggagcttactcagaggactacaggagagtatccaggaggtggataattactgtaccttcctcatggaaaaagttttatttaaagtgttatttctcgttgaatactatcaaaaaggaaaaaaaaatgacctaaacttttgagacagatttggctctagtaagtatttagatatatcgcttgcatatctgggagaagaaataagagactatcatcaatacattcccatctactaaaaaattttattttacacatgtcaagggattacttataacttccattgtcttttttttaagcctatatgcaatgaaaaatatattggcaaaataaatatttaaaccttttatgttaaaattactgtgaaagatgacaagttagctgctgtttttgtctacattatactgaaattaaatgtttataatttatattttgggtttatttatttataaatcatggaatttatgcaaaaaacatgagtagtacagattctcctctaattctgtaggactttgaataatgtgatatttttcttatagttggacccttgtgttttgaagaaatgccaactgcttgaagaatttccttgttatttgtattatttgctatagggttagatgttgagaaattcttctgacaaaaaattttaagccagttttacactaaatattccttagtctgattaatttgttattggatgtattctgtatctttcttttgtaatttgtaacttttatccacttagcacgaatgattctattgaagaaaatctttaggaagtggtagaaactttaaatcgccccatagtttgcctgtttccacattttattatcttataatctttgggagtgcttacacttatggagctaacattttcagagatacaggttctcatagtactactaaaacttttttcctctttggactgaatacctatgattataactatacagtagtttaagtttccttgtgattagtcaaaaataccattttagtatgaagcaatgaagtctattatttgttgtcccataattgagaaacttagatacaccttttattaagagtttgtaaattctagcttagtctacacagatttttatatcaatttgtttatatttttattaatgtcatttctggaattgtgaaaatgttaatgttcgacaagcaacattaaaaatagatttgaaacatt

SEQ ID NO: 281766 - DNA, 433 bp, Homo sapiens
gactggattatcctgttagacctcagatcatagattgctagtctctgctaaggacaaatattgtagaattttatctgtacagggatattcttatacaaggcctagaaatgttgtcctgtttaaaaattagccaaaagtaacaatatataaaaagagagtaaaagctttctatttttatgtgcaggtttgtcaacatgtaatgcctttgaatgaacgacaagaatggatatattattgtatatattctcttatttcttaaataattatacttagaacttaccaaactaagaattatttcagatttagtctgttatttattaaacaactaaatgctacttaactgatgtacctaaataataatctattcaatttatatgcattttcattttatgtccatggtatgtactttattattaaaatataaataatgctt

SEQ ID NO: 281767 - DNA, 299 bp, Homo sapiens
aacagagcaccttctctcactactctggccataccacccccgcgatagaggagcaacacagctgtctctgtgcgctccggatcagcgcttcctagatttctagccggatcgtttggagaagggctctgcatcttatttccggtggcggtgaggtgcagttgccatggtgattagagaaaggcaggagaatctgaacctgggaggtggaggttgcagtgagctgagatcacgccattgcactccagcctgagcgacaagagtgagactctgtctcaaaaaaaaaaaaaaaaaaaaaaaaa

SEQ ID NO: 281768 - DNA, 2331 bp, Homo sapiens
aacagagcaccttctctcactactctggccataccacccccgcgatagaggagcaacacagctgtctctgtgcgctccggatcagcgcttcctagatttctagccggatcgtttggagaagggctctgcatcttatttccggtggcggtgaggtgcagttgccatggtgattagagaaaggccgagatctgtccagctgcggtgagaggaacgctgaatcgccgaagagaattggctgcgcttccttgtttgtgagctagaattagaatggcgatcagtccacgaagcgatgcaactttctccagtcagaaatcaacaccttcagagagtcctcgaacaaagaaatttccactaactgaagaggaaatattttatatgaattgtagagctgcctacttaactgtcttcaaaagcagcttggaaaacattatttctaaagatcaactttacttagctcttcagcatgcaggaagaaatccatcccaaaagaccattaataagtattggactcctcaaactgccaaactgaattttgatgatttttgtataattttaaggaaggaaaaacctacttcaaaagcagaactactaaaatcatttaagcaattagatgtaaatgatgatggctgtattttacacactgacctttataaatttctaacaaagagaggtgagaagatgactcgagaagaagtaaatgccataataaatttggctgatgtaaatgctgatggcaaatttgactacatcaagttttgtaaattatatatgacaaccaacgagcaatgtctcaagactacactagaaaaactagaggttgacagtaaattgatgcgtcaccagtttggaaaccacatcgaagggtcccctgaaagggacccatcaccagtaccaaaaccatcacctaaaatcacaagaaaaactgatccagaaacattcttaaataaaggtgacaccaggagttctttactgtcagcaaccaggaagttcaaaacatctgtttccttcacagttaccatgggggctaatggtaaccgaaactcaaagttaatggagccaaatttaataaaggactggcaacacatgcaatcaaaaggttgcttcttcttagaagaagatggtgaaatcattagtcatcagtacaggatgcaaatagctcagaggtccatggtttatctaacaattaagccattaaacctgagtcaagttgaaggaaaaccatccccttggttatccgttgatactgccttgtatattctcaaggaaaatgagagtcaagcaaatctacagcttgtgtgttttaccgaactacgaaatagagaagtgtttggatggactggtgaactaggacctggaatttactggttaattccttccacaactggctgtaggctgaggaaaaaaataaaaccagtaacagatgaagcccaacttgtatatagagatgaaacaggggaattattccttacaaaggaatttaagtctactttatcagatatatttgaagtaattgatttagatggaaatggtcttcttagccttgaagaatataatttttttgaattgagaacaagtggtgagaaatgtgatgaagatgcttgggctgtctgcagagagaattttgatacaaagaggaatgaactaacaagacaaggatttatggatttgaatctaatggaagctaatgatcgagaaggagatccttgtgacctttgggtaactctacactctatgggctacaataaagctctggagttgacagaggcatgtccatttgtcattgatatctatgcagaaaaatgcaagccaaaaattaaagctgtccatatggaggcatgtagtggacaacttgagaaggccatttgtaaatctgttcttagcaacggtgatgccaaagtaatggatggctatgaaaatataatcgtgcatacttacagttgtgacacctggataacgtcagttattgaaaacaagtcagatgagaaagtgattattcacatcagcaatgagctaagtaaaaactgcataaacaacagaggactcaacatatttgcagtagaagtgggacccaaatctacaatggtttgtcaacatgtaatgcctttgaatgaacgacaagaatggatatattattgtatatattctcttatttcttaaataattatacttagaacttaccaaactaagaattatttcagatttagtctgttatttattaaacaactaaatgctacttaactgatgtacctaaataataatctattcaatttatatgcattttcattttatgtccatggtatgtactttattattaaaatataaataatgctt

SEQ ID NO: 281769 - DNA, 1046 bp, Homo sapiens
agactgatgattgttttatttcattgttttgagaaaaggtgtttggatggactggtgaactaggacctggaatttactggttaattccttccacaactggctgtaggctgaggaaaaaaataaaaccagtaacagatgaagcccaacttgtatatagagatgaaacaggggaattattccttacaaaggaatttaagtctactttatcagatatatttgaagtaattgatttagatggaaatggtcttcttagccttgaagaatataatttttttgaattgagaacaagtggtgagaaatgtgatgaagatgcttgggctgtctgcagagagaattttgatacaaagaggaatgaactaacaagacaaggatttatggatttgaatctaatggaagctaatgatcgagaaggagatccttgtgacctttgggtaactctacactctatgggctacaataaagctctggagttgacagaggcatgtccatttgtcattgatatctatgcagaaaaatgcaagccaaaaattaaagctgtccatatggaggcatgtagtggacaacttgagaaggccatttgtaaatctgttcttagcaacggtgatgccaaagtaatggatggctatgaaaatataatcgtgcatacttacagttgtgacacctggataacgtcagttattgaaaacaagtcagatgagaaagtgattattcacatcagcaatgagctaagtaaaaactgcataaacaacagaggactcaacatatttgcagtagaagtgggacccaaatctacaatggtttgtcaacatgtaatgcctttgaatgaacgacaagaatggatatattattgtatatattctcttatttcttaaataattatacttagaacttaccaaactaagaattatttcagatttagtctgttatttattaaacaactaaatgctacttaactgatgtacctaaataataatctattcaatttatatgcattttcattttatgtccatggtatgtactttattattaaaatataaataatgctt

SEQ ID NO: 281770 - DNA, 2272 bp, Homo sapiens
gaaagttttcactgcatctcttgtgggatacgtataatgtttggcagatgatacttttaaatgacaataacaatagttatttttcagagagaggaatcaagatagccctgcaaattcagtgtagttgttaattctctgtattcttattaacaagattcctttattcatttatttatcaaatagttatcgagggccttatataccagacatcagtttaggtgtttaggatacattagagttaaaaaaagacaaaaatccctgccctcgtcaacttaaattttagtgagggaaacaatacataataaacataataaatagtaaatgacatggtatgtaggaaagtgataagtgttatgggaaaatcagagggaaagggggttagtgagtgctgagggaatgtgggttgccattgaaatggagtggttagtatatgcttcattaagaaggtgtcatatgaataaagactttgaaagagatgtatgagttaccaactgctacataaaaaactaccccaaaactcagtggcttaaaacaattaaacatttgttcactcatgaatcagtagatctgttagttcttagtctgagccaggcttgttttttctctatagggcttgctcacacagttatggttagctacaggttagctggtggctggctttgctaatcttggctgggttctttcttacgtatgaagtcccatctgggacaacttgactcagcctcatatgatctttaattatccttcagtaaactagcctggacctgttctcttggcacaataggatctcctgaggtttgggctcagaaccagcacaatgttacttcgttatattctgttgctcacagaaagtcacaaggcaagtccagattcataggctggggaaatagacttgatctcttgatggaaaagctgcaaagtcacattgcaaaaggctgtagatactgagggggacagccatttttgctgtcttccacagaaggcaagggagtaagccttgtgggtgtatggtgctggaagggatgggtgaagagtggaggaggtggcagagtattccaggtagacagaatactctgtgcagaggctctgtgagagtgtactggtgttaaaagaacagaggctagagtgtctcaaatggagtaagtgaggagagagttgtaggagatgaaaccagggagaaacaaggacaaaatcaggaagaggtttctttttgccataattaggacttgggcttttgatcagagaaatgaggtttccccctcgttttttcacatagatgtctggcatctcttcctcgtgtgctccaccacaggaaaaccatccccttggttatccgttgatactgccttgtatattctcaaggaaaatgagagtcaagcaaatctacagcttgtgtgttttaccgaactacgaaatagagaagtctactttatcagatatatttgaagtaattgatttagatggaaatggtcttcttagccttgaagaatataatttttttgaattgagaacaagtggtgagaaatgtgatgaagatgcttgggctgtctgcagagagaattttgatacaaagaggaatgaactaacaagacaaggatttatggatttgaatctaatggaagctaatgatcgagaaggagatccttgtgacctttgggtaactctacactctatgggctacaataaagctctggagttgacagaggcatgtccatttgtcattgatatctatgcagaaaaatgcaagccaaaaattaaagctgtccatatggaggcatgtagtggacaacttgagaaggccatttgtaaatctgttcttagcaacggtgatgccaaagtaatggatggctatgaaaatataatcgtgcatacttacagttgtgacacctggataacgtcagttattgaaaacaagtcagatgagaaagtgattattcacatcagcaatgagctaagtaaaaactgcataaacaacagaggactcaacatatttgcagtagaagtgggacccaaatctacaatggtttgtcaacatgtaatgcctttgaatgaacgacaagaatggatatattattgtatatattctcttatttcttaaataattatacttagaacttaccaaactaagaattatttcagatttagtctgttatttattaaacaactaaatgctacttaactgatgtacctaaataataatctattcaatttatatgcattttcattttatgtccatggtatgtactttattattaaaatataaataatgctt

SEQ ID NO: 281771 - DNA, 1375 bp, Homo sapiens
aacagagcaccttctctcactactctggccataccacccccgcgatagaggagcaacacagctgtctctgtgcgctccggatcagcgcttcctagatttctagccggatcgtttggagaagggctctgcatcttatttccggtggcggtgaggtgcagttgccatggtgattagagaaaggccgagatctgtccagctgcggtgagaggaacgctgaatcgccgaagagaattggctgcgcttccttgtttgtgagctagaattagaatggcgatcagtccacgaagcgatgcaactttctccagtcagaaatcaacaccttcagagagtcctcgaacaaagaaatttccactaactgaagaggaaatattttatatgaattgtagagctgcctacttaactgtcttcaaaagcagcttggaaaacattatttctaaagatcaactttacttagctcttcagcatgcaggaagaaatccatcccaaaagaccattaataagtattggactcctcaaactgccaaactgaattttgatgatttttgtataattttaaggaaggaaaaacctacttcaaaagcagaactactaaaatcatttaagcaattagatgtaaatgatgatggctgtattttacacactgacctttataaatttctaacaaagagaggtgagaagatgactcgagaagaagtaaatgccataataaatttggctgatgtaaatgctgatggcaaatttgactacatcaagttttgtaaattatatatgacaaccaacgagcaatgtctcaagactacactagaaaaactagaggttgacagtaaattgatgcgtcaccagtttggaaaccacatcgaagggtcccctgaaagggacccatcaccagtaccaaaaccatcacctaaaatcacaagaaaaactgatccagaaacattcttaaataaaggtgacaccaggagttctttactgtcagcaaccaggaagttcaaaacatctgtttccttcacagttaccatgggggctaatggtaaccgaaactcaaagttaatggagccaaatttaataaaggactggcaacacatgcaatcaaaaggttgcttcttcttagaagaagatggtgaaatcattagtcatcagtacaggatgcaaatagctcagaggtccatggtttatctaacaattaagccattaaacctgagtcaagttgaaggaaaaccatccccttggttatccgttgatactgccttgtatattctcaaggaaaatgagagtcaagcaaatctacagcttgtgtgttttaccgaactacgaaatagagaagtatacatatttattttctaatgtttaatttttaaatatagtatgaactgca

SEQ ID NO: 281772 - DNA, 136 bp, Homo sapiens
cagggtttattctgaggcttatatttgtctgtaattattaaagaaaggaatagcagcttatgaaatctttttttaatagtcagatgagaaagtgattattcacatcagcaatgagctaagtaaaaactgcataaac

SEQ ID NO: 281773 - DNA, 4142 bp, Homo sapiens
  misc_feature (2503)..(2503): n is a, c, g, or t
  misc_feature (3287)..(3287): n is a, c, g, or t
aacagagcaccttctctcactactctggccataccacccccgcgatagaggagcaacacagctgtctctgtgcgctccggatcagcgcttcctagatttctagccggatcgtttggagaagggctctgcatcttatttccggtggcggtgaggtgcagttgccatggtgattagagaaaggccgagatctgtccagctgcggtgagaggaacgctgaatcgccgaagagaattggctgcgcttccttgtttgtgagctagaattagaatggcgatcagtccacgaagcgatgcaactttctccagtcagaaatcaacaccttcagagagtcctcgaacaaagaaatttccactaactgaagaggaaatattttatatgaattgtagagctgcctacttaactgtcttcaaaagcagcttggaaaacattatttctaaagatcaactttacttagctcttcagcatgcaggaagaaatccatcccaaaagaccattaataagtattggactcctcaaactgccaaactgaattttgatgatttttgtataattttaaggaaggaaaaacctacttcaaaagcagaactactaaaatcatttaagcaattagatgtaaatgatgatggctgtattttacacactgacctttataaatttctaacaaagagaggtgagaagatgactcgagaagaagtaaatgccataataaatttggctgatgtaaatgctgatggcaaatttgactacatcaagttttgtaaattatatatgacaaccaacgagcaatgtctcaagactacactagaaaaactagaggttgacagtaaattgatgcgtcaccagtttggaaaccacatcgaagggtcccctgaaagggacccatcaccagtaccaaaaccatcacctaaaatcacaagaaaaactgatccagaaacattcttaaataaaggtgacaccaggagttctttactgtcagcaaccaggaagttcaaaacatctgtttccttcacagttaccatgggggctaatggtaaccgaaactcaaagttaatggagccaaatttaataaaggactggcaacacatgcaatcaaaaggttgcttcttcttagaagaagatggtgaaatcattagtcatcagtacaggatgcaaatagctcagaggtccatggtttatctaacaattaagccattaaacctgagtcaagttgaaggaaaaccatccccttggttatccgttgatactgccttgtatattctcaaggaaaatgagagtcaagcaaatctacagcttgtgtgttttaccgaactacgaaatagagaagtgtttggatggactggtgaactaggacctggaatttactggttaattccttccacaactggctgtaggctgaggaaaaaaataaaaccagtaacagatgaagcccaacttgtatatagagatgaaacaggggaattattccttacaaaggaatttaagtctactttatcagatatatttgaagtaattgatttagatggaaatggtcttcttagccttgaagaatataatttttttgaattgagaacaagtggtgagaaatgtgatgaagatgcttgggctgtctgcagagagaattttgatacaaagaggaatgaactaacaagacaaggatttatggatttgaatctaatggaagctaatgatcgagaaggagatccttgtgacctttgggtaactctacactctatgggctacaataaagctctggagttgacagaggcatgtccatttgtcattgatatctatgcagaaaaatgcaagccaaaaattaaagctgtccatatggaggcatgtagtggacaacttgagaaggccatttgtaaatctgttcttagcaacggtgatgccaaagtaatggatggctatgaaaatataatcgtgcatacttacagttgtgacacctggataacgtcagttattgaaaacaagtcagatgagaaagtgattattcacatcagcaatgagctaagtaaaaactgcataaacaacagaggactcaacatatttgcagtagaagtgggacccaaatctacaatgccttgaagggaaaagataaacaccagctgccagtcttttggttgtacaacaagaaggtctggacaatgagaaccctttttctagattggttccatcaatgctttgtcgctgaagtcaggaagtactttgccagtaagcgaccaccttttacagtttttttgatctggcacaatgtccctggccacacggaaccccatgattcaacactgaaggtgtcaatgaggtctacttgctccccaaaacaaggttcctaattcaacctatagattggaggtcatgagggcctttaagtctcatttcacgtgggaggtactctgtggaaaggaatgtcaacgctatggatgagaacccccaatagagagaaaccatgatatgaagccgagatggccttttagaaaagaaaactatataaaaataaaanactgaaagattaaaacaacaataacaaaaggacatcataaaagtctataaagataataccattgattatgctacagaaaaagccatgaaagtcatcaaacctgaaacaataaattcctgatggagaaaactgtgtccagatgttgtgcatcatttcacagaatttatgacagacctaatcaaagaaatgaaagacgtggatatggccaaaaaaaaaaaaaaaaaaaaagtgggaggtgaaaggttttaagatatggatcttggagaaattcaagacaccacaccagaggagttaagacaacaggagagagttgagtgattctgaaccagtgccaaatgatgtggaagaagacatagaagaagcagtgccaggaaacaaaatgacatgagacagtctggcataagggttctgattattcaagatcacttttgacttcttttgcaacatggaaactaaagcaaacagtggaagatggattgtactgtatagaaacatttttagagaaatgagaaagcaaaaaagtcagacaaaaattacagtgtagccgggtgtggtggctcatgcctatatctcagcactttgggaggctgaggtggaaggattgcttgaggacaggagttcaagatcagcctgggcaacatggtaagacattgtctctacaaaaaataaaattagctgggcatggtggcacacacctgtagtcccggctactcatgaggctgaggccagaggatcacttgagcccaggagttcgaggctgcagtgagctatgattgcaccaccncaatccagcctgggcaatggagcaagatcttgtcttgaaaaaagaaaaaaattacagtgtatttccaagttacaccaagtgtgcctgcctcttctgcttctgctactcttgagacagcaagaccaacttctcttcttccaccttctattcaacatggagataatgaggatgaagacttatgatgatccactttcacttaatgaacagtaaatatatgttctcttatggtaacaaataacattttcctttctctagctaactttattgtttatgttccataaggcttctggtcaacataggctattagtagttaagtttggggggagtcaaaagttatggatagattttccacttgtgggggtggttggcattcataacccccatattatttcagggtcaactgtacattgttgagcatttttgtgactgcataaaatggatgttggtctgtagttttcttaattggaaatgtctttgtcttgtttgggtatcagagtaattctggcctcataagatgagttgggaatgctttctcgttttctggaaaagactgtaaaattggtgttatttctttaaatgttcacttgaatttctcattagaaacatctaggcatgaagatttattttggaagaggtttttttttttttaatacaaattcaatttctttaacagctacaggatattcagtttacctattcttggttgagttttggtagtttgtagtttttgagcatttggtccattttatctaagttgtcaaatttatgtgcatagaattttttaaaattgtcaatgcagtctgtagtgatatccctttttcatttctgatattaataaaatgtgtcttctctgtt

SEQ ID NO: 281774 - DNA, 1222 bp, Homo sapiens
aacagagcaccttctctcactactctggccataccacccccgcgatagaggagcaacacagctgtctctgtgcgctccggatcagcgcttcctagatttctagccggatcgtttggagaagggctctgcatcttatttccggtggcggtgaggtgcagttgccatggtgattagagaaaggccgagatctgtccagctgcggtgagaggaacgctgaatcgccgaagagaattggctgcgcttccttgtttgtgagctagaattagaatggcgatcagtccacgaagcgatgcaactttctccagtcagaaatcaacaccttcagagagtcctcgaacaaagaaatttccactaactgaagaggaaatattttatatgaattgtagagctgcctacttaactgtcttcaaaagcagcttggaaaacattatttctaaagatcaactttacttagctcttcagcatgcaggaagaaatccatcccaaaagaccattaataagtattggactcctcaaactgccaaactgaattttgatgatttttgtataattttaaggaaggaaaaacctacttcaaaagcagaactactaaaatcatttaagcaattagatgtaaatgatgatggctgtattttacacactgacctttataaatttctaacaaagagaggtgagaagatgactcgagaagaagtaaatgccataataaatttggctgatgtaaatgctgatggcaaatttgactacatcaagttttgtaaattatatatgacaaccaacgagcaatgtctcaagactacactagaaaaactagaggttgacagtaaattgatgcgtcaccagtttggaaaccacatcgaagggtcccctgaaagggacccatcaccagtaccaaaaccatcacctaaaatcacaagaaaaactgatccagaaacattcttaaataaaggtgacaccaggagttctttactgtcagcaaccaggaagttcaaaacatctgtttccttcacagttaccatgggggctaatggtaaccgaaactcaaagttaatggagccaaatttaataaaggtatagtattttaagttaacagatgactttttctgaaaaaaatttgacattaagtttattaataactgtgcagtgtctacagggaaccagtaaagtttatgaagtaatttgaggtttttctgtgtaatttctacctgtaagctagtgtaat

SEQ ID NO: 281775 - DNA, 866 bp, Homo sapiens
cggcgctgatttgaagattgaataccggctaccgtcctactacgcgtgtgcggaagtaactgtccacctagagttcctggactcctcccgggtgtaggccatccgtcggagaccacatttcccataaggccagtggagctcgtttccggaagacgtcagacgctgcttcctcttggggggtggtgcggagattcccggggtttcttctagcaatgcaccaggttaagtcggagaggtgaagaggatccaacaaagaagactgagaaggaataatccatgaagtagatggaaaagtaggagagtttagatctgcaaaaccaagatgtccaggatttaccagctcatgtataacatggaatcatactaacaacattcaccatgttctgttggctcttaatgttccagttaatacagaaactctacccctgccaattgccctccccatgcattgacttctgcaaattctccagtagtgtcacaagcaagtccttatcttccaggcttggaataacacgtacacaactatatatggtggtcatctttgaaggactgcagttatgaaaaaaccatcagttcaactgtcctggacagcatttcattttattatgtaactgtagaaagccttgatcaagataaaaatagggatgacttatcagaaactgaagaattttcttaggaaagcaaagtttactgaaggataccttcattccagccatgatgagcatctgtcttctcaggcaatcatgatgaagctccagggacagtataacccatctctcccactcatccctgagccttggtcctggactgaatgtggttagaggttgtggaaataaaaaaaagaaccaaaataagaacactctcca

SEQ ID NO: 281776 - DNA, 544 bp, Homo sapiens
cggcgctgatttgaagattgaataccggctaccgtcctactacgcgtgtgcggaagtaactgtccacctagagttcctggactcctcccgggtgtaggccatccgtcggagaccacatttcccataaggccagtggagctcgtttccggaagacgtcagacgctgcttcctcttggggggtggtgcggagattcccgggttggtatctctattgctagcctgagagccacgctttttaagtcgttttcatttaaaaggatacacagcatttttaaatactggaaagtaaaatcggcggtatgctaaaaacaatttgctcttactcagcagggtttcttctagcaatgcaccaggttaagtcggagaggtgaagaggatccaacaaagaagactgagaaggaataatccatgaagtagatggaaaagtaggagagtttagatctgcaaaaccaagggaaggaagtgtttcaagaagggagtgacccattgtctcaaatgttgctcataggtcaagtaaaatgagaattaagaatgggccactgta

SEQ ID NO: 281777 - DNA, 850 bp, Homo sapiens
atggggtcttgctatgttgcccaggctggtcttgaactcctgtcctcaagtgatcttcctaccttcccctcccaaagtactaagattacaggtgtgagctaccacacccagctgagaaaattatataacccttctaggcctcagttccctcactggagataatggatacagatttaattataatgtgcttagcacagtgcctggccataagagtcactcagtgaagagtcatcataagattccagggtccataagaagagtatgtgaagaagggcctccagagacaacctaccttatctcctacagatgtccaggatttaccagctcatgtataacatggaatcatactaacaacattcaccatgttctgttggctcttaatgttccagttaatacagaaactctacccctgccaattgccctccccatgcattgacttctgcaaattctccagtagtgtcacaagcaagtccttatcttccaggcttggaataacacgtacacaactatatatggtggtcatctttgaaggactgcagttatgaaaaaaccatcagttcaactgtcctggacagcatttcattttattatgtaactgtagaaagccttgatcaagataaaaatagggatgacttatcagaaactgaagaattttcttaggaaagcaaagtttactgaaggataccttcattccagccatgatgagcatctgtcttctcaggcaatcatgatgaagctccagggacagtataacccatctctcccactcatccctgagccttggtcctggactgaatgtggttagaggttgtggaaataaaaaaaagaaccaaaataagaacactctcca

SEQ ID NO: 281778 - DNA, 770 bp, Homo sapiens
tcatatgaaacagacaatcttatgaaacttaccaaggatgtttccagcaaccccttgtttagggaacagagtaaaggggagaaaaggtagcattttcaaatctcaagaaagtgttttatgtcagaattcaatttgtcccagagcacagctgtcaagagctttgtaaatctaggcctctaggaggagagggctaaagcactttcaggataaaggctagaagcctaaggccctgatcatttgggcaatccttgttattgcatttgttgttccattctctgacacttctaaaaggctgtggaatctccagatgtgttcataaaatagtggtagcaattattcattgcttctaggaaagggaaatggatatgttaccaacaaagccagtccccatacaaatggagtctttccctgtttagtgctttgaagccaatatacaaaaccaaaagtgagtgtcaagtagtgcaggctttattccatggccactgtattagtcagggttctcttagagggacagaactaataggatagatgatagatagatgatagatagagagatagatagatagagagatagacagatataaagggaatttattaagtatcaacttacatgatcacgaggtcccacaataggctgtctgcaagctgaggagcaagaagggccagtccaagtccccagactgaagaacttggagtccgatgttcaaaggcaggaagcatccagcatgggagaaagatgtaggctgtgaggctaggtccatctctccttt

SEQ ID NO: 281779 - DNA, 314 bp, Homo sapiens
ggccccagaaagtaaccacggaggtcaagatcacaaacccgtcagtgtccagggcatggcctcgcacacatccgaggttttcaaggaccatgaagtgccatggcaagcatcctggcctgagggttaggagagctggatctcaggctcaactttagcctgaattcggtgcgtcatcttagacaaatctgctcaagtcctgttccttgtttaaccagcatttattaagtacttgcagtataccagccactattttggacattagtgatatggagtgtaataaagacttaataaaggctaattgtgatcatcaaaaa

SEQ ID NO: 281780 - DNA, 416 bp, Homo sapiens
ggccccagaaagtaaccacggaggtcaagatcacaaacccgtcagtgtccagggcatggcctcgcacacatccgaggttttcaaggaccatgaagtgccatggcaagcatcctggcctgagggttaggagagctggatctcaggctcaactttagcctgaattcggtgcgtcatcttagacaaatctggtgagctctgagggctggggtaaggttgagaaactgtgggctcctcagggtggggggtgcttagagaagatggggcctctgagtcctcagactgggggtcttcatcgggttcagcatcctccccaggcccaagccctgccagcctcttgctggcctcccatagccgatgggctgcccggtcgtctcgggcagctggaggcacctcttccacatggcagttggcaaaat

SEQ ID NO: 281781 - DNA, 2474 bp, Homo sapiens
ggtccgcgcgcctctgatcgcgttccgggacacacaggcggcggctgcgggcgcagagcggagatgcagcggcttggggccaccctgctgtgcctgctgctggcggcggcggtccccacggcccccgcgcccgctccgacggcgacctcggctccagtcaagcccggcccggctctcagctacccgcaggaggaggccaccctcaatgagatgttccgcgaggttgaggaactgatggaggacacgcagcacaaattgcgcagcgcggtggaagagatggaggcagaagaagctgctgctaaagcatcatcagaagtgaacctggcaaacttacctcccagctatcacaatgagaccaacacagacacgaaggttggaaataataccatccatgtgcaccgagaaattcacaagataaccaacaaccagactggacaaatggtcttttcagagacagttatcacatctgtgggagacgaagaaggcagaaggagccacgagtgcatcatcgacgaggactgtgggcccagcatgtactgccagtttgccagcttccagtacacctgccagccatgccggggccagaggatgctctgcacccgggacagtgagtgctgtggagaccagctgtgtgtctggggtcactgcaccaaaatggccaccaggggcagcaatgggaccatctgtgacaaccagagggactgccagccggggctgtgctgtgccttccagagaggcctgctgttccctgtgtgcacacccctgcccgtggagggcgagctttgccatgaccccgccagccggcttctggacctcatcacctgggagctagagcctgatggagccttggaccgatgcccttgtgccagtggcctcctctgccagccccacagccacagcctggtgtatgtgtgcaagccgaccttcgtggggagccgtgaccaagatggggagatcctgctgcccagagaggtccccgatgagtatgaagttggcagcttcatggaggaggtgcgccaggagctggaggacctggagaggagcctgactgaagagatggcgctgggggagcctgcggctgccgccgctgcactgctgggaggggaagagatttagatctggaccaggctgtgggtagatgtgcaatagaaatagctaatttatttccccaggtgtgtgctttaggcgtgggctgaccaggcttcttcctacatcttcttcccagtaagtttcccctctggcttgacagcatgaggtgttgtgcatttgttcagctcccccaggctgttctccaggcttcacagtctggtgcttgggagagtcaggcagggttaaactgcaggagcagtttgccacccctgtccagattattggctgctttgcctctaccagttggcagacagccgtttgttctacatggctttgataattgtttgaggggaggagatggaaacaatgtggagtctccctctgattggttttggggaaatgtggagaagagtgccctgctttgcaaacatcaacctggcaaaaatgcaacaaatgaattttccacgcagttctttccatgggcataggtaagctgtgccttcagctgttgcagatgaaatgttctgttcaccctgcattacatgtgtttattcatccagcagtgttgctcagctcctacctctgtgccagggcagcattttcatatccaagatcaattccctctctcagcacagcctggggagggggtcattgttctcctcgtccatcagggatctcagaggctcagagactgcaagctgcttgcccaagtcacacagctagtgaagaccagagcagtttcatctggttgtgactctaagctcagtgctctctccactaccccacaccagccttggtgccaccaaaagtgctccccaaaaggaaggagaatgggatttttcttttgaggcatgcacatctggaattaaggtcaaactaattctcacatccctctaaaagtaaactactgttaggaacagcagtgttctcacagtgtggggcagccgtccttctaatgaagacaatgatattgacactgtccctctttggcagttgcattagtaactttgaaaggtatatgactgagcgtagcatacaggttaacctgcagaaacagtacttaggtaattgtagggcgaggattataaatgaaatttgcaaaatcacttagcagcaactgaagacaattatcaaccacgtggagaaaatcaaaccgagcagggctgtgtgaaacatggttgtaatatgcgactgcgaacactgaactctacgccactccacaaatgatgttttcaggtgtcatggactgttgccaccatgtattcatccagagttcttaaagtttaaagttgcacatgattgtataagcatgctttctttgagttttaaattatgtataaacataagttgcatttagaaatcaagcataaatcacttcaactgct

SEQ ID NO: 281782 - DNA, 2472 bp, Homo sapiens
ctcttctctctttttttctttattagtcttgctagcggtctatcaattttgttgatcctttcaaaaaaccagatcctggattcattaattttttgacgggatttttgtgtctctatttccttcagttctgctctgattttagttatttcttgccttctgctagcttttgaatgtgtttgctcttgcttttctagttcttttaattgtgatgttagggtgtcagttttggatctttcctgcttctcttgtgggcattagtgctatagttcctctatacgcttgaatgtgtccagagattctgggtatgttgtgtctttgttctcgttggtttcggaaattctatcacaatgagaccaacacagacacgaaggttggaaataataccatccatgtgcaccgagaaattcacaagataaccaacaaccagactggacaaatggtcttttcagagacagttatcacatctgtgggagacgaagaaggcagaaggagccacgagtgcatcatcgacgaggactgtgggcccagcatgtactgccagtttgccagcttccagtacacctgccagccatgccggggccagaggatgctctgcacccgggacagtgagtgctgtggagaccagctgtgtgtctggggtcactgcaccaaaatggccaccaggggcagcaatgggaccatctgtgacaaccagagggactgccagccggggctgtgctgtgccttccagagaggcctgctgttccctgtgtgcacacccctgcccgtggagggcgagctttgccatgaccccgccagccggcttctggacctcatcacctgggagctagagcctgatggagccttggaccgatgcccttgtgccagtggcctcctctgccagccccacagccacagcctggtgtatgtgtgcaagccgaccttcgtggggagccgtgaccaagatggggagatcctgctgcccagagaggtccccgatgagtatgaagttggcagcttcatggaggaggtgcgccaggagctggaggacctggagaggagcctgactgaagagatggcgctgggggagcctgcggctgccgccgctgcactgctgggaggggaagagatttagatctggaccaggctgtgggtagatgtgcaatagaaatagctaatttatttccccaggtgtgtgctttaggcgtgggctgaccaggcttcttcctacatcttcttcccagtaagtttcccctctggcttgacagcatgaggtgttgtgcatttgttcagctcccccaggctgttctccaggcttcacagtctggtgcttgggagagtcaggcagggttaaactgcaggagcagtttgccacccctgtccagattattggctgctttgcctctaccagttggcagacagccgtttgttctacatggctttgataattgtttgaggggaggagatggaaacaatgtggagtctccctctgattggttttggggaaatgtggagaagagtgccctgctttgcaaacatcaacctggcaaaaatgcaacaaatgaattttccacgcagttctttccatgggcataggtaagctgtgccttcagctgttgcagatgaaatgttctgttcaccctgcattacatgtgtttattcatccagcagtgttgctcagctcctacctctgtgccagggcagcattttcatatccaagatcaattccctctctcagcacagcctggggagggggtcattgttctcctcgtccatcagggatctcagaggctcagagactgcaagctgcttgcccaagtcacacagctagtgaagaccagagcagtttcatctggttgtgactctaagctcagtgctctctccactaccccacaccagccttggtgccaccaaaagtgctccccaaaaggaaggagaatgggatttttcttttgaggcatgcacatctggaattaaggtcaaactaattctcacatccctctaaaagtaaactactgttaggaacagcagtgttctcacagtgtggggcagccgtccttctaatgaagacaatgatattgacactgtccctctttggcagttgcattagtaactttgaaaggtatatgactgagcgtagcatacaggttaacctgcagaaacagtacttaggtaattgtagggcgaggattataaatgaaatttgcaaaatcacttagcagcaactgaagacaattatcaaccacgtggagaaaatcaaaccgagcagggctgtgtgaaacatggttgtaatatgcgactgcgaacactgaactctacgccactccacaaatgatgttttcaggtgtcatggactgttgccaccatgtattcatccagagttcttaaagtttaaagttgcacatgattgtataagcatgctttctttgagttttaaattatgtataaacataagttgcatttagaaatcaagcataaatcacttcaactgct

SEQ ID NO: 281783 - DNA, 1989 bp, Homo sapiens
ggcgcgtcttgcgggctccctcgggtaccggcgctgccgcaccccgccgcgctcccgcacccgcggcccgcccaccgcgccgctcccgcatctgcacccgcagcccggcggcctcccggcgggagcgagcagatccagtccggcccgcagcgcaactcggtccagtcggggcggcggctgcgggcgcagagcggagatgcagcggcttggggccaccctgctgtgcctgctgctggcggcggcggtccccacggcccccgcgcccgctccgacggcgacctcggctccagtcaagcccggcccggctctcagctacccgcaggaggaggccaccctcaatgagatgttccgcgaggttgaggaactgatggaggacacgcagcacaaattgcgcagcgcggtggaagagatggaggcagaagaagctgctgctaaagcatcatcagaagtgaacctggcaaacttacctcccagctatcacaatgagaccaacacagacacgaaggttggaaataataccatccatgtgcaccgagaaattcacaagaagtcatggccagcacttcctcctttctatagcgtccagtcccatcagagaactaaggtttttttgtttttgttttttcatatgtgatatacaagcccaaactacaattgagaatcataaaatacggattgaaaaccagaaggagtaatgttactgttgaaagtggagagacaatgtatcaggatcctaaactgcttttgcatttaagcaatatatttaaccctaggcttcctgccagtccagttgcaaaggaatgtccagggattatcatttgaaaaaaagaaagcaaatggatgtctaaaaagaccctttcctagcattgaatttgtggaattgatctatctcataggtttttatgtatgtctcagtagggattgaactagagaccacattatggtgaattgaccctcacttttttttaggaggaatgtaaatatgatataccccatttccaaaagagaaaccctctattgctacaaaattaaacattcatttgctggttgtgcgttcaaaattctctggcagatttttccccaaactaccacctgtctgagtgcctcttggtctaacatcatgcatgaagaacaaccaggttcattcccattctgacctgatgaagaaagctctgcgaatctcaaggaacatagcactagcttgcccctggtgtgcaatgtctctgacatgatttggcaggactctgagagcaaactgcctaagactgtgtgctgtgcagatattcagggtcgttgtgagcatcccgttgtgaatatcaaggagcctgccccctcagctcatctcaactcctgtatgcaagggcacagcggcttcacaaaagagcctcacttttattcaagtgcgcaggtaattacttggttgaaacaatagtgtttctgtgccacagagcacaggggatcaatttttatgtgccgttgccttgactataaagtagcttttgtgtggcacttctcccactgcatcgtaatgggctcagttagatggatcagctacagagtgtatgagctccaggtaaatgaatgagtttaccagcagaacataatcctttggcattgctcatctgcgactgaagaatgttttcaaagtgattattttattcttgtcaaaaccaatatcaagtcaccctttctgacaataattaaccaacaggtttggttgcttcttaaagttgcttcttgtaaatgtcagaatatctgagtgtgagtcctaccagtcactagtgtgatttttgaaaaattacttaaatgtcctgattctcactaactgcatttatgaaataaggatatcaacatctacattacagtactgtgcaggtcaaatgacctaaagtatatgaaagttcattgtaaactgtaaaatgcaatgcaaaaaccactgttcttattattactgttattataataaagttatgttattaacacagtgca

SEQ ID NO: 281784 - DNA, 1498 bp, Homo sapiens
acggcagactaaggccagcggtgatggcttgaatgccaggctgggggctgggatttttcctgaggatttcacaggacagaggttggcttggaaagaccaaggcggcggctgcgggcgcagagcggagatgcagcggcttggggccaccctgctgtgcctgctgctggcggcggcggtccccacggcccccgcgcccgctccgacggcgacctcggctccagtcaagcccggcccggctctcagctacccgcaggaggaggccaccctcaatgagatgttccgcgaggttgaggaactgatggaggacacgcagcacaaattgcgcagcgcggtggaagagatggaggcagaagaagctgctgctaaagcatcatcagaagtgaacctggcaaacttacctcccagctatcacaatgagaccaacacagacacgaaggttggaaataataccatccatgtgcaccgagaaattcacaaggaggaatgtaaatatgatataccccatttccaaaagagaaaccctctattgctacaaaattaaacattcatttgctggttgtgcgttcaaaattctctggcagatttttccccaaactaccacctgtctgagtgcctcttggtctaacatcatgcatgaagaacaaccaggttcattcccattctgacctgatgaagaaagctctgcgaatctcaaggaacatagcactagcttgcccctggtgtgcaatgtctctgacatgatttggcaggactctgagagcaaactgcctaagactgtgtgctgtgcagatattcagggtcgttgtgagcatcccgttgtgaatatcaaggagcctgccccctcagctcatctcaactcctgtatgcaagggcacagcggcttcacaaaagagcctcacttttattcaagtgcgcaggtaattacttggttgaaacaatagtgtttctgtgccacagagcacaggggatcaatttttatgtgccgttgccttgactataaagtagcttttgtgtggcacttctcccactgcatcgtaatgggctcagttagatggatcagctacagagtgtatgagctccaggtaaatgaatgagtttaccagcagaacataatcctttggcattgctcatctgcgactgaagaatgttttcaaagtgattattttattcttgtcaaaaccaatatcaagtcaccctttctgacaataattaaccaacaggtttggttgcttcttaaagttgcttcttgtaaatgtcagaatatctgagtgtgagtcctaccagtcactagtgtgatttttgaaaaattacttaaatgtcctgattctcactaactgcatttatgaaataaggatatcaacatctacattacagtactgtgcaggtcaaatgacctaaagtatatgaaagttcattgtaaactgtaaaatgcaatgcaaaaaccactgttcttattattactgttattataataaagttatgttattaacacagtgca

SEQ ID NO: 281785 - DNA, 255 bp, Homo sapiens
gcgcccgccactactactactactgctcgaattcaagcttctaacgatgtacggtgacatgctttctttgagttttaaattatgtataaacataagttgcatttagaaatcaagcataaatcacttcaactgctcttctgtagttcttggatttcttttcccttttgactttgaataaatgtaaaatcctttcagccagaaaaagtaaaatagaaacaacctgtattaaaaatcttccatagaagcaaatttgcc

SEQ ID NO: 281786 - DNA, 2512 bp, Homo sapiens
  misc_feature (31)..(31): n is a, c, g, or t
tctggtcgggctcccgtgtaatcggccgagncgacgccaaggggagggggctgacctgtgcttggtccaccccaggcggcggctgcgggcgcagagcggagatgcagcggcttggggccaccctgctgtgcctgctgctggcggcggcggtccccacggcccccgcgcccgctccgacggcgacctcggctccagtcaagcccggcccggctctcagctacccgcaggaggaggccaccctcaatgagatgttccgcgaggttgaggaactgatggaggacacgcagcacaaattgcgcagcgcggtggaagagatggaggcagaagaagctgctgctaaagcatcatcagaagtgaacctggcaaacttacctcccagctatcacaatgagaccaacacagacacgaaggttggaaataataccatccatgtgcaccgagaaattcacaagataaccaacaaccagactggacaaatggtcttttcagagacagttatcacatctgtgggagacgaagaaggcagaaggagccacgagtgcatcatcgacgaggactgtgggcccagcatgtactgccagtttgccagcttccagtacacctgccagccatgccggggccagaggatgctctgcacccgggacagtgagtgctgtggagaccagctgtgtgtctggggtcactgcaccaaaatggccaccaggggcagcaatgggaccatctgtgacaaccagagggactgccagccggggctgtgctgtgccttccagagaggcctgctgttccctgtgtgcacacccctgcccgtggagggcgagctttgccatgaccccgccagccggcttctggacctcatcacctgggagctagagcctgatggagccttggaccgatgcccttgtgccagtggcctcctctgccagccccacagccacagcctggtgtatgtgtgcaagccgaccttcgtggggagccgtgaccaagatggggagatcctgctgcccagagaggtccccgatgagtatgaagttggcagcttcatggaggaggtgcgccaggagctggaggacctggagaggagcctgactgaagagatggcgctgggggagcctgcggctgccgccgctgcactgctgggaggggaagagatttagatctggaccaggctgtgggtagatgtgcaatagaaatagctaatttatttccccaggtgtgtgctttaggcgtgggctgaccaggcttcttcctacatcttcttcccagtaagtttcccctctggcttgacagcatgaggtgttgtgcatttgttcagctcccccaggctgttctccaggcttcacagtctggtgcttgggagagtcaggcagggttaaactgcaggagcagtttgccacccctgtccagattattggctgctttgcctctaccagttggcagacagccgtttgttctacatggctttgataattgtttgaggggaggagatggaaacaatgtggagtctccctctgattggttttggggaaatgtggagaagagtgccctgctttgcaaacatcaacctggcaaaaatgcaacaaatgaattttccacgcagttctttccatgggcataggtaagctgtgccttcagctgttgcagatgaaatgttctgttcaccctgcattacatgtgtttattcatccagcagtgttgctcagctcctacctctgtgccagggcagcattttcatatccaagatcaattccctctctcagcacagcctggggagggggtcattgttctcctcgtccatcagggatctcagaggctcagagactgcaagctgcttgcccaagtcacacagctagtgaagaccagagcagtttcatctggttgtgactctaagctcagtgctctctccactaccccacaccagccttggtgccaccaaaagtgctccccaaaaggaaggagaatgggatttttcttttgaggcatgcacatctggaattaaggtcaaactaattctcacatccctctaaaagtaaactactgttaggaacagcagtgttctcacagtgtggggcagccgtccttctaatgaagacaatgatattgacactgtccctctttggcagttgcattagtaactttgaaaggtatatgactgagcgtagcatacaggttaacctgcagaaacagtacttaggtaattgtagggcgaggattataaatgaaatttgcaaaatcacttagcagcaactgaagacaattatcaaccacgtggagaaaatcaaaccgagcagggctgtgtgaaacatggttgtaatatgcgactgcgaacactgaactctacgccactccacaaatgatgttttcaggtgtcatggactgttgccaccatgtattcatccagagttcttaaagtttaaagttgcacatgattgtataagcatgctttctttgagttttaaattatgtataaacataagttgcatttagaaatcaagcataaatcacttcaactgct

SEQ ID NO: 281787 - DNA, 2419 bp, Homo sapiens
ggtccgcgcgcctctgatcgcgttccgggacacacaggcggcggctgcgggcgcagagcggagatgcagcggcttggggccaccctgctgtgcctgctgctggcggcggcggtccccacggcccccgcgcccgctccgacggcgacctcggctccagtcaagcccggcccggctctcagctacccgcaggaggaggccaccctcaatgagatgttccgcgaggttgaggaactgatggaggacacgcagcacaaattgcgcagcgcggtggaagagatggaggcagaagaagctgctgctaaagcatcatcagaagtgaacctggcaaacttacctcccagctatcacaatgagaccaacacagacacgaaggttggaaataataccatccatgtgcaccgagaaattcacaagataaccaacaaccagactggacaaatggtcttttcagagacagttatcacatctgtgggagacgaagaaggcagaaggagccacgagtgcatcatcgacgaggactgtgggcccagcatgtactgccagtttgccagcttccagtacacctgccagccatgccggggccagaggatgctctgcacccgggacagtgagtgctgtggagaccagctgtgtgtctggggtcactgcaccaaaatggccaccaggggcagcaatgggaccatctgtgacaaccagagggactgccagccggggctgtgctgtgccttccagagaggcctgctgttccctgtgtgcacacccctgcccgtggagggcgagctttgccatgaccccgccagccggcttctggacctcatcacctgggagctagagcctgatggagccttggaccgatgcccttgtgccagtggcctcctctgccagccccacagccacagcctggtgtatgtgtgcaagccgaccttcgtggggagccgtgaccaagatggggagatcctgctgcccagagaggtccccgatgagtatgaagttggcagcttcatggaggaggtgcgccaggagctggaggacctggagaggagcctgactgaagagatggcgctgggggagcctgcggctgccgccgctgcactgctgggaggggaagagatttagatctggaccaggctgtgggtagatgtgcaatagaaatagctaatttatttccccaggtgtgtgctttaggcgtgggctgaccaggcttcttcctacatcttcttcccagtaagtttcccctctggcttgacagcatgaggtgttgtgcatttgttcagctcccccaggctgttctccaggcttcacagtctggtgcttgggagagtcaggcagggttaaactgcaggagcagtttgccacccctgtccagattattggctgctttgcctctaccagttggcagacagccgtttgttctacatggctttgataattgtttgaggggaggagatggaaacaatgtggagtctccctctgattggttttggggaaatgtggagaagagtgccctgctttgcaaacatcaacctgctgtgccttcagctgttgcagatgaaatgttctgttcaccctgcattacatgtgtttattcatccagcagtgttgctcagctcctacctctgtgccagggcagcattttcatatccaagatcaattccctctctcagcacagcctggggagggggtcattgttctcctcgtccatcagggatctcagaggctcagagactgcaagctgcttgcccaagtcacacagctagtgaagaccagagcagtttcatctggttgtgactctaagctcagtgctctctccactaccccacaccagccttggtgccaccaaaagtgctccccaaaaggaaggagaatgggatttttcttttgaggcatgcacatctggaattaaggtcaaactaattctcacatccctctaaaagtaaactactgttaggaacagcagtgttctcacagtgtggggcagccgtccttctaatgaagacaatgatattgacactgtccctctttggcagttgcattagtaactttgaaaggtatatgactgagcgtagcatacaggttaacctgcagaaacagtacttaggtaattgtagggcgaggattataaatgaaatttgcaaaatcacttagcagcaactgaagacaattatcaaccacgtggagaaaatcaaaccgagcagggctgtgtgaaacatggttgtaatatgcgactgcgaacactgaactctacgccactccacaaatgatgttttcaggtgtcatggactgttgccaccatgtattcatccagagttcttaaagtttaaagttgcacatgattgtataagcatgctttctttgagttttaaattatgtataaacataagttgcatttagaaatcaagcataaatcacttcaactgct

SEQ ID NO: 281788 - DNA, 1735 bp, Homo sapiens
ggtcttttcagagacagttatcacatctgtgggagacgaagaaggcagaaggagccacgagtgcatcatcgacggcgacctcggctccagtcaagcccggcccggctctcagctacccgcaggaggaggccaccctcaatgagatgttccgcgaggttgaggaactgatggaggacacgcagcacaaattgcgcagcgcggtggaagagatggaggcagaagaagctgctgctaaagcatcatcagaagtgaacctggcaaacttacctcccagctatcacaatgagaccaacacagacacgaaggttggaaataataccatccatgtgcaccgagaaattcacaaggctgcactgctgggaggggaagagatttagatctggaccaggctgtgggtagatgtgcaatagaaatagctaatttatttccccaggtgtgtgctttaggcgtgggctgaccaggcttcttcctacatcttcttcccagtaagtttcccctctggcttgacagcatgaggtgttgtgcatttgttcagctcccccaggctgttctccaggcttcacagtctggtgcttgggagagtcaggcagggttaaactgcaggagcagtttgccacccctgtccagattattggctgctttgcctctaccagttggcagacagccgtttgttctacatggctttgataattgtttgaggggaggagatggaaacaatgtggagtctccctctgattggttttggggaaatgtggagaagagtgccctgctttgcaaacatcaacctggcaaaaatgcaacaaatgaattttccacgcagttctttccatgggcataggtaagctgtgccttcagctgttgcagatgaaatgttctgttcaccctgcattacatgtgtttattcatccagcagtgttgctcagctcctacctctgtgccagggcagcattttcatatccaagatcaattccctctctcagcacagcctggggagggggtcattgttctcctcgtccatcagggatctcagaggctcagagactgcaagctgcttgcccaagtcacacagctagtgaagaccagagcagtttcatctggttgtgactctaagctcagtgctctctccactaccccacaccagccttggtgccaccaaaagtgctccccaaaaggaaggagaatgggatttttcttttgaggcatgcacatctggaattaaggtcaaactaattctcacatccctctaaaagtaaactactgttaggaacagcagtgttctcacagtgtggggcagccgtccttctaatgaagacaatgatattgacactgtccctctttggcagttgcattagtaactttgaaaggtatatgactgagcgtagcatacaggttaacctgcagaaacagtacttaggtaattgtagggcgaggattataaatgaaatttgcaaaatcacttagcagcaactgaagacaattatcaaccacgtggagaaaatcaaaccgagcagggctgtgtgaaacatggttgtaatatgcgactgcgaacactgaactctacgccactccacaaatgatgttttcaggtgtcatggactgttgccaccatgtattcatccagagttcttaaagtttaaagttgcacatgattgtataagcatgctttctttgagttttaaattatgtataaacataagttgcatttagaaatcaagcataaatcacttcaactgct

SEQ ID NO: 281789 - DNA, 2595 bp, Homo sapiens
ggtccgcgcgcctctgatcgcgttccgggacacacaggcggcggctgcgggcgcagagcggagatgcagcggcttggggccaccctgctgtgcctgctgctggcggcggcggtccccacggcccccgcgcccgctccgacggcgacctcggctccagtcaagcccggcccggctctcagctacccgcaggaggaggccaccctcaatgagatgttccgcgaggttgaggaactgatggaggacacgcagcacaaattgcgcagcgcggtggaagagatggaggcagaagaagctgctgctaaagcatcatcagaagtgaacctggcaaacttacctcccagctatcacaatgagaccaacacagacacgaaggttggaaataataccatccatgtgcaccgagaaattcacaagataaccaacaaccagactggacaaatggtcttttcagagacagttatcacatctgtgggagacgaagaaggcagaaggagccacgagtgcatcatcgacgaggactgtgggcccagcatgtactgccagtttgccagcttccagtacacctgccagccatgccggggccagaggatgctctgcacccgggacagtgagtgctgtggagaccagctgtgtgtctggggtcactgcaccaaaatggccaccaggggcagcaatgggaccatctgtgacaaccagagggactgccagccggggctgtgctgtgccttccagagaggcctgctgttccctgtgtgcacacccctgcccgtggagggcgagctttgccatgaccccgccagccggcttctggacctcatcacctgggagctagagcctgatggagccttggaccgatgcccttgtgccagtggcctcctctgccagccccacagccacagcctggtgtatgtgtgcaagccgaccttcgtggggagccgtgaccaagatggggagatcctgctgcccagagaggtccccgatgagtatgaagttggcagcttcatggaggaggtgcgccaggagctggaggacctggagaggagcctgactgaagagatggcgctgggggagcctgcggctgccgccgctgcactgctgggaggggaagagatttagatctggaccaggctgtgggtagatgtgcaatagaaatagctaatttatttccccaggtgtgtgctttaggcgtgggctgaccaggcttcttcctacatcttcttcccagtaagtttcccctctggcttgacagcatgaggtgttgtgcatttgttcagctcccccaggctgttctccaggcttcacagtctggtgcttgggagagtcaggcagggttaaactgcaggagcagtttgccacccctgtccagattattggctgctttgcctctaccagttggcagacagccgtttgttctacatggctttgataattgtttgaggggaggagatggaaacaatgtggagtctccctctgattggttttggggaaatgtggagaagagtgccctgctttgcaaacatcaacctggcaaaaatgcaacaaatgaattttccacgcagttctttccatgggcataggtaagctgtgccttcagctgttgcagatgaaatgttctgttcaccctgcattacatgtgtttattcatccagcagtgttgctcagctcctacctctgtgccagggcagcattttcatatccaagatcaattccctctctcagcacagcctggggagggggtcattgttctcctcgtccatcagggatctcagaggctcagagactgcaagctgcttgcccaagtcacacagctagtgaagaccagagcagtttcatctggttgtgactctaagctcagtgctctctccactaccccacaccagccttggtgccaccaaaagtgctccccaaaaggaaggagaatgggatttttcttttgaggcatgcacatctggaattaaggtcaaactaattctcacatccctctaaaagtaaactactgttaggaacagcagtgttctcacagtgtggggcagccgtccttctaatgaagacaatgatattgacactgtccctctttggcagttgcattagtaactttgaaaggtatatgactgagcgtagcatacaggttaacctgcagaaacagtacttaggtaattgtagggcgaggattataaatgaaatttgcaaaatcacttagcagcaactgaagacaattatcaaccacgtggagaaaatcaaaccgagcagggctgtgtgaaacatggttgtaatatgcgactgcgaacactgaactctacgccactccacaaatgatgttttcaggtgtcatggactgttgccaccatgtattcatccagagttcttaaagtttaaagttgcacatgattgtataagcatgctttctttgagttttaaattatgtataaacataagttgcatttagaaatcaagcataaatcacttcaactgctcttctgtagttcttggatttcttttcccttttgactttgaataaatgtaaaatcctttcagccagaaaaagtaaaatagaaacaacctgtattaaaaatcttccatagaagcaaatttgcc

SEQ ID NO: 281790 - DNA, 2885 bp, Homo sapiens
  misc_feature (2885)..(2885): n is a, c, g, or t
ggtccgcgcgcctctgatcgcgttccgggacacacaggcggcggctgcgggcgcagagcggagatgcagcggcttggggccaccctgctgtgcctgctgctggcggcggcggtccccacggcccccgcgcccgctccgacggcgacctcggctccagtcaagcccggcccggctctcagctacccgcaggaggaggccaccctcaatgagatgttccgcgaggttgaggaactgatggaggacacgcagcacaaattgcgcagcgcggtggaagagatggaggcagaagaagctgctgctaaagcatcatcagaagtgaacctggcaaacttacctcccagctatcacaatgagaccaacacagacacgaaggttggaaataataccatccatgtgcaccgagaaattcacaagataaccaacaaccagactggacaaatggtcttttcagagacagttatcacatctgtgggagacgaagaaggcagaaggagccacgagtgcatcatcgacgaggactgtgggcccagcatgtactgccagtttgccagcttccagtacacctgccagccatgccggggccagaggatgctctgcacccgggacagtgagtgctgtggagaccagctgtgtgtctggggtcactgcaccaaaatggccaccaggggcagcaatgggaccatctgtgacaaccagagggactgccagccggggctgtgctgtgccttccagagaggcctgctgttccctgtgtgcacacccctgcccgtggagggcgagctttgccatgaccccgccagccggcttctggacctcatcacctgggagctagagcctgatggagccttggaccgatgcccttgtgccagtggcctcctctgccagccccacagccacagcctggtgtatgtgtgcaagccgaccttcgtggggagccgtgaccaagatggggagatcctgctgcccagagaggtccccgatgagtatgaagttggcagcttcatggaggaggtgcgccaggagctggaggacctggagaggagcctgactgaagagatggcgctgggggagcctgcggctgccgccgctgcactgctgggaggggaagagatttagatctggaccaggctgtgggtagatgtgcaatagaaatagctaatttatttccccaggtgtgtgctttaggcgtgggctgaccaggcttcttcctacatcttcttcccagtaagtttcccctctggcttgacagcatgaggtgttgtgcatttgttcagctcccccaggctgttctccaggcttcacagtctggtgcttgggagagtcaggcagggttaaactgcaggagcagtttgccacccctgtccagattattggctgctttgcctctaccagttggcagacagccgtttgttctacatggctttgataattgtttgaggggaggagatggaaacaatgtggagtctccctctgattggttttggggaaatgtggagaagagtgccctgctttgcaaacatcaacctggcaaaaatgcaacaaatgaattttccacgcagttctttccatgggcataggtaagctgtgccttcagctgttgcagatgaaatgttctgttcaccctgcattacatgtgtttattcatccagcagtgttgctcagctcctacctctgtgccagggcagcattttcatatccaagatcaattccctctctcagcacagcctggggagggggtcattgttctcctcgtccatcagggatctcagaggctcagagactgcaagctgcttgcccaagtcacacagctagtgaagaccagagcagtttcatctggttgtgactctaagctcagtgctctctccactaccccacaccagccttggtgccaccaaaagtgctccccaaaaggaaggagaatgggatttttcttttgaggcatgcacatctggaattaaggtcaaactaattctcacatccctctaaaagtaaactactgttaggaacagcagtgttctcacagtgtggggcagccgtccttctaatgaagacaatgatattgacactgtccctctttggcagttgcattagtaactttgaaaggtatatgactgagcgtagcatacaggttaacctgcagaaacagtacttaggtaattgtagggcgaggattataaatgaaatttgcaaaatcacttagcagcaactgaagacaattatcaaccacgtggagaaaatcaaaccgagcagggctgtgtgaaacatggttgtaatatgcgactgcgaacactgaactctacgccactccacaaatgatgttttcaggtgtcatggactgttgccaccatgtattcatccagagttcttaaagtttaaagttgcacatgattgtataagcatgctttctttgagttttaaattatgtataaacataagttgcatttagaaatcaagcataaatcacttcaactgctaaaaaaaaaaaaaaaaaaaaaaaaaaaaaaaaaaaaaaaaaaaaaaaaaaaaaaaaaaaaaaaaaaaaaaaaaaaaaaaaaaaggggggggggggggaaaaaataccggggggggaatgcccccctttttaagaaaggggccacccaagagggagcacataacacgaacgggcggcggccgctaaacaaacgagcggggagggacaaacggacacgggacttgcggacagaccccatggctgggggcaccaaggggccccccccagaaaagagccggggacaaaacaggcggtttgcgcacccggccttgtgctgctctgctgttttatacccctctcgtactcagggagacacgcaacacgccgcacaaactgcacagacccaaaagaccagcggcagctcgacctgtcn

SEQ ID NO: 281791 - DNA, 1918 bp, Homo sapiens
ggtccgcgcgcctctgatcgcgttccgggacacacaggcggcggctgcgggcgcagagcggagatgcagcggcttggggccaccctgctgtgcctgctgctggcggcggcggtccccacggcccccgcgcccgctccgacggcgacctcggctccagtcaagcccggcccggctctcagctacccgcaggaggaggccaccctcaatgagatgttccgcgaggttgaggaactgatggaggacacgcagcacaaattgcgcagcgcggtggaagagatggaggcagaagaagctgctgctaaagcatcatcagaagtgaacctggcaaacttacctcccagctatcacaatgagaccaacacagacacgaaggttggaaataataccatccatgtgcaccgagaaattcacaagataaccaacaaccagactggacaaatggtcttttcagagacagttatcacatctgtgggagacgaagaaggcagaaggagccacgagtgcatcatcgacgaggactgtgggcccagcatgtactgccagtttgccagcttccagtacacctgccagccatgccggggccagaggatgctctgcacccgggacagtgagtgctgtggagaccagctgtgtgtctggggtcactgcaccaaaatggccaccaggggcagcaatgggaccatctgtgacaaccagagggactgccagccggggctgtgctgtgccttccagagaggcctgctgttccctgtgtgcacacccctgcccgtggagggcgagctttgccatgaccccgccagccggcttctggacctcatcacctgggagctagagcctgatggagccttggaccgatgcccttgtgccagtggcctcctctgccagccccacagccacagcctggtgtatgtgtgcaagccgaccttcgtggggagccgtgaccaagatggggagatcctgctgcccagagaggtccccgatgagtatgaagttggcagcttcatggaggaggtgcgccaggagctggaggacctggagaggagcctgactgaagagatggcgctgggggagcctgcggctgccgccgctgcactgctgggaggggaagagatttagatctggaccaggctgtgggtagatgtgcaatagaaatagctaatttatttccccaggtgtgtgctttaggcgtgggctgaccaggcttcttcctacatcttcttcccagtaagtttcccctctggcttgacagcatgaggtgttgtgcatttgttcagctcccccaggctgttctccaggcttcacagtctggtgcttgggagagtcaggcagggttaaactgcaggagcagtttgccacccctgtccagattattggctgctttgcctctaccagttggcagacagccgtttgttctacatggctttgataattgtttgaggggaggagatggaaacaatgtggagtctccctctgattggttttggggaaatgtggagaagagtgccctgctttgcaaacatcaacctggcaaaaatgcaacaaatgaattttccacgcagttctttccatgggcataggtaagctgtgccttcagctgttgcagatgaaatgttctgttcaccctgcattacatgtgtttattcatccagcagtgttgctcagctcctacctctgtgccagggcagcattttcatatccaagatcaattccctctctcagcacagcctggggagggggtcattgttctcctcgtccatcagggatctcagaggctcagagactgcaagctgcttgcccaagtcacacagctagtgaagaccagagcagtttcatctggttgtgactctaagctcagtgctctctccactaccccacaccagccttggtgccaccaaaagaccctattctcacatccctc

SEQ ID NO: 281792 - DNA, 781 bp, Homo sapiens
agcctgagcaatactgctggatgaataaacacatgtaatgcagggtgaacagaacatttcatctgcaacagctgaaggcacagctcacctatgcccatggaaagaactgcgtggaaaattcctttgttgcatttttgccaggttgatgtttgcaaagcagggcactcttctccacatttccccaaaaccaatcagagggagactctgctccccaaaaggaaggagaatgggatttttcttttgaggcatgcacatctggaattaaggtcaaactaattctcacatccctctaaaagtaaactactgttaggaacagcagtgttctcacagtgtggggcagccgtccttctaatgaagacaatgatattgacactgtccctctttggcagttgcattagtaactttgaaaggtatatgactgagcgtagcatacaggttaacctgcagaaacagtacttaggtaattgtagggcgaggattataaatgaaatttgcaaaatcacttagcagcaactgaagacaattatcaaccacgtggagaaaatcaaaccgagcagggctgtgtgaaacatggttgtaatatgcgactgcgaacactgaactctacgccactccacaaatgatgttttcaggtgtcatggactgttgccaccatgtattcatccagagttcttaaagtttaaagttgcacatgattgtataagcatgctttctttgagttttaaattatgtataaacataagttgcatttagaaatcaagcataaatcacttcaactgct

SEQ ID NO: 281793 - DNA, 2681 bp, Homo sapiens
  misc_feature (31)..(31): n is a, c, g, or t
tctggtcgggctcccgtgtaatcggccgagncgacgccaaggggagggggctgacctgtgcttggtccaccccaggtaggggctgagagaggcttgaggtggaagtgggggtcgggcactctgacctggtcgaggaggggctagggtttgaaccggggacagagtctaggtgagctggggcttgggagctattagcgtagaggatccgggttcggttgctctggcgagggctccagcatcacaggcggcggctgcgggcgcagagcggagatgcagcggcttggggccaccctgctgtgcctgctgctggcggcggcggtccccacggcccccgcgcccgctccgacggcgacctcggctccagtcaagcccggcccggctctcagctacccgcaggaggaggccaccctcaatgagatgttccgcgaggttgaggaactgatggaggacacgcagcacaaattgcgcagcgcggtggaagagatggaggcagaagaagctgctgctaaagcatcatcagaagtgaacctggcaaacttacctcccagctatcacaatgagaccaacacagacacgaaggttggaaataataccatccatgtgcaccgagaaattcacaagataaccaacaaccagactggacaaatggtcttttcagagacagttatcacatctgtgggagacgaagaaggcagaaggagccacgagtgcatcatcgacgaggactgtgggcccagcatgtactgccagtttgccagcttccagtacacctgccagccatgccggggccagaggatgctctgcacccgggacagtgagtgctgtggagaccagctgtgtgtctggggtcactgcaccaaaatggccaccaggggcagcaatgggaccatctgtgacaaccagagggactgccagccggggctgtgctgtgccttccagagaggcctgctgttccctgtgtgcacacccctgcccgtggagggcgagctttgccatgaccccgccagccggcttctggacctcatcacctgggagctagagcctgatggagccttggaccgatgcccttgtgccagtggcctcctctgccagccccacagccacagcctggtgtatgtgtgcaagccgaccttcgtggggagccgtgaccaagatggggagatcctgctgcccagagaggtccccgatgagtatgaagttggcagcttcatggaggaggtgcgccaggagctggaggacctggagaggagcctgactgaagagatggcgctgggggagcctgcggctgccgccgctgcactgctgggaggggaagagatttagatctggaccaggctgtgggtagatgtgcaatagaaatagctaatttatttccccaggtgtgtgctttaggcgtgggctgaccaggcttcttcctacatcttcttcccagtaagtttcccctctggcttgacagcatgaggtgttgtgcatttgttcagctcccccaggctgttctccaggcttcacagtctggtgcttgggagagtcaggcagggttaaactgcaggagcagtttgccacccctgtccagattattggctgctttgcctctaccagttggcagacagccgtttgttctacatggctttgataattgtttgaggggaggagatggaaacaatgtggagtctccctctgattggttttggggaaatgtggagaagagtgccctgctttgcaaacatcaacctggcaaaaatgcaacaaatgaattttccacgcagttctttccatgggcataggtaagctgtgccttcagctgttgcagatgaaatgttctgttcaccctgcattacatgtgtttattcatccagcagtgttgctcagctcctacctctgtgccagggcagcattttcatatccaagatcaattccctctctcagcacagcctggggagggggtcattgttctcctcgtccatcagggatctcagaggctcagagactgcaagctgcttgcccaagtcacacagctagtgaagaccagagcagtttcatctggttgtgactctaagctcagtgctctctccactaccccacaccagccttggtgccaccaaaagtgctccccaaaaggaaggagaatgggatttttcttttgaggcatgcacatctggaattaaggtcaaactaattctcacatccctctaaaagtaaactactgttaggaacagcagtgttctcacagtgtggggcagccgtccttctaatgaagacaatgatattgacactgtccctctttggcagttgcattagtaactttgaaaggtatatgactgagcgtagcatacaggttaacctgcagaaacagtacttaggtaattgtagggcgaggattataaatgaaatttgcaaaatcacttagcagcaactgaagacaattatcaaccacgtggagaaaatcaaaccgagcagggctgtgtgaaacatggttgtaatatgcgactgcgaacactgaactctacgccactccacaaatgatgttttcaggtgtcatggactgttgccaccatgtattcatccagagttcttaaagtttaaagttgcacatgattgtataagcatgctttctttgagttttaaattatgtataaacataagttgcatttagaaatcaagcataaatcacttcaactgct

SEQ ID NO: 281794 - DNA, 896 bp, Homo sapiens
ggcgcgtcttgcgggctccctcgggtaccggcgctgccgcaccccgccgcgctcccgcacccgcggcccgcccaccgcgccgctcccgcatctgcacccgcagcccggcggcctcccggcgggagcgagcagatccagtccggcccgcagcgcaactcggtccagtcggggcggcggctgcgggcgcagagcggagatgcagcggcttggggccaccctgctgtgcctgctgctggcggcggcggtccccacggcccccgcgcccgctccgacggcgacctcggctccagtcaagcccggcccggctctcagctacccgcaggaggaggccaccctcaatgagatgttccgcgaggttgaggaactgatggaggacacgcagcacaaattgcgcagcgcggtggaagagatggaggcagaagaagctgctgctaaagcatcatcagaagtgaacctggcaaacttacctcccagctatcacaatgagaccaacacagacacgaaggttggaaataataccatccatgtgcaccgagaaattcacaagataaccaacaaccagactggacaaatggtcttttcagagacagttatcacatctgtgggagacgaagaaggcagaaggagccacgagtgcatcatcgacgaggactgtgggcccagcatgtactgccagtttgccagcttccagtacacctgccagccatgccggggccagaggatgctctgcacccgggacagtgagtgctgtggagaccagctgtgtgtctggggtcactgcaccaaaatggccaccaggggcagcaatgggaccatctgtgacaaccagagggactgccagccggggctgtgctgtgccttccagagaggtgagtggcctcccctcagatgcagga

SEQ ID NO: 281795 - DNA, 2607 bp, Homo sapiens
ggcgcgtcttgcgggctccctcgggtaccggcgctgccgcaccccgccgcgctcccgcacccgcggcccgcccaccgcgccgctcccgcatctgcacccgcagcccggcggcctcccggcgggagcgagcagatccagtccggcccgcagcgcaactcggtccagtcggggcggcggctgcgggcgcagagcggagatgcagcggcttggggccaccctgctgtgcctgctgctggcggcggcggtccccacggcccccgcgcccgctccgacggcgacctcggctccagtcaagcccggcccggctctcagctacccgcaggaggaggccaccctcaatgagatgttccgcgaggttgaggaactgatggaggacacgcagcacaaattgcgcagcgcggtggaagagatggaggcagaagaagctgctgctaaagcatcatcagaagtgaacctggcaaacttacctcccagctatcacaatgagaccaacacagacacgaaggttggaaataataccatccatgtgcaccgagaaattcacaagataaccaacaaccagactggacaaatggtcttttcagagacagttatcacatctgtgggagacgaagaaggcagaaggagccacgagtgcatcatcgacgaggactgtgggcccagcatgtactgccagtttgccagcttccagtacacctgccagccatgccggggccagaggatgctctgcacccgggacagtgagtgctgtggagaccagctgtgtgtctggggtcactgcaccaaaatggccaccaggggcagcaatgggaccatctgtgacaaccagagggactgccagccggggctgtgctgtgccttccagagaggcctgctgttccctgtgtgcacacccctgcccgtggagggcgagctttgccatgaccccgccagccggcttctggacctcatcacctgggagctagagcctgatggagccttggaccgatgcccttgtgccagtggcctcctctgccagccccacagccacagcctggtgtatgtgtgcaagccgaccttcgtggggagccgtgaccaagatggggagatcctgctgcccagagaggtccccgatgagtatgaagttggcagcttcatggaggaggtgcgccaggagctggaggacctggagaggagcctgactgaagagatggcgctgggggagcctgcggctgccgccgctgcactgctgggaggggaagagatttagatctggaccaggctgtgggtagatgtgcaatagaaatagctaatttatttccccaggtgtgtgctttaggcgtgggctgaccaggcttcttcctacatcttcttcccagtaagtttcccctctggcttgacagcatgaggtgttgtgcatttgttcagctcccccaggctgttctccaggcttcacagtctggtgcttgggagagtcaggcagggttaaactgcaggagcagtttgccacccctgtccagattattggctgctttgcctctaccagttggcagacagccgtttgttctacatggctttgataattgtttgaggggaggagatggaaacaatgtggagtctccctctgattggttttggggaaatgtggagaagagtgccctgctttgcaaacatcaacctggcaaaaatgcaacaaatgaattttccacgcagttctttccatgggcataggtaagctgtgccttcagctgttgcagatgaaatgttctgttcaccctgcattacatgtgtttattcatccagcagtgttgctcagctcctacctctgtgccagggcagcattttcatatccaagatcaattccctctctcagcacagcctggggagggggtcattgttctcctcgtccatcagggatctcagaggctcagagactgcaagctgcttgcccaagtcacacagctagtgaagaccagagcagtttcatctggttgtgactctaagctcagtgctctctccactaccccacaccagccttggtgccaccaaaagtgctccccaaaaggaaggagaatgggatttttcttttgaggcatgcacatctggaattaaggtcaaactaattctcacatccctctaaaagtaaactactgttaggaacagcagtgttctcacagtgtggggcagccgtccttctaatgaagacaatgatattgacactgtccctctttggcagttgcattagtaactttgaaaggtatatgactgagcgtagcatacaggttaacctgcagaaacagtacttaggtaattgtagggcgaggattataaatgaaatttgcaaaatcacttagcagcaactgaagacaattatcaaccacgtggagaaaatcaaaccgagcagggctgtgtgaaacatggttgtaatatgcgactgcgaacactgaactctacgccactccacaaatgatgttttcaggtgtcatggactgttgccaccatgtattcatccagagttcttaaagtttaaagttgcacatgattgtataagcatgctttctttgagttttaaattatgtataaacataagttgcatttagaaatcaagcataaatcacttcaactgct

SEQ ID NO: 281796 - DNA, 2514 bp, Homo sapiens
  misc_feature (8)..(8): n is a, c, g, or t
  misc_feature (14)..(14): n is a, c, g, or t
  misc_feature (17)..(17): n is a, c, g, or t
  misc_feature (19)..(19): n is a, c, g, or t
  misc_feature (28)..(29): n is a, c, g, or t
  misc_feature (35)..(35): n is a, c, g, or t
  misc_feature (38)..(38): n is a, c, g, or t
  misc_feature (54)..(54): n is a, c, g, or t
  misc_feature (59)..(59): n is a, c, g, or t
  misc_feature (61)..(61): n is a, c, g, or t
  misc_feature (63)..(63): n is a, c, g, or t
  misc_feature (65)..(65): n is a, c, g, or t
  misc_feature (72)..(72): n is a, c, g, or t
  misc_feature (94)..(94): n is a, c, g, or t
ttttttgnctttantgncnttattttannttttgnacntaaagaaaaatcatgntcatntncntnatgaacnaaaacttaaaaaggcagaactngaagacacgtgtccttcaccaaagcaaatctgtgctaaaggttccaaacatttcaatttttaaaataaatattttcattttccgatgtctactttcatgtcttcagagtgtcacaggaaatcgaagcctatcatgaattacaatttttttttagagtcccggctcactgtgtttggtaacttgccataccatatccggcttggttaggaggaggtattacagatggaggcagaagaagctgctgctaaagcatcatcagaagtgaacctggcaaacttacctcccagctatcacaatgagaccaacacagacacgaaggttggaaataataccatccatgtgcaccgagaaattcacaagataaccaacaaccagactggacaaatggtcttttcagagacagttatcacatctgtgggagacgaagaaggcagaaggagccacgagtgcatcatcgacgaggactgtgggcccagcatgtactgccagtttgccagcttccagtacacctgccagccatgccggggccagaggatgctctgcacccgggacagtgagtgctgtggagaccagctgtgtgtctggggtcactgcaccaaaatggccaccaggggcagcaatgggaccatctgtgacaaccagagggactgccagccggggctgtgctgtgccttccagagaggcctgctgttccctgtgtgcacacccctgcccgtggagggcgagctttgccatgaccccgccagccggcttctggacctcatcacctgggagctagagcctgatggagccttggaccgatgcccttgtgccagtggcctcctctgccagccccacagccacagcctggtgtatgtgtgcaagccgaccttcgtggggagccgtgaccaagatggggagatcctgctgcccagagaggtccccgatgagtatgaagttggcagcttcatggaggaggtgcgccaggagctggaggacctggagaggagcctgactgaagagatggcgctgggggagcctgcggctgccgccgctgcactgctgggaggggaagagatttagatctggaccaggctgtgggtagatgtgcaatagaaatagctaatttatttccccaggtgtgtgctttaggcgtgggctgaccaggcttcttcctacatcttcttcccagtaagtttcccctctggcttgacagcatgaggtgttgtgcatttgttcagctcccccaggctgttctccaggcttcacagtctggtgcttgggagagtcaggcagggttaaactgcaggagcagtttgccacccctgtccagattattggctgctttgcctctaccagttggcagacagccgtttgttctacatggctttgataattgtttgaggggaggagatggaaacaatgtggagtctccctctgattggttttggggaaatgtggagaagagtgccctgctttgcaaacatcaacctggcaaaaatgcaacaaatgaattttccacgcagttctttccatgggcataggtaagctgtgccttcagctgttgcagatgaaatgttctgttcaccctgcattacatgtgtttattcatccagcagtgttgctcagctcctacctctgtgccagggcagcattttcatatccaagatcaattccctctctcagcacagcctggggagggggtcattgttctcctcgtccatcagggatctcagaggctcagagactgcaagctgcttgcccaagtcacacagctagtgaagaccagagcagtttcatctggttgtgactctaagctcagtgctctctccactaccccacaccagccttggtgccaccaaaagtgctccccaaaaggaaggagaatgggatttttcttttgaggcatgcacatctggaattaaggtcaaactaattctcacatccctctaaaagtaaactactgttaggaacagcagtgttctcacagtgtggggcagccgtccttctaatgaagacaatgatattgacactgtccctctttggcagttgcattagtaactttgaaaggtatatgactgagcgtagcatacaggttaacctgcagaaacagtacttaggtaattgtagggcgaggattataaatgaaatttgcaaaatcacttagcagcaactgaagacaattatcaaccacgtggagaaaatcaaaccgagcagggctgtgtgaaacatggttgtaatatgcgactgcgaacactgaactctacgccactccacaaatgatgttttcaggtgtcatggactgttgccaccatgtattcatccagagttcttaaagtttaaagttgcacatgattgtataagcatgctttctttgagttttaaattatgtataaacataagttgcatttagaaatcaagcataaatcacttcaactgct

SEQ ID NO: 281797 - DNA, 2193 bp, Homo sapiens
  misc_feature (31)..(31): n is a, c, g, or t
  misc_feature (770)..(770): n is a, c, g, or t
tctggtcgggctcccgtgtaatcggccgagncgacgccaaggggagggggctgacctgtgcttggtccaccccaggtaggggctgagagaggcttgaggtggaagtgggggtcgggcactctgacctggtcgaggaggggctagggtttgaaccggggacagagtctaggtgagctggggcttgggagctattagcgtagaggatccgggttcggttgctctggcgagggctccagcatcacaggcggcggctgcgggcgcagagcggagatgcagcggcttggggccaccctgctgtgcctgctgctggcggcggcggtccccacggcccccgcgcccgctccgacggcgacctcggctccagtcaagcccggcccggctctcagctacccgcaggaggaggccaccctcaatgagatgttccgcgaggttgaggaactgatggaggacacgcagcacaaattgcgcagcgcggtggaagagatggaggcagaagaagctgctgctaaagcatcatcagaagtgaacctggcaaacttacctcccagctatcacaatgagaccaacacagacacgaaggttggaaataataccatccatgtgcaccgagaaattcacaagataaccaacaaccagactggacaaatggtcttttcagagacagttatcacatctgtgggagacgaagaaggcagaaggagccacagtgcatcatcgacgaggactgtgggcccggctctcagctacccgcagaggaggccaccctcctntagatgttccgcgagttgaggactgatggaggacagctgcactgctgggaggggaagagatttagatctggaccaggctgtgggtagatgtgcaatagaaatagctaatttatttccccaggtgtgtgctttaggcgtgggctgaccaggcttcttcctacatcttcttcccagtaagtttcccctctggcttgacagcatgaggtgttgtgcatttgttcagctcccccaggctgttctccaggcttcacagtctggtgcttgggagagtcaggcagggttaaactgcaggagcagtttgccacccctgtccagattattggctgctttgcctctaccagttggcagacagccgtttgttctacatggctttgataattgtttgaggggaggagatggaaacaatgtggagtctccctctgattggttttggggaaatgtggagaagagtgccctgctttgcaaacatcaacctggcaaaaatgcaacaaatgaattttccacgcagttctttccatgggcataggtaagctgtgccttcagctgttgcagatgaaatgttctgttcaccctgcattacatgtgtttattcatccagcagtgttgctcagctcctacctctgtgccagggcagcattttcatatccaagatcaattccctctctcagcacagcctggggagggggtcattgttctcctcgtccatcagggatctcagaggctcagagactgcaagctgcttgcccaagtcacacagctagtgaagaccagagcagtttcatctggttgtgactctaagctcagtgctctctccactaccccacaccagccttggtgccaccaaaagtgctccccaaaaggaaggagaatgggatttttcttttgaggcatgcacatctggaattaaggtcaaactaattctcacatccctctaaaagtaaactactgttaggaacagcagtgttctcacagtgtggggcagccgtccttctaatgaagacaatgatattgacactgtccctctttggcagttgcattagtaactttgaaaggtatatgactgagcgtagcatacaggttaacctgcagaaacagtacttaggtaattgtagggcgaggattataaatgaaatttgcaaaatcacttagcagcaactgaagacaattatcaaccacgtggagaaaatcaaaccgagcagggctgtgtgaaacatggttgtaatatgcgactgcgaacactgaactctacgccactccacaaatgatgttttcaggtgtcatggactgttgccaccatgtattcatccagagttcttaaagtttaaagttgcacatgattgtataagcatgctttctttgagttttaaattatgtataaacataagttgcatttagaaatcaagcataaatcacttcaactgct

SEQ ID NO: 281798 - DNA, 2151 bp, Homo sapiens
  misc_feature (2066)..(2066): n is a, c, g, or t
  misc_feature (2100)..(2100): n is a, c, g, or t
ggtccgcgcgcctctgatcgcgttccgggacacacaggcggcggctgcgggcgcagagcggagatgcagcggcttggggccaccctgctgtgcctgctgctggcggcggcggtccccacggcccccgcgcccgctccgacggcgacctcggctccagtcaagcccggcccggctctcagctacccgcaggaggaggccaccctcaatgagatgttccgcgaggttgaggaactgatggaggacacgcagcacaaattgcgcagcgcggtggaagagatggaggcagaagaagctgctgctaaagcatcatcagaagtgaacctggcaaacttacctcccagctatcacaatgagaccaacacagacacgaaggttggaaataataccatccatgtgcaccgagaaattcacaagataaccaacaaccagactggacaaatggtcttttcagagacagttatcacatctgtgggagacgaagaaggcagaaggagccacgagtgcatcatcgacgaggactgtgggcccagcatgtactgccagtttgccagcttccagtacacctgccagccatgccggggccagaggatgctctgcacccgggacagtgagtgctgtggagaccagctgtgtgtctggggtcactgcaccaaaatggccaccaggggcagcaatgggaccatctgtgacaaccagagggactgccagccggggctgtgctgtgccttccagagaggcctgctgttccctgtgtgcacacccctgcccgtggagggcgagctttgccatgaccccgccagccggcttctggacctcatcacctgggagctagagcctgatggagccttggaccgatgcccttgtgccagtggcctcctctgccagccccacagccacagcctggtgtatgtgtgcaagccgaccttcgtggggagccgtgaccaagatggggagatcctgctgcccagagaggtccccgatgagtatgaagttggcagcttcatggaggaggtgcgccaggagctggaggacctggagaggagcctgactgaagagatggcgctgggggagcctgcggctgccgccgctgcactgctgggaggggaagagatttagatctggaccaggctgtgggtagatgtgcaatagaaatagctaatttatttccccaggtgtgtgctttaggcgtgggctgaccaggcttcttcctacatcttcttcccagtaagtttcccctctggcttgacagcatgaggtgttgtgcatttgttcagctcccccaggctgttctccaggcttcacagtctggtgcttgggagagtcaggcagggttaaactgcaggagcagtttgccacccctgtccagattattggctgctttgcctctaccagttggcagacagccgtttgttctacatggctttgataattgtttgaggggaggagatggaaacaatgtggagtctccctctgattggttttggggaaatgtggagaagagtgccctgctttgcaaacatcaacctggcaaaaatgcaacaaatgaattttccacgcagttctttccatgggcataggtaagctgtgccttcagctgttgcagatgaaatgttctgttcaccctgcattacatgtgtttattcatccagcagtgttgctcagctcctacctctgtgccagggcagcattttcatatccaagatcaattccctctctcagcacagcctggggagggggtcattgttctcctcgtccatcagggatctcagaggctcagagactgcaagctgcttgcccaagtcacacagctagtgaagaccagagcagtttcatctggttgtgactctaagctcagtgctctctccactaccccacaccagccttggtgccaccaaaagtgctccccaaaaggaaggagaatggcagcctccacatctcgggttcaagtgattatcctgcctcagcctccaagtagctgggattgcaggtgtgcaccaccatgcctgggataattttttgtattttttagtagacacggtttcaccatgtttggccaggctggtctnggaacttctgagtgtaaatgatctgcccaccttntgccttcccaagtgcttgggatttacaaggttttaagccacccgaatccat

SEQ ID NO: 281799 - DNA, 755 bp, Homo sapiens
tcgctattcatcggcacctcgctattcatcggcacctcgctattcatcggcggctcagagactgcaagctgcttgcccaagtcacacagctagtgaagaccagagcagtttcatctggttgtgactctaagctcagtgctctctccactaccccacaccagccttggtgccaccaaaagtgctccccaaaaggaaggagaatgggatttttcttttgaggcatgcacatctggaattaaggtcaaactaattctcacatccctctaaaagtaaactactgttaggaacagcagtgttctcacagtgtggggcagccgtccttctaatgaagacaatgatattgacactgtccctctttggcagttgcattagtaactttgaaaggtatatgactgagcgtagcatacaggttaacctgcagaaacagtacttaggtaattgtagggcgaggattataaatgaaatttgcaaaatcacttagcagcaactgaagacaattatcaaccacgtggagaaaatcaaaccgagcagggctgtgtgaaacatggttgtaatatgcgactgcgaacactgaactctacgccactccacaaatgatgttttcaggtgtcatggactgttgccaccatgtattcatccagagttcttaaagtttaaagttgcacatgattgtataagcatgctttctttgagttttaaattatgtataaacataagttgcatttagaaatcaagcataaatcacttcaactgct

SEQ ID NO: 281800 - DNA, 1835 bp, Homo sapiens
gtgcagtcacagagggaacacagagcctagttgtaaacggacagagacgagaggggcaagggaggacagtggatgacagggaagacgagtgggggcagagctgctcaggaccatggctgaggccatcacctatgcagatctgaggtacccaggggctgatgatgatggggaaatcacctacgagaatgttcaagtgcccgcagtcctaggggtgccctcaagcttggcttcttctgtactaggggacaaagcagcggtcaagtcggagcagccaactgcgtcctggagagccgtgacgtcaccagctgtcgggcggattctcccctgccgcacaacctgcctgcgatacctcctgctcggcctgctcctcacctgcctgctgttaggagtgaccgccatctgcctgggagtgcgctgtgagtaaggctgtccctacttcccacttacaccgaacgactttcgtcccgactctcgccccaaagctgatcttcctcagcagggatcatagtcactaccaccacctccttagctttgggtttggtttccagccagggctgttgtcttcctgaattgtcctcacctaatccagtacctccttacgctttagtcagtcaaatcttgtatttcagcctgtgatgcaaaaagttgcaagaagcagaaaaagggctgatgctgcagtctcagggcactagggcagggctggagaagacatccaccaaatctctgtggccaaacagatctgcaggtgtctcagcagctccagcagacgaacagggttctggaagtcactaacagcagcctgaggcagcagctccgcctcaagataacgcagctgggacagagtgcagaggatctgcaggggtccaggagagagctggcgcagagtcaggaagcactacaggtggaacagagggctcatcaggcggccgaagggcagctacaggcctgccaggcagacagacagaagacgaaggagaccttgcaaagtgaggagcaacagaggagggccttggagcagaagctgagcaacatggagaacagactgaagcccttcttcacatgcggctcagcagacacctgctgtccgtcgggatggataatgcatcagaaaagctgcttttacatctcacttacttcaaaaaattggcaggagagccaaaaacaatgtgaaactctgtcttccaagctggccacattcagtgaaatttatccacaatcacactcttactacttcttaaattcactgttgccaaatggtggttcagggaattcatattggactggcctcagctctaacaaggattggaagttgactgatgatacacaacgcactaggacttatgctcaaagctcaaaatgtaacaaggtacataaaacttggtcatggtggacactggagtcagagtcatgtagaagttctcttccctacatctgtgagatgacagctttcaggtttccagattaggacagtcctttgcactgagttgacactcatgccaacaagaacctgtgcccctccttcctaacctgaggcctggggttcctcagaccatctccttcattctgggcagtgcccagccaccggctgacccacacctgacacttccagccagtctgctgcctgctccctcttcctgaaactggactgttcctgggaaaagggtgaagccacctctagaagggactttggcctccccccaagaacttcccatggtagaatggggtgggggaggagggcgcacgggctgagcggataggggcggcccggagccagccaggcagttttattgaaatctttttaaataattgcacgtgttagtctcatgtgtcagcaa

SEQ ID NO: 281801 - DNA, 458 bp, Homo sapiens
ttatgggaggctggtggtgtggctgtcgagagctgaggaggagatggggtgagtgggatgagggttcagttaagtcaaccatggagctcactgatactttacttttccagacactcatgccaacaagaacctgtgcccctccttcctaacctgaggcctggggttcctcagaccatctccttcattctgggcagtgcccagccaccggctgacccacacctgacacttccagccagtctgctgcctgctccctcttcctgaaactggactgttcctgggaaaagggtgaagccacctctagaagggactttggcctccccccaagaacttcccatggtagaatggggtgggggaggagggcgcacgggctgagcggataggggcggcccggagccagccaggcagttttattgaaatctttttaaataattgcacgtgttagtctcatgtgtcagcaa

SEQ ID NO: 281802 - DNA, 762 bp, Homo sapiens
  misc_feature (689)..(689): n is a, c, g, or t
  misc_feature (695)..(695): n is a, c, g, or t
  misc_feature (729)..(729): n is a, c, g, or t
  misc_feature (743)..(743): n is a, c, g, or t
  misc_feature (755)..(755): n is a, c, g, or t
gcagtgagggccccgccgctaccccagcagtcgcctcccaagttcgcggaacgcagctgaccggctccctctggactgggtgacatgactgctcccaagcagtcgtttgtaaactgagtttctgtaaaacaattttatttttcatatgtgactgtagcggggtatgatttgaactttgttttccgtcccccagcccggattctctgtcttctcctgtacagccgttccgttttcttacctcgtctccgtcaccgaggccctcagccctgaacacaaggactgggcagtttccctattgattcctgaacctggaacttaagacatcttccgaggggcccccccttgccacaccctctagctgatcgactcacaaatacctgtgatttctctccccgtctccacctccagacccaggggctgatgatgatggggaaatcacctacgagaatgttcaagtgcccgcagtcctaggggtgccctcaagcttggcttcttctgtactaggggacaaagcagcggtcaagtcggagcagccaactgcgtcctggagagccgtgacgtcaccagctgtcgggcggattctcccctgccgcacaacctgcctgcgatacctcctgctcggcctgctcctcacctgcctgctgttaggagtgaccgccatctgcctgggagtgcgctgtgtctcacanctccancaaaacaaaaaggttctggaaatcactaacacancctgaaggcagcanctccgcctcaanataaccc

SEQ ID NO: 281803 - DNA, 656 bp, Homo sapiens
gtgcagtcacagagggaacacagagcctagttgtaaacggacagagacgagaggggcaagggaggacagtggatgacagggaagacgagtgggggcagagctgctcaggaccatggctgaggccatcacctatgcagatctgaggtttgtgaaggctcccctgaagaagagcatctccagccggttaggacaggacccaggggctgatgatgatggggaaatcacctacgagaatgttcaagtgcccgcagtcctaggggtgccctcaagcttggcttcttctgtactaggggacaaagcagcggtcaagtcggagcagccaactgcgtcctggagagccgtgacgtcaccagctgtcgggcggattctcccctgtgagtgtgcctgtgcggggcagccgcggggccaagtgctcgcgcctgtcccggctgcggatggcgctgggccccgcggggtgcagctccttccgggataaacccgggcgcagtccttccgacgcccgggctgccgtgccacattcaccttcatccggtgcgcctgaatccgacgtgcaccggccccctgcggatggtcccaattcacctacctgccccccttcccctctctccgtctgatatttccttccccttctcccaggtaacgcccccgagtcccca

SEQ ID NO: 281804 - DNA, 1883 bp, Homo sapiens
gtgcagtcacagagggaacacagagcctagttgtaaacggacagagacgagaggggcaagggaggacagtggatgacagggaagacgagtgggggcagagctgctcaggaccatggctgaggccatcacctatgcagatctgaggtttgtgaaggctcccctgaagaagagcatctccagccggttaggacaggacccaggggctgatgatgatggggaaatcacctacgagaatgttcaagtgcccgcagtcctaggggtgccctcaagcttggcttcttctgtactaggggacaaagcagcggtcaagtcggagcagccaactgcgtcctggagagccgtgacgtcaccagctgtcgggcggattctcccctgccgcacaacctgcctgcgatacctcctgctcggcctgctcctcacctgcctgctgttaggagtgaccgccatctgcctgggagtgcgctgtgagtaaggctgtccctacttcccacttacaccgaacgactttcgtcccgactctcgccccaaagctgatcttcctcagcagggatcatagtcactaccaccacctccttagctttgggtttggtttccagccagggctgttgtcttcctgaattgtcctcacctaatccagtacctccttacgctttagtcagtcaaatcttgtatttcagcctgtgatgcaaaaagttgcaagaagcagaaaaagggctgatgctgcagtctcagggcactagggcagggctggagaagacatccaccaaatctctgtggccaaacagatctgcaggtgtctcagcagctccagcagacgaacagggttctggaagtcactaacagcagcctgaggcagcagctccgcctcaagataacgcagctgggacagagtgcagaggatctgcaggggtccaggagagagctggcgcagagtcaggaagcactacaggtggaacagagggctcatcaggcggccgaagggcagctacaggcctgccaggcagacagacagaagacgaaggagaccttgcaaagtgaggagcaacagaggagggccttggagcagaagctgagcaacatggagaacagactgaagcccttcttcacatgcggctcagcagacacctgctgtccgtcgggatggataatgcatcagaaaagctgcttttacatctcacttacttcaaaaaattggcaggagagccaaaaacaatgtgaaactctgtcttccaagctggccacattcagtgaaatttatccacaatcacactcttactacttcttaaattcactgttgccaaatggtggttcagggaattcatattggactggcctcagctctaacaaggattggaagttgactgatgatacacaacgcactaggacttatgctcaaagctcaaaatgtaacaaggtacataaaacttggtcatggtggacactggagtcagagtcatgtagaagttctcttccctacatctgtgagatgacagctttcaggtttccagattaggacagtcctttgcactgagttgacactcatgccaacaagaacctgtgcccctccttcctaacctgaggcctggggttcctcagaccatctccttcattctgggcagtgcccagccaccggctgacccacacctgacacttccagccagtctgctgcctgctccctcttcctgaaactggactgttcctgggaaaagggtgaagccacctctagaagggactttggcctccccccaagaacttcccatggtagaatggggtgggggaggagggcgcacgggctgagcggataggggcggcccggagccagccaggcagttttattgaaatctttttaaataattgcacgtgttagtctcatgtgtcagcaa

SEQ ID NO: 281805 - DNA, 1406 bp, Homo sapiens
gtgcagtcacagagggaacacagagcctagttgtaaacggacagagacgagaggggcaagggaggacagtggatgacagggaagacgagtgggggcagagctgctcaggaccatggctgaggccatcacctatgcagatctgaggtcggtcaagtcggagcagccaactgcgtcctggagagccgtgacgtcaccagctgtcgggcggattctcccctgccgcacaacctgcctgcgatacctcctgctcggcctgctcctcacctgcctgctgttaggagtgaccgccatctgcctgggagtgcgctatctgcaggtgtctcagcagctccagcagacgaacagggttctggaagtcactaacagcagcctgaggcagcagctccgcctcaagataacgcagctgggacagagtgcagaggatctgcaggggtccaggagagagctggcgcagagtcaggaagcactacaggtggaacagagggctcatcaggcggccgaagggcagctacaggcctgccaggcagacagacagaagacgaaggagaccttgcaaagtgaggagcaacagaggagggccttggagcagaagctgagcaacatggagaacagactgaagcccttcttcacatgcggctcagcagacacctgctgtccgtcgggatggataatgcatcagaaaagctgcttttacatctcacttacttcaaaaaattggcaggagagccaaaaacaatgtgaaactctgtcttccaagctggccacattcagtgaaatttatccacaatcacactcttactacttcttaaattcactgttgccaaatggtggttcagggaattcatattggactggcctcagctctaacaaggattggaagttgactgatgatacacaacgcactaggacttatgctcaaagctcaaaatgtaacaaggtacataaaacttggtcatggtggacactggagtcagagtcatgtagaagttctcttccctacatctgtgagatgacagctttcaggtttccagattaggacagtcctttgcactgagttgacactcatgccaacaagaacctgtgcccctccttcctaacctgaggcctggggttcctcagaccatctccttcattctgggcagtgcccagccaccggctgacccacacctgacacttccagccagtctgctgcctgctccctcttcctgaaactggactgttcctgggaaaagggtgaagccacctctagaagggactttggcctccccccaagaacttcccatggtagaatggggtgggggaggagggcgcacgggctgagcggataggggcggcccggagccagccaggcagttttattgaaatctttttaaataattgcacgtgttagtctcatgtgtcagcaa

SEQ ID NO: 281806 - DNA, 1501 bp, Homo sapiens
gtgcagtcacagagggaacacagagcctagttgtaaacggacagagacgagaggggcaagggaggacagtggatgacagggaagacgagtgggggcagagctgctcaggaccatggctgaggccatcacctatgcagatctgaggtttgtgaaggctcccctgaagaagagcatctccagccggttaggacaggacccaggggctgatgatgatggggaaatcacctacgagaatgttcaagtgcccgcagtcctaggggtgccctcaagcttggcttcttctgtactaggggacaaagcagcggtcaagtcggagcagccaactgcgtcctggagagccgtgacgtcaccagctgtcgggcggattctcccctgccgcacaacctgcctgcgatacctcctgctcggcctgctcctcacctgcctgctgttaggagtgaccgccatctgcctgggagtgcgctatctgcaggtgtctcagcagctccagcagacgaacagggttctggaagtcactaacagcagcctgaggcagcagctccgcctcaagataacgcagctgggacagagtgcagaggatctgcaggggtccaggagagagctggcgcagagtcaggaagcactacaggtggaacagagggctcatcaggcggccgaagggcagctacaggcctgccaggcagacagacagaagacgaaggagaccttgcaaagtgaggagcaacagaggagggccttggagcagaagctgagcaacatggagaacagactgaagcccttcttcacatgcggctcagcagacacctgctgtccgtcgggatggataatgcatcagaaaagctgcttttacatctcacttacttcaaaaaattggcaggagagccaaaaacaatgtgaaactctgtcttccaagctggccacattcagtgaaatttatccacaatcacactcttactacttcttaaattcactgttgccaaatggtggttcagggaattcatattggactggcctcagctctaacaaggattggaagttgactgatgatacacaacgcactaggacttatgctcaaagctcaaaatgtaacaaggtacataaaacttggtcatggtggacactggagtcagagtcatgtagaagttctcttccctacatctgtgagatgacagctttcaggtttccagattaggacagtcctttgcactgagttgaccatctccttcattctgggcagtgcccagccaccggctgacccacacctgacacttccagccagtctgctgcctgctccctcttcctgaaactggactgttcctgggaaaagggtgaagccacctctagaagggactttggcctccccccaagaacttcccatggtagaatggggtgggggaggagggcgcacgggctgagcggataggggcggcccggagccagccaggcagttttattgaaatctttttaaataattgcacgtgttagtctcatgtgtcagcaa

SEQ ID NO: 281807 - DNA, 307 bp, Homo sapiens
ccttggggccagaacagcacacagaatgactcccctccaaaggctggcagagattcttactcagctggaaggcaaatttagcagtgagcctgcatctgcagggtggcacttgatggattcagggacaagttaccaaagagctgtcatatatacagcccccttgccaaagctgaggcctccctagggtgtgcattttcttccatatttctcatcactctccatgtatctctggtctctctgaatctcccctcagcactcttactacttcttaaattcactgttgccaaatggtggttcagggaattca

SEQ ID NO: 281808 - DNA, 1562 bp, Homo sapiens
gtgcagtcacagagggaacacagagcctagttgtaaacggacagagacgagaggggcaagggaggacagtggatgacagggaagacgagtgggggcagagctgctcaggaccatggctgaggccatcacctatgcagatctgaggtttgtgaaggctcccctgaagaagagcatctccagccggttaggacaggacccaggggctgatgatgatggggaaatcacctacgagaatgttcaagtgcccgcagtcctaggggtgccctcaagcttggcttcttctgtactaggggacaaagcagcggtcaagtcggagcagccaactgcgtcctggagagccgtgacgtcaccagctgtcgggcggattctcccctgccgcacaacctgcctgcgatacctcctgctcggcctgctcctcacctgcctgctgttaggagtgaccgccatctgcctgggagtgcgctatctgcaggtgtctcagcagctccagcagacgaacagggttctggaagtcactaacagcagcctgaggcagcagctccgcctcaagataacgcagctgggacagagtgcagaggatctgcaggggtccaggagagagctggcgcagagtcaggaagcactacaggtggaacagagggctcatcaggcggccgaagggcagctacaggcctgccaggcagacagacagaagacgaaggagaccttgcaaagtgaggagcaacagaggagggccttggagcagaagctgagcaacatggagaacagactgaagcccttcttcacatgcggctcagcagacacctgctgtccgtcgggatggataatgcatcagaaaagctgcttttacatctcacttacttcaaaaaattggcaggagagccaaaaacaatgtgaaactctgtcttccaagctggccacattcagtgaaatttatccacaatcacactcttactacttcttaaattcactgttgccaaatggtggttcagggaattcatattggactggcctcagctctaacaaggattggaagttgactgatgatacacaacgcactaggacttatgctcaaagctcaaaatgtaacaaggtacataaaacttggtcatggtggacactggagtcagagtcatgtagaagttctcttccctacatctgtgagatgacagctttcaggtttccagattaggacagtcctttgcactgagttgacactcatgccaacaagaacctgtgcccctccttcctaacctgaggcctggggttcctcagaccatctccttcattctgggcagtgcccagccaccggctgacccacacctgacacttccagccagtctgctgcctgctccctcttcctgaaactggactgttcctgggaaaagggtgaagccacctctagaagggactttggcctccccccaagaacttcccatggtagaatggggtgggggaggagggcgcacgggctgagcggataggggcggcccggagccagccaggcagttttattgaaatctttttaaataattgcacgtgttagtctcatgtgtcagcaa

SEQ ID NO: 281809 - DNA, 608 bp, Homo sapiens
gtgcagtcacagagggaacacagagcctagttgtaaacggacagagacgagaggggcaagggaggacagtggatgacagggaagacgagtgggggcagagctgctcaggaccatggctgaggccatcacctatgcagatctgaggtacccaggggctgatgatgatggggaaatcacctacgagaatgttcaagtgcccgcagtcctaggggtgccctcaagcttggcttcttctgtactaggggacaaagcagcggtcaagtcggagcagccaactgcgtcctggagagccgtgacgtcaccagctgtcgggcggattctcccctgtgagtgtgcctgtgcggggcagccgcggggccaagtgctcgcgcctgtcccggctgcggatggcgctgggccccgcggggtgcagctccttccgggataaacccgggcgcagtccttccgacgcccgggctgccgtgccacattcaccttcatccggtgcgcctgaatccgacgtgcaccggccccctgcggatggtcccaattcacctacctgccccccttcccctctctccgtctgatatttccttccccttctcccaggtaacgcccccgagtcccca

SEQ ID NO: 281810 - DNA, 1514 bp, Homo sapiens
gtgcagtcacagagggaacacagagcctagttgtaaacggacagagacgagaggggcaagggaggacagtggatgacagggaagacgagtgggggcagagctgctcaggaccatggctgaggccatcacctatgcagatctgaggtacccaggggctgatgatgatggggaaatcacctacgagaatgttcaagtgcccgcagtcctaggggtgccctcaagcttggcttcttctgtactaggggacaaagcagcggtcaagtcggagcagccaactgcgtcctggagagccgtgacgtcaccagctgtcgggcggattctcccctgccgcacaacctgcctgcgatacctcctgctcggcctgctcctcacctgcctgctgttaggagtgaccgccatctgcctgggagtgcgctatctgcaggtgtctcagcagctccagcagacgaacagggttctggaagtcactaacagcagcctgaggcagcagctccgcctcaagataacgcagctgggacagagtgcagaggatctgcaggggtccaggagagagctggcgcagagtcaggaagcactacaggtggaacagagggctcatcaggcggccgaagggcagctacaggcctgccaggcagacagacagaagacgaaggagaccttgcaaagtgaggagcaacagaggagggccttggagcagaagctgagcaacatggagaacagactgaagcccttcttcacatgcggctcagcagacacctgctgtccgtcgggatggataatgcatcagaaaagctgcttttacatctcacttacttcaaaaaattggcaggagagccaaaaacaatgtgaaactctgtcttccaagctggccacattcagtgaaatttatccacaatcacactcttactacttcttaaattcactgttgccaaatggtggttcagggaattcatattggactggcctcagctctaacaaggattggaagttgactgatgatacacaacgcactaggacttatgctcaaagctcaaaatgtaacaaggtacataaaacttggtcatggtggacactggagtcagagtcatgtagaagttctcttccctacatctgtgagatgacagctttcaggtttccagattaggacagtcctttgcactgagttgacactcatgccaacaagaacctgtgcccctccttcctaacctgaggcctggggttcctcagaccatctccttcattctgggcagtgcccagccaccggctgacccacacctgacacttccagccagtctgctgcctgctccctcttcctgaaactggactgttcctgggaaaagggtgaagccacctctagaagggactttggcctccccccaagaacttcccatggtagaatggggtgggggaggagggcgcacgggctgagcggataggggcggcccggagccagccaggcagttttattgaaatctttttaaataattgcacgtgttagtctcatgtgtcagcaa

SEQ ID NO: 281811 - DNA, 1315 bp, Homo sapiens
gaggacgtgatgaccgaagagagtggggcagagctgctcagacatggtgagcatcactatgcagatctgagcgtcagtcggacagcactgcgtctgagagcgtgacgtcccagctgtcggcgatttcgccgcacaacctgcctgcgatacctcctgctcggcctgctcctcacctgcctgctgttaggagtgaccgccatctgcctgggagtgcgctatctgcaggtgtctcagcagctccagcagacgaacagggttctggaagtcactaacagcagcctgaggcagcagctccgcctcaagataacgcagctgggacagagtgcagaggatctgcaggggtccaggagagagctggcgcagagtcaggaagcactacaggtggaacagagggctcatcaggcggccgaagggcagctacaggcctgccaggcagacagacagaagacgaaggagaccttgcaaagtgaggagcaacagaggagggccttggagcagaagctgagcaacatggagaacagactgaagcccttcttcacatgcggctcagcagacacctgctgtccgtcgggatggataatgcatcagaaaagctgcttttacatctcacttacttcaaaaaattggcaggagagccaaaaacaatgtgaaactctgtcttccaagctggccacattcagtgaaatttatccacaatcacactcttactacttcttaaattcactgttgccaaatggtggttcagggaattcatattggactggcctcagctctaacaaggattggaagttgactgatgatacacaacgcactaggacttatgctcaaagctcaaaatgtaacaaggtacataaaacttggtcatggtggacactggagtcagagtcatgtagaagttctcttccctacatctgtgagatgacagctttcaggtttccagattaggacagtcctttgcactgagttgacactcatgccaacaagaacctgtgcccctccttcctaacctgaggcctggggttcctcagaccatctccttcattctgggcagtgcccagccaccggctgacccacacctgacacttccagccagtctgctgcctgctccctcttcctgaaactggactgttcctgggaaaagggtgaagccacctctagaagggactttggcctccccccaagaacttcccatggtagaatggggtgggggaggagggcgcacgggctgagcggataggggcggcccggagccagccaggcagttttattgaaatctttttaaataattgcacgtgttagtctcatgtgtcagcaa

SEQ ID NO: 281812 - DNA, 1236 bp, Homo sapiens
gtgcagtcacagagggaacacagagcctagttgtaaacggacagagacgagaggggcaagggaggacagtggatgacagggaagacgagtgggggcagagctgctcaggaccatggctgaggccatcacctatgcagatctgaggtttgtgaaggctcccctgaagaagagcatctccagccggttaggacaggacccaggggctgatgatgatggggaaatcacctacgagaatgttcaagtgcccgcagtcctaggggtgccctcaagcttggcttcttctgtactaggggacaaagcagcggtcaagtcggagcagccaactgcgtcctggagagccgtgacgtcaccagctgtcgggcggattctcccctgccgcacaacctgcctgcgatacctcctgctcggcctgctcctcacctgcctgctgttaggagtgaccgccatctgcctgggagtgcgctatctgcaggtgtctcagcagctccagcagacgaacagggttctggaagtcactaacagcagcctgaggcagcagctccgcctcaagataacgcagctgggacagagtgcagaggatctgcaggggtccaggagagagctggcgcagagtcaggaagcactacaggtggaacagagggctcatcaggcggccgaagggcagctacaggcctgccaggcagacagacagaagacgaaggagaccttgcaaagtgaggagcaacagaggagggccttggagcagaagctgagcaacatggagaacagactgaagcccttcttcacatgcggctcagcagacacctgctgtccgtcgggatggataatgcatcagaaaagctgcttttacatctcacttacttcaaaaaattggcaggagagccaaaaacaatgtgaaactctgtcttccaagctggccacattcagtgaaatttatccacaatcacactcttactacttcttaaattcactgttgccaaatggtggttcagggaattcatattggactggcctcagctctaacaaggattggaagttgactgatgatacacaacgcactaggacttatgctcaaagctcaaaatgtaacaaggtacataaaacttggtcatggtggacactggagtcagagtcatgtagaagttctcttccctacatctgtgagatgacagctttcaggtttccagattaggacagtcctttgcactgagttggtaagagtgagggatggggctg

SEQ ID NO: 281813 - DNA, 2408 bp, Homo sapiens
gaataaattagaggggatctcggtgcgaactttccttgacctcgaccccaaagaggcttgctggggccgagaagaaaacccgtgcgggatgtggaggggcccggggcgccggggtcccccgcccgcgagacccgctccaccaggcgccttggagagcagcgccagcggtcgtcctccagctcccgcaggggtcgccccgccggcgcgagggacacaatgggtccgcgggccacgcgaacgggcctcggcccggcggcagcacgggagagatgtgaggagcgcgcggaaggggagcgcggccggggagatcccagcgcggtcaggcccgggagccgaggctcgggggcccgggaactgggcttcccacagcagaagacccaacaaagacaccaggggagcccggcgggctgggcgcgagaagacgtggtagcaggttcgctcctccgagcagacgggaggcgccatcatggggggggggggtcgcggcccgccccgcgcagaaagagcccccttcccgccgctgcccgcgcccccagcccagcacgaccgcggcggccccacgcgtgcagagacggcggcggcggcgctggaaagcccggggcgccgaggggagggctgggacgcggcatgaagggaaagttcggttcgggtctgtttcgttttaccgggttggcggcgcgcccgtccgtgcgggagcacgagtggccgggcgagcggggtctcgcggcccgggtccggacggccgggcgctgcgccactctccgctccccgagcctcggcccgggttgagccgctcggcctctcctttctccgcccgcccgcctgctttctcctggagcctggattgatctggtcgcgctggcgtcagggagtcggagctgcccagcctccactcctcagctgccaatacccggcgcactcgcctgcctgcccgcccgctcacacgctcacccgctcacccgcgcgccgccgccgctgccgcgcgaccagggatcctctccaaattcccggcccggccggcgtgagcgcagcgcggccggggccggaggacggcgcgggggagcggccggagccacccccttctaccggcagccccacgccccgtttcttcctggagaaaagacagtgtggcggcgttcaggctttcctaaccctgcctttttagtcccggtggagcggacttagtccattatctgcaagtgaatttcgatgttccatatgtttattttctgaaatgttcattaacgcttccaccgcgcccactgaatcgttctataaacgtggagtgcatgttgacagttacctttcgagacgcgcccttttatgtctatctttcgttgcccctcactcactctccaataatttgcaggccccagaagttgtacgtacccagaattggatagcctagtaaatactgcacgtggttatacaaaccctgagtcaacagatgcgttttgtgtcaactcaggatccagtgattcgagtaggtaaccttgttgctccaaataatggcatgccataaggagatactgctttagaactccacatttttggtccaatttctacagtcttttagatgatgccaactcccccgcacttaactcttacctacctgatctgcatagacattgaaaatatcttcttgcaagagtcaacttttctcttggctaactcttgaagctgcataaaatcttgcataattactataatgttgagttacgtttagaaaaaatgatttttttttgaggaataaatttcacatgaagcaaaaaaaaaaaaaaaaaaatcactcccagcaatgtatatcagaatatgtcttctaattaaattcctttttcccttaacctatttgagcacttactggtcaattcgtgggcctcatcttattttccctaaaagcagcgtttgacgcagttgatcattctctgctccttagaacaacaggaaagtgaaccttgttaaatgccactcggatcaggccactcctctgttgaaaaccctcccttgataaatagtataaagtatcccatacaagagaacattattcagccataaaaaggaatgaagtactgatactgatgcatgctacatggataacctttcaaaacgtgaagggaaagaagacagaccacacattgtattcttccacatatgtgaaatgctcagagtaggcaaggctatggagacagaaagtagattggtggtttgcatagggttggggaaatgaggaacctggggagtgacagctaaaggttatggggtgacaaaattgttctaaaactagtttctggtgatggttgcacaactctgtgcatataccaaaagccattaaattgcacactttaaatgggtcaatcatttggtatgtgaattttacctcaagctattaaaaaaaaagcatgacaatg

SEQ ID NO: 281814 - DNA, 415 bp, Homo sapiens
aaattacaaaagccttttgcttcaaatccctacctcccatgtttattgctccacggggacccatatcacccattctcatttcctgttctctctgtaagtaaacatagttgtcacagtcaacctatcgatcttatgactttacatttcccatctaaaatcaaaaagaaaagagtgaattgggacatcatttttcattaaaaattttgaaaagtttccatcatcataaacttaataagaatgctgaaaagaaacttcagtctcccaggcttaatatactacaaatgcttaatgcatccagtttatattgcaagattagattactaatgaatcagattatataaaatatatcacaaattatttttaatgtttttattccaacagatgaaagacacatgcctagattccaagcaaagga

SEQ ID NO: 281815 - DNA, 3706 bp, Homo sapiens
caaaatattatccattgtaaactgagatttaattctcaaatgtattctacttgttctaaaacaatctgtccacaaatataagactataagtaataaattgttatttccgcacaatgggaatctctaatgtgaaaatgtattctatgaaaataatttttttaaataaaatgttgtataaaaaaaaaaaaaaaaagatgaactgtccctgcatcggcctaaaggtatcagtgctcaaaatcccactcctgctttccaactcaaaggcttgactcttgcagttcatctctcttctgtatcatcagatttttcctctctatcggattattgccctcctgcttctcctccatttctctgttcccctttatagcaaagtccttggcagagctgcccctgcatgctgtctccactttctcatctcctgctcttgaatcagtcaagccaggctgttgccttcttcctcctctacaaccatgcatgccaaggtctcctggccaaatccaatggctacttcccagccctcatccgacttgacctctcagcagcattcagcccacctggggccctctctttccttgccttccaggacctcatgctctcctgggcttcctcctgcctctccaagcacaattctgtctcctttgctggctcttacacatgtcccccctctaaaatgcagggtgttctaggactcagtcctcagacttcttcccatctctctttatcctcactcctgagtgatctccttgggtctcatggctttaaacaccatctgtattgtaacaactcccaaatttatatccctagccctaacctttccactaagcttcagacttgtacatctccattcagtgtctccactgggatgtttcatacacatctctaccccccctcccccaaccttaaccctaacgctaccacattcgacactgaactctgggttttccctcccagatctatcccaccccaacattccccatctcagtaaatggcaccagcagccgctgagttgtgccagatgagaaccttgaagtcatcttgaccctctcccaccccacgtgcagtctatcagcaaatcctgtcaattctgctattaaaatacagtcaggatccaaccacttcccatcactctcacagctattgtcctagtctgagtctggatgatggcaatcactgccgctctggtctccacctgcttcctctcttgccccttcagtcttttctgaacccagaagccagagtatcttaaaacataagtcagatcatggctctcctctgcccaacactccctagttctccctgtatttctcagagtaaaatccaaagtcctttgggacactgaggcacagtaaaggggcttcatgcttttttttgtaaacatgcatcatctcatgtgattaattcaattactccctcaaaaccctatgtggtagtactgctaccctcatattacagatgaagaaactaaagctctaagaggttaaattgcccagagtcacacagggatttatggcagagctgggatgcaaaccccagcctttgactccaagtccagtgcactttcttctaagccaggctggaactgtgggttctcgcttgggttctgccactatcttgctatgtgatcttgggcagtcccttcccctctccaggcatcagctttctcacctatgagatgggaaggttggctatgtcctcactcagggtcagggttacatcagaggatctgggagagccatttggattggccttaccttcacagctgccttcaaatttagactttcgacaggctctcccaatgagaggacatatgcagttactaacacgcactgactgaaagaagatgctggctgtacaaacttgctggacccactgctggtgaggctctgagaattaattacttttatataaccataattatatcatgaatagcacaatcctacaggattatactgtagtagttaaaggcattggtttgttgtgtttaaacatttgcacagaccacatttttgtaaactcatttggatatctatctatctatcaatcttttcttttcttttttctttattttaaatttgagatgaagtcttgctcttgtcccccaggctgcagtgcaatggcgcgatctcggttcactgcaacctccacctctcgggttcaagcgattctcttgcctcagcctcctgagtagctgggattacaggcgcctgccaccatgcccagctaaattttgtatttttagtagagatgaggttcccccatgttgaccaggctggtcttgaactcctgacctcaggtgatctgccctccttggcctcccaaagtgctgggattacaggtgtgagccactgtacccagcctgtctgtctgtctatctgtctgtctatctatctatctgtctatccacctacctatttatttagagatgaggtcttgctatgttgcccagctcggtccctaactcctgggctcaaacaatccttccaactcacacctcagcctcctgagtaactgagactacaggtgcatgccaccacaactggataatttagaaaaaattactttttagagatgaggatcttgctatgatgcccaggctggtctcaaactcctggcctcaagtgatcttccttcctcagcctcccaagtagctgggattacaggttgtctttatttttcaaaaccctggaaaccccaccaaatggagcttttggcccttttctcccaggtccctcctcccagcaccatgactcacgttgaagatattactgatgaccatcctcaggttgcctaaagctgtcacctccaccagcaccatcaccaccaactgcgccaagttgaccttccccaagacagcttccactgagatcagcaccgacaaagcactcatggtggccagccgaatactgggggagagagggagagccaggacgactgagaaggaaggatgcctctcactcattcattcattcattcattcattcattcattctttcaacaaacactgttgggcacctactttctgtgggaatagaagacaagatttctacccacctgggcgctgatgctgcagagtggagtgaccatctcttctcccgttaaggtggcctctgcaccctgagccatgtggtctggcagatgacttaaccactctgtgcctcagtgccttcatctatgaggcattgatctacacacactcatctgactgagggtgatcggggtgactgttccctcaggggatctgataactgggattctgcccagtcttcttttctgctgccatcattcggatgctcaacagagggcactcttcccccgcaggcctgcccacatccagtcaccccatccccatctggggccactgtcccttctctccgtctccgtggcagtggaaagaaactggatttggaatcaggacaagcccggcttccagtcccagccttgccactggagtggctatttcatctcactgagcctatttctccttctgcaaattaagaatgatgatcaaacgtatcccatgttggtgtcctggggatgtgaaggagttttcttcctatcggtgtgtctagcaccaagactggcacaaagaaccaacttctgaaaagacgctagccttattaacgctattatgattccttccttcctttgaccaatgagcatgctcaggagtagaaaattattttggtcttgaagatacttatgatcc

SEQ ID NO: 281816 - DNA, 2453 bp, Homo sapiens
cacgcagcaggatggcaagggctccgcttggggtcctgctcctcttggggcttctcggggtgtggggaagaacgaggaactgcgtctttatcaccatctcttcaacaactatgacccaggaagccggccagtgcgggagcctgaggatactgtcaccatcagcctcaaggtcaccctgacgaatctcatctcactgaatgaaaaagaggagactctcaccactagcgtctggattggaatcgattggcaggattaccgactcaactacagcaaggacgactttgggggtatagaaaccctgcgagtcccttcagaactcgtgtggctgccagagattgtgctggaaaacaatattgatggccagttcggagtggcctacgacgccaacgtgctcgtctacgagggcggctccgtgacgtggctgcctccggccatctaccgcagcgtctgcgcagtggaggtcacctacttccccttcgattggcagaactgttcgcttattttccgctctcagacgtacaatgccgaagaggtggagttcacttttgccgtagacaacgacggcaagaccatcaacaagatcgacatcgacacagaggcctatactgagaacggcgagtgggccatcgacttctgcccgggggtgatccgccgccaccacggtggcgccaccgacggcccaggggagactgacgtcatctactcgctcatcatccgccggaagccgctcttctacgtcattaacatcatcgtgccctgtgtgctcatctcgggcctggtgctgctcgcctacttcctgccggcgcaggccggcggccagaaatgcacggtctccatcaacgtcctgctcgcccagaccgtcttcttgttcctcattgcccagaaaatcccagagacttctctgagcgtgccgctcctgggcaggttccttattttcgtcatggtggtcgccacgctcattgtcatgaattgcgtcatcgtgctcaacgtgtcccagcggacgcccaccacccacgccatgtccccgcggctgcgccacgttctcctggagctgctgccgcgcctcctgggctccccgccgccgcccgaggccccccgggccgcctcgcccccaaggcgggcgtcgtcggtgggcttattgctccgcgcggaggagctgatactgaaaaagccacggagcgagctcgtgtttgaggggcagaggcaccggcaggggacctggacggctgccttctgccagagcctgggcgccgccgcccccgaggtccgctgctgtgtggatgccgtgaacttcgtggccgagagcacgagagatcaggaggccaccggcgaggaagtgtccgactgggtgcgcatggggaatgcccttgacaacatctgcttctgggccgctctggtgctcttcagcgtgggctccagcctcatcttcctcggggcctacttcaaccgagtgcctgatctcccctacgcgccgtgtatccagccttagctcgcaccgacttcaatttcccacccatctccagtaggaaattgattttgaaaaagtaggctgccgccaccacggcattatgatcccttccccctgctgatcaatctgcagtttgtgaacttcacaagaatggtgtgtgcccgttccctggcgtgtgtaggcctggccgcagtccaggggtcagcaggaggaaagggttcacataggctctcaggtgccagtcttccagaaagcaaggactgcccttcattcagccttgctgacctcccagcctttctaaggctcagccccacgggactctggtggctgccagcttgtgagctatctatctatattcatttcatagccaaacaggagacccctttgcaggacttgcacacagggaggctgtagccaggaaaccctcttcttccctggtctggctctgctggagcgggtgggaaccaaacaccttcagtgctggtggccctcaggcccacaggtttaaggctgaggctgccctgacccttccacagtcatttcttctaggttttcttggcccagcactgcccatcccaccccatgaggctcactcattgcagatcccagcccaccctgcccctttcttccccaccctggaggctctctctgcctagtctacagtactgacagaaagcaaggacatgcggcctgcatggtgggagctggttgaattgtctttattaacaaacaggatatccaaggccactacattgaggaggggggaggggggagggaggagaagggttacttgctgctcacactatatacagatgcaagcaaggggcgtggagagtgagggctccctgctccctccctccaccggggaagggcatgggctagaagaggagaggggggtcgggaatggggggaatgttttggctgcggggtcccccctccattccctggagtttgggggaaggggaatcattaaagtgctttcaga

SEQ ID NO: 281817 - DNA, 565 bp, Homo sapiens
caagattgagacttagacacagtatttcgttcccaggcacagcataattggtttaggagacagatactgatagtacacagcctcagaggcctgtgaggacccaggggaggcagaggggagagaggtgctccagcctcttcattgccaatgacccttccttcttgaccccatcgcaggcaggggtgtggggaagaacgaggaactgcgtctttatcaccatctcttcaacaactatgacccaggaagccggccagtgcgggagcctgaggatactgtcaccatcagcctcaaggtcaccctgacgaatctcatctcactggtaagctacccccaccctcatcttaagccaaaaatcccacttctggccccaaccgctgagctctgtcctaaagctcacttctggccctgaaatctcacttcaatcatccccatctcccatctgcagaatgaaaaagaggagactctcaccactagcgtctggattggaatcgtgagtcaaatctggggaatggtgtgaggtcttgtccagggcaccccttttcccccaaacccctcccaggcagcg

SEQ ID NO: 281818 - DNA, 317 bp, Homo sapiens
caagattgagacttagacacagtatttcgttcccaggcacagcataattggtttaggagacagatactgatagtacacagcctcagaggcctgtgaggacccaggggaggcagaggggagagaggtgctccagcctcttcattgccaatgacccttccttcttgaccccatcgcaggcagccagagaccccgggaaaagctctggctgtctcgccccgccctgggctttattcggacgctgggtggggctggtacggggatggagtccctggtccgccgtcctcctcactgctgctggacgtcacctggaggtctcc

SEQ ID NO: 281819 - DNA, 2702 bp, Homo sapiens
caagattgagacttagacacagtatttcgttcccaggcacagcataattggtttaggagacagatactgatagtacacagcctcagaggcctgtgaggacccaggggaggcagaggggagagaggtgctccagcctcttcattgccaatgacccttccttcttgaccccatcgcaggcaggggtgtggggaagaacgaggaactgcgtctttatcaccatctcttcaacaactatgacccaggaagccggccagtgcgggagcctgaggatactgtcaccatcagcctcaaggtcaccctgacgaatctcatctcactggtaagctacccccaccctcatcttaagccaaaaatcccacttctggccccaaccgctgagctctgtcctaaagctcacttctggccctgaaatctcacttcaatcatccccatctcccatctgcagaatgaaaaagaggagactctcaccactagcgtctggattggaatcgattggcaggattaccgactcaactacagcaaggacgactttgggggtatagaaaccctgcgagtcccttcagaactcgtgtggctgccagagattgtgctggaaaacaatattgatggccagttcggagtggcctacgacgccaacgtgctcgtctacgagggcggctccgtgacgtggctgcctccggccatctaccgcagcgtctgcgcagtggaggtcacctacttccccttcgattggcagaactgttcgcttattttccgctctcagacgtacaatgccgaagaggtggagttcacttttgccgtagacaacgacggcaagaccatcaacaagatcgacatcgacacagaggcctatactgagaacggcgagtgggccatcgacttctgcccgggggtgatccgccgccaccacggtggcgccaccgacggcccaggggagactgacgtcatctactcgctcatcatccgccggaagccgctcttctacgtcattaacatcatcgtgccctgtgtgctcatctcgggcctggtgctgctcgcctacttcctgccggcgcaggccggcggccagaaatgcacggtctccatcaacgtcctgctcgcccagaccgtcttcttgttcctcattgcccagaaaatcccagagacttctctgagcgtgccgctcctgggcaggttccttattttcgtcatggtggtcgccacgctcattgtcatgaattgcgtcatcgtgctcaacgtgtcccagcggacgcccaccacccacgccatgtccccgcggctgcgccacgttctcctggagctgctgccgcgcctcctgggctccccgccgccgcccgaggccccccgggccgcctcgcccccaaggcgggcgtcgtcggtgggcttattgctccgcgcggaggagctgatactgaaaaagccacggagcgagctcgtgtttgaggggcagaggcaccggcaggggacctggacggctgccttctgccagagcctgggcgccgccgcccccgaggtccgctgctgtgtggatgccgtgaacttcgtggccgagagcacgagagatcaggaggccaccggcgaggaagtgtccgactgggtgcgcatggggaatgcccttgacaacatctgcttctgggccgctctggtgctcttcagcgtgggctccagcctcatcttcctcggggcctacttcaaccgagtgcctgatctcccctacgcgccgtgtatccagccttagctcgcaccgacttcaatttcccacccatctccagtaggaaattgattttgaaaaagtaggctgccgccaccacggcattatgatcccttccccctgctgatcaatctgcagtttgtgaacttcacaagaatggtgtgtgcccgttccctggcgtgtgtaggcctggccgcagtccaggggtcagcaggaggaaagggttcacataggctctcaggtgccagtcttccagaaagcaaggactgcccttcattcagccttgctgacctcccagcctttctaaggctcagccccacgggactctggtggctgccagcttgtgagctatctatctatattcatttcatagccaaacaggagacccctttgcaggacttgcacacagggaggctgtagccaggaaaccctcttcttccctggtctggctctgctggagcgggtgggaaccaaacaccttcagtgctggtggccctcaggcccacaggtttaaggctgaggctgccctgacccttccacagtcatttcttctaggttttcttggcccagcactgcccatcccaccccatgaggctcactcattgcagatcccagcccaccctgcccctttcttccccaccctggaggctctctctgcctagtctacagtactgacagaaagcaaggacatgcggcctgcatggtgggagctggttgaattgtctttattaacaaacaggatatccaaggccactacattgaggaggggggaggggggagggaggagaagggttacttgctgctcacactatatacagatgcaagcaaggggcgtggagagtgagggctccctgctccctccctccaccggggaagggcatgggctagaagaggagaggggggtcgggaatggggggaatgttttggctgcggggtcccccctccattccctggagtttgggggaaggggaatcattaaagtgctttcaga

SEQ ID NO: 281820 - DNA, 353 bp, Homo sapiens
tcgtgtggctgccagagattgtgctggaaaacaagtgagaaccgggccagacgccaggctggagggaagccggcctggggtgcgggctggacttggttggggaagggggtactctgagagggtgcagacctgtgcaaaaagctcggtttccccgagcccacagtattgatggccagttcggagtggcctacgacgccaacgtgctcgtctacgagggcggctccgtgacgtggctgcctccggccatctaccgcagcgtctgcgcagtggaggtcacctacttccccttcgattggcagaactgttcgcttattttccggtgggaagagctactccgaggcccggacgattat

SEQ ID NO: 281821 - DNA, 405 bp, Homo sapiens
tagcttgggtgaaggagtgagggtgtccaggttgagtgagggtgtccaggatgaggagtgagggtgtccagggtgaggagtgagggagtccagggtgaggagtgagggagtccagggtgaggattgagggtgtcagggtgagtgagagtgtccagggtgaggagtgagggtatccagggtgagtgagggtgtccagggtgaggagtgagggtatccgggtgagtggcgggaagcctggcaggtgctgttgacttgggttctgtctccagattgtcagtcccctgagggcagtggccccaccctctacacctctgtctcctcagcccctagagctgtcctgggtgcccagcaggctgcagcatccatcgtcactcccctccaaatgatgcgggtatcttagatgca

SEQ ID NO: 281822 - DNA, 1795 bp, Homo sapiens
ccctcctccttccactgaagtggccaagggagttgagctgagcagggggaggggaagatctacacccatcccccttcctctagccctccctgcgtttagattcagttgcaccttttattattttaactcttctccttaggacacgcagcccccaatttgtccctccggcctgggcggcccctggtcccgcgcgccagcatgggagagcgagggacctgcccgcggcccgccggcgtgtgcaaggaggtccagccgccgcgcccgctacccggagtctgaggacgggtgtccagggacggagaggcaggtgagagggaggtggctaagctggctatggtgacaggacgatgttggccagaaagagtatcatcccggaggagtatgtgctggcgcgcatcgccgcagagaacctgcgcaagccgcgcatccgagaccgcctccccaaagcccgcttcatcgccaagagcggggcctgcaacctggcgcataagaacatccgtgagcaaggacgctttctacaggacatcttcaccaccttggtggacctgaaatggcgccacacgctggtcatctttaccatgtccttcctctgcagctggctgctcttcgctatcatgtggtggctggtggcctttgcccatggggacatctatgcttacatggagaaaagtggaatggagaaaagtggtttggagtccactgtgtgtgtgactaatgtcaggtctttcacttctgcttttctcttctccattgaagttcaagttaccattgggtttggagggaggatgatgacagaggaatgccctttggccatcacggttttgattctccagaatattgtgggtttgatcatcaatgcagtcatgttaggctgcattttcatgaaaacagctcaggctcacagaagggcagaaactttgattttcagccgccatgctgtgattgccgtccgaaatggcaagctgtgcttcatgttccgagtgggtgacctgaggaaaagcatgatcattagtgcctctgtgcgcatccaggtggtcaagaaaacaactacacctgaaggggaggtggttcctattcaccaactggacattcctgttgataacccaatcgagagcaataacatttttctggtggcccctttgatcatctgccacgtgattgacaagcgcagtcccctgtatgacatctcagcaactgacctggccaaccaagacttggaggtcatagttattctggaaggagtggttgaaactactggcatcaccacacaagcacgaacctcctacattgctgaggagatccaatggggccaccgctttgtgtccattgtgactgaggaagaaggagtgtattctgtggattactccaaatttggcaacactgttaaagtagctgctccacggtgcagtgcccgagagctggatgagaaaccttccatccttattcagaccctccaaaagagtgaactgtctcatcaaaattctctgaggaagcgcaactccatgagaagaaacaattccatgaggaggaacaattctatccgaaggaacaattcttccctcatggtaccaaaggtgcaatttatgactccagaaggaaatcaaaacacatcggaatcatgacagcaagataaccccaagacagtcttttatcaagttttgacggtttatgctgggcactgccagactgaaccagagctggaacacaataatgtgtccttctacattttattacactaaatgatattcatattcaagcaacagcactttctgtagtaataaaaagtaacacacca

SEQ ID NO: 281823 - DNA, 1282 bp, Homo sapiens
ccctcctccttccactgaagtggccaagggagttgagctgagcagggggaggggaagatctacacccatcccccttcctctagccctccctgcgtttagattcagttgcaccttttattattttaactcttctccttaggacacgcagcccccaatttgtccctccggcctgggcggcccctggtcccgcgcgccagcatgggagagcgagggacctgcccgcggcccgccggcgtgtgcaaggaggtccagccgccgcgcccgctacccggagtctgaggacgggtgtccagggacggagaggcaggtgagagggaggtggctaagctggctatggtgacaggacgatgttggccagaaagagtatcatcccggaggagtatgtgctggcgcgcatcgccgcagagaacctgcgcaagccgcgcatccgagaccgcctccccaaagcccgcttcatcgccaagagcggggcctgcaacctggcgcataagaacatccgtgagcaaggacgctttctacaggacatcttcaccaccttggtggacctgaaatggcgccacacgctggtcatctttaccatgtccttcctctgcagctggctgctcttcgctatcatgtggtggctggtggcctttgcccatggggacatctatgcttacatggagaaaagtggaatggagaaaagtggtttggagtccactgtgtgtgtgactaatgtcaggtctttcacttctgcttttctcttctccattgaagttcaagttaccattgggtttggagggaggatgatgacagaggaatgccctttggccatcacggttttgattctccagaatattgtgggtttgatcatcaatgcagtcatgttaggctgcattttcatgaaaacagctcaggctcacagaagggcagaaactttgattttcagccgccatgctgtgattgccgtccgaaatggcaagctgtgcttcatgttccgagtgggtgacctgaggaaaagcatgatcattagtgcctctgtgcgcatccaggtggtcaagaaaacaactacacctgaaggggaggtggttcctattcaccaactggacattcctgttgataacccaatcgagagcaataacatttttctggtggcccctttgatcatctgccacgtgattgacaagcgcagtcccctgtatgacatctcagcaactgacctggccaaccaagacttggaggtggtcaagaaaacaactacacctgaaggggaggtgttccatcaccaactgacattcctgtg

SEQ ID NO: 281824 - DNA, 1109 bp, Homo sapiens
tagactctagcaggatcctttacctaaatggctgtgtccattgtgactgaggaagaaggagtgtattctgtggattactccaaatttggcaacactgttaaagtagctgctccacggtgcagtgcccgagagctggatgagaaaccttccatccttattcagaccctccaaaagagtgaactgtctcatcaaaattctctgaggaagcgcaactccatgagaagaaacaattccatgaggaggaacaattctatccgaaggaacaattcttccctcatggtaccaaaggtgcaatttatgactccagaaggaaatcaaaacacatcggaatcatgacagcaagataaccccaagacagtcttttatcaagttttgacggtttatgctgggcactgccagactgaaccagagctggaacacaataatgtgtccttctacattttattacactaaatgatattcatattcaagcaacagcactttctgtagtaataaaaagtaacacaccaagtggaggattcatggcttatgcttgtttcatacatgtagaattcgcagtgatatacttaagttatgtgcaggggtgggtatgctcgtttctctcaatttgaaacacaagaattacactaatagtaacaggccttgagcacaaaatttggtcaagaaatgagtctgtttgaaatgcttagttggtgaaacccagatcgctgtgttactaatgatcactctggaaatgcaaatagaataggaggggaaaaaacaaaatcatgttaatgcgttttgtacatcagccttctcctgtctccatgataactgcatttggtaggaagcctgaggcaaaaactgcttaagtggatctgtttgtaagtggattcagttcattcgctttgtctgtcggtgactcctgaaggtttcctggtccatctcattgcggcctgttgggcagagctggacaaggtgtctttgaaggaaagctaagtcttgtctcatttaggactgggttccccacagtgacagtcacttccttcagcatctcacttcttcttctagaatccccacagggaaatactgtattgaatattttattaaaacattttctttgtaaaaaa

SEQ ID NO: 281825 - DNA, 2395 bp, Homo sapiens
ccctcctccttccactgaagtggccaagggagttgagctgagcagggggaggggaagatctacacccatcccccttcctctagccctccctgcgtttagattcagttgcaccttttattattttaactcttctccttaggacacgcagcccccaatttgtccctccggcctgggcggcccctggtcccgcgcgccagcatgggagagcgagggacctgcccgcggcccgccggcgtgtgcaaggaggtccagccgccgcgcccgctacccggagtctgaggacgggtgtccagggacggagaggcaggtgagagggaggtggctaagctggctatggtgacaggacgatgttggccagaaagagtatcatcccggaggagtatgtgctggcgcgcatcgccgcagagaacctgcgcaagccgcgcatccgagaccgcctccccaaagcccgcttcatcgccaagagcggggcctgcaacctggcgcataagaacatccgtgagcaaggacgctttctacaggacatcttcaccaccttggtggacctgaaatggcgccacacgctggtcatctttaccatgtccttcctctgcagctggctgctcttcgctatcatgtggtggctggtggcctttgcccatggggacatctatgcttacatggagaaaagtggaatggagaaaagtggtttggagtccactgtgtgtgtgactaatgtcaggtctttcacttctgcttttctcttctccattgaagttcaagttaccattgggtttggagggaggatgatgacagaggaatgccctttggccatcacggttttgattctccagaatattgtgggtttgatcatcaatgcagtcatgttaggctgcattttcatgaaaacagctcaggctcacagaagggcagaaactttgattttcagccgccatgctgtgattgccgtccgaaatggcaagctgtgcttcatgttccgagtgggtgacctgaggaaaagcatgatcattagtgcctctgtgcgcatccaggtggtcaagaaaacaactacacctgaaggggaggtggttcctattcaccaactggacattcctgttgataacccaatcgagagcaataacatttttctggtggcccctttgatcatctgccacgtgattgacaagcgcagtcccctgtatgacatctcagcaactgacctggccaaccaagacttggaggtcatagttattctggaaggagtggttgaaactactggcatcaccacacaagcacgaacctcctacattgctgaggagatccaatggggccaccgctttgtgtccattgtgactgaggaagaaggagtgtattctgtggattactccaaatttggcaacactgttaaagtagctgctccacggtgcagtgcccgagagctggatgagaaaccttccatccttattcagaccctccaaaagagtgaactgtctcatcaaaattctctgaggaagcgcaactccatgagaagaaacaattccatgaggaggaacaattctatccgaaggaacaattcttccctcatggtaccaaaggtgcaatttatgactccagaaggaaatcaaaacacatcggaatcatgacagcaagataaccccaagacagtcttttatcaagttttgacggtttatgctgggcactgccagactgaaccagagctggaacacaataatgtgtccttctacattttattacactaaatgatattcatattcaagcaacagcactttctgtagtaataaaaagtaacacaccaagtggaggattcatggcttatgcttgtttcatacatgtagaattcgcagtgatatacttaagttatgtgcaggggtgggtatgctcgtttctctcaatttgaaacacaagaattacactaatagtaacaggccttgagcacaaaatttggtcaagaaatgagtctgtttgaaatgcttagttggtgaaacccagatcgctgtgttactaatgatcactctggaaatgcaaatagaataggaggggaaaaaacaaaatcatgttaatgcgttttgtacatcagccttctcctgtctccatgataactgcatttggtaggaagcctgaggcaaaaactgcttaagtggatctgtttgtaagtggattcagttcattcgctttgtctgtcggtgactcctgaaggtttcctggtccatctcattgcggcctgttgggcagagctggacaaggtgtctttgaaggaaagctaagtcttgtctcatttaggactgggttccccacagtgacagtcacttccttcagcatctcacttcttcttctagaatccccacagggaaatactgtattgaatattttattaaaacattttctttgtaaaaaa

SEQ ID NO: 281826 - DNA, 458 bp, Homo sapiens
gctggcgcgcatcgccgcagagaacctgcgcaagccgcgcatccgagaccgcctccccaaagcccgcttcatcgccaagagcggggcctgcaacctggcgcataagaacatccgtgagcaaggacgctttctacaggacatcttcaccaccttggtggacctgaaatggcgccacacgctggtcatctttaccatgtccttcctctgcagctggctgctcttcgctatcatgtggtggctggtggcctttgcccatggggacatctatgcttacatggagaaaagtggaatggagaaaagtggtttggagtccactgtgtgtgtgactaatgtcaggtaagaatgtagtgggatgaggcaggggttgaaaacagtagagaaaaaatgtcaaaatgccctttctcttatcattctgttatttaattgaaagtgaaataaagggtttgttttagaatctt

SEQ ID NO: 281827 - DNA, 1060 bp, Homo sapiens
tgctgcttctcctcctcgagctgggccacggcctgctcactgcgctgcagcttctgctgtgtccccgccagctcctcacgcagccactggttctcctgcaccagacgccgcacctgcgcccgcagcttctgcttctctgattctacagcccccaggtggctcgacaatgccaagatcacctgtgcaaccagcccaggtcttgctggacctacctccagaacatccagaactggtcccttttctccaccgtcatagccaccccttaattccaagcaccagctctcatttgaattccagcagtggcttcctaaccactcattggagagtgattccatcctcgacccactgaggtttattctccacatctcagccagagagagtttttagaaactcaagtcagactgtgttgcctgcctgcttaaagccctccagaggctttctgatttcctgagaataaaacccaaaccaaccaggccatgatctggttcttggcttctccccaggcctcttctgtccctgtctcccttccatgaagctccagtcacacagttcttccctgagttcctccaccacaagctctttcctaccccaggacctttgcacatgcaacttctcccctgcctccctttcctggaggctggttcatttcttccctcaggtttcagtttgtcatttcctcacagaagtcctgcctgaccagtagacaagactcgctgctgcgagctatcataaaatcttgttcttttctctgcagaactcatcacaatttgtaacaaccaattatttctgtatgtgtgtttttgtctctaatagggcaggaatcttgtctattttgttgggccctgtatccacctaacaccctggctggccctcaataactcatctgttaacgagtgaatagaagaattaattggtgggaggctatgtttccttaaggattttctttctgttctcatatgccatccagtctcccttaggtagaggggagccggaaatggggctctgcgtgggggcaagggtgatcatggtctcttagggcagggctggggtcgccaaagtg

SEQ ID NO: 281828 - DNA, 322 bp, Homo sapiens
atgctgccttcctctctctctcccttattccacccccaggtcttgctggacctacctccagaacatccagaactggtcccttttctccaccgtcatagccaccccttaattccaagcaccagctctcatttgaattccagcagtggcttcctaaccactcattggagagtgattccatcctcgacccactgaggtttattctccacatctcagccagagagagtttttagaaactcaagtcagactgtgttgcctgcctgcttaaagccctccagaggctttctgatttcctgagaataaaacccaaaccaaccaggccatg

SEQ ID NO: 281829 - DNA, 1213 bp, Homo sapiens
tgctgcttctcctcctcgagctgggccacggcctgctcactgcgctgcagcttctgctgtgtccccgccagctcctcacgcagccactggttctcctgcaccagacgccgcacctgcgcccgcagcttctgcttctctgattctacagcccccaggtggctcgacaatgccaagatcacctgtgcaaccagcccagcctctgctgccacagccagtaggttactgctccctgcctcagggctagcgcttgcccacagaactctgctagatggctgaaggaccacccaaagactccatccccacttctgctgaggggccacagcatcccctgcctttctgcagctcccaggtcttgctggacctacctccagaacatccagaactggtcccttttctccaccgtcatagccaccccttaattccaagcaccagctctcatttgaattccagcagtggcttcctaaccactcattggagagtgattccatcctcgacccactgaggtttattctccacatctcagccagagagagtttttagaaactcaagtcagactgtgttgcctgcctgcttaaagccctccagaggctttctgatttcctgagaataaaacccaaaccaaccaggccatgatctggttcttggcttctccccaggcctcttctgtccctgtctcccttccatgaagctccagtcacacagttcttccctgagttcctccaccacaagctctttcctaccccaggacctttgcacatgcaacttctcccctgcctccctttcctggaggctggttcatttcttccctcaggtttcagtttgtcatttcctcacagaagtcctgcctgaccagtagacaagactcgctgctgcgagctatcataaaatcttgttcttttctctgcagaactcatcacaatttgtaacaaccaattatttctgtatgtgtgtttttgtctctaatagggcaggaatcttgtctattttgttgggccctgtatccacctaacaccctggctggccctcaataactcatctgttaacgagtgaatagaagaattaattggtgggaggctatgtttccttaaggattttctttctgttctcatatgccatccagtctcccttaggtagaggggagccggaaatggggctctgcgtgggggcaagggtgatcatggtctcttagggcagggctggggtcgccaaagtg

SEQ ID NO: 281830 - DNA, 961 bp, Homo sapiens
ctgacatatacatacatacagtggaatattattcagcttccaaaaggaagaaaattctgacatatgctgtgacatggatgcaccttgagtacattatgctaggtgaaataagccagtcacaaaaacaaatactgcatgattccatttaaatgaggggcctagaatatcaacttcatagacagaagttagaatggtggttgccaggggctgggaggagggggtaggggttaggttttaataaatatcatttcagttttacaagatgaagagagttttgcagatgggttgtgggcataattgtacaacattatcaatgtatttaataccactgaattgtacacttaaaatggttaagatggtaaattttatgtgtgttttaacacaataaaaactgaaaaaagggatatatgttaccctaaataaaaaattcgtatgctgaactcagaacccccagtacctaagaacatgaccttatttggaaatgggattgttgttaatgtaattagttaagatgaggtcatgctgtaatagggtgggccccctaatccaatatgatttgtgtctttataaaaaagggaaatttgtgcacagagataacacaggggatatgccatatgaagatgaaggcagaattctacaagcccagggatgccaaagattgccagcaaaccaccagaagctaggagagaagtgtggattagattcttcctcacagccctcagaaggaaccagccctgccaagaacttgatctcagacttctagtctccagaactgtgagacagtgcattttgttttgtaagtcagccatatggtttgtggcactttgttatggcagccctaggagatgaagacaatatgcaacatggtatgtccattataggacactgtgggccataaatgtgttctttggcctgaagaaataaaacttggtggtccaagttgatgtcttaaaaaaaattc

SEQ ID NO: 281831 - DNA, 830 bp, Homo sapiens
tcctcccactgagatgacccatagtaccccattccttgctgcaatgtaattatatttaattacaagtgtgcccctggtagtctttaactgaagggcactgactgggtcactggtgaagttccccgcaggaactgagtcagaccccatctcagggccctgcacaagataggtgcctgctctaaggcgtggaccctcgccacagccctggcccgtcttgacgggcgagggttactgtacttgtcccaaccatacagatgagaaagctgagactcagggccagcaacccgggtcccagcggagcgcccggcacacgccgacacttcagcaccagtggcggtggccaccactgtgcgcggagatggctgcgacgcgtgcgcaggtaaagtccatccgtgccttgcctcccaccggcgccttccccggcctctggtttttgtccccgccagcggctccgactccatcgcgtcctcttccagtctagtgcttttttccagatctcgatcccaaactccctcctgccagaatctggacccgaatccacccattgcccgttttctgctgccgctggagagaatctctgaggtccccaggagagcctgcctgcacggaagagacgcctcctcgattaaatgctgttttccatgaccgtctctgttcttcccatacgcgaatggcaggcatccagatctccaagaatagaggattaggagagactccaccacctatgtcctcacagttaattatcgatttgtgtcagttgcccattttctcacttcctgtttgtgtgtcaaggagtattaataaatctttgcctatttaaagatactagc

SEQ ID NO: 281832 - DNA, 886 bp, Homo sapiens
gtataacagtttctctctaactcctcccactgagatgacccatagtaccccattccttgctgcaatgtaattacaagtgtgctcctggtggtctttaactgaagggcactgactgggtactggtgaagttccccgcaggaactgagtcagaccccatctcagggccctgcagaagataggtgcctgctctaaggcgtggaccctcgcgacagccctggcccgtcttgacgggcgagggttactgtacttgtcccaaccgtacagatgagaaagctcagactcagggccagcaaccccggtcccagcggagcgcccggcacgcgccgacacttcagcaccagtcgcggtggccaccactgtgcgcggagatggctgcgacgcgtgcgcaggtaaagtccatccgtgccttgcctcccaccggcgccttccaccgcctctggttttgtccccgccagcggctccgactccatcgcgtcctcttccagtctagtgcttttttccagatctcgatcccaaactccctcctgccagaatctggacccgaatccacccattgcccattttccgctgccgctggagagaatctctgaggtccccaggacagcctgcctgcacggaagagatgcctcctcagtatggccgcccccggagaggagcgattaagtgcagacctccatgttgctcttgagcctgagcggcttcagggagccatgtttgttactggcgggcgccggcctcactgagcatgtgcagccctggccgggcggcctcaaagttctgacatcacagggcggttcctgaagtggacgtagttgtaagagctagttattttagacaatgcctctgggatcagggactctaatctggaaataggtagtgggagagg

SEQ ID NO: 281833 - DNA, 927 bp, Homo sapiens
tcctcccactgagatgacccatagtaccccattccttgctgcaatgtaattatatttaattacaagtgtgcccctggtagtctttaactgaagggcactgactgggtcactggtgaagttccccgcaggaactgagtcagaccccatctcagggccctgcacaagataggtgcctgctctaaggcgtggaccctcgccacagccctggcccgtcttgacgggcgagggttactgtacttgtcccaaccatacagatgagaaagctgagactcagggccagcaacccgggtcccagcggagcgcccggcacacgccgacacttcagcaccagtggcggtggccaccactgtgcgcggagatggctgcgacgcgtgcgcagatagctgggagagaggatttttcatgttaccaacacaaagaaatgataaaggtgaaatggccaccagacccaggctttctggaatgcattcattttctgcagttgaagggacgatcccggatctgaaagaaagagccacagtgactccaagagtggagccagggcatgctggacactgcatagctatggccacgtgtgtcacctccgagggagatgtgagagaaacacagagggatcgcttgtgactgtgccttctcgatgtatgatggactgttctgctcaaatagtaagtgtgaacaaggagccggtgaacataggaaacaaagaatatttcatttgacattataaggaatgagacaattctagtcacttgaaagtgaactatatctgtcgagaattcctagttttaattgcgaagaaatgtgcttctctttttgaaaagccacaggttattgcttttatatctaatatcagtcctctctggatctctcaaaggattttgtgtatatcctaccattttccttctgttgctgcagtttggaagtagt

SEQ ID NO: 281834 - DNA, 333 bp, Homo sapiens
  misc_feature (24)..(24): n is a, c, g, or t
ttatctggaacgactctcttaatnctccaccgctacagcggaaatttgaggggatatgccatatgaagatgaaggcagaattctacaagcccagggatgccaaagattgccagcaaaccaccagaagctatagattcttcctcacagccctcagaaggaaccagccctgccaagaacttgatctcagacttctagtctccagaactgtgagacaagtcagccatatggtttgtggcactttgttatggcagccctaggagatgaagacaatatgcaacatggtatgtccattataggacactgtgttctttggcctgaagaaataaaaccaga

SEQ ID NO: 281835 - DNA, 2038 bp, Homo sapiens
tcctcccactgagatgacccatagtaccccattccttgctgcaatgtaattatatttaattacaagtgtgcccctggtagtctttaactgaagggcactgactgggtcactggtgaagttccccgcaggaactgagtcagaccccatctcagggccctgcacaagataggtgcctgctctaaggcgtggaccctcgccacagccctggcccgtcttgacgggcgagggttactgtacttgtcccaaccatacagatgagaaagctgagactcagggccagcaacccgggtcccagcggagcgcccggcacacgccgacacttcagcaccagtggcggtggccaccactgtgcgcggagatggctgcgacgcgtgcgcagatctcgatcccaaactccctcctgccagaatctggacccgaatccacccattgcccgttttctgctgccgctggagagaatctctgaggtccccaggagagcctgcctgcacggaagagacgcctcctcgattaaatgctgttttccatgaccgtctctgttcttcccatacgcgaatggcaggcattcagatctccaagaatagaggattaggagagactccaccacctatgtcctcacagttaattatcgatttgtgtcagttgcccattttctcacttcctgtttgtgtgtcaaggggtattaataaatctttgcctatttaaagatattagccttggattttcaaatattgcatattttgacatgtaaaaatttgttagttttattttttcaaccgatctgacctgtatagttgggcttgaggaagcttcctcattctacatgttactatggattttctaatattaacacagggttgtattttttccatataactttctattgaatttctttttccatatgataggtggtgaaggtttagcccagtaaagcagagaggttaagaggttagattgggggctctggagccagacctgtgtagatctgagtcctggctctggcacttgaaagccgtgtgaccttggttaagatacttagtccctctctgccaaatggagaaataagggcacctaccccatagggtagttgtgtgattacacaagttaatacacttcaatcagtagcaagaaagtgaatgtcaagctgtatttgttcaggcagccatatggtagccccacgtccttagtaaactgaggtattgaagtatcttctttttctttcagaaaatatttgtcaagcaccttctgtgttcaaagaactgttctagagctttgcatgctatggaggtctagaaattcacattatggtggcaggtgacagacaatacaaagagataaagcaatttcatatagtgataagctagggaggagtgctaaaaggagccaaggtgtagtggtgactggaaggtgaccagggaaaccactgtagggtttctaagtgatgagatctgtgacaaatccctgtggtcagcagcaggcattggatatgtaactttattctgtcccattgatcttgtagtcaaccctggtctgttctgtattgttttaattacataatctttgtaataatctttaatacctggtggagtgctctgtttacttatttctgcgtaattaaccacccctaagcttaacttactcatggttctgcagggtgactgctctccatggttctaggtggttctgcatggggcctctcacatgtgctacagtcaaacattagccggggccacagtcatctgaaactcacttacatggctgacaattgatgttggctgttgcctggagaagacatatgtggcgtggtggaatggaatggtgactagattcaagaaagagcttcccaggaggaaggctaccaagagaccgaagtagaggcttcagtttcttaaaaaaaaaaaaaaaaaaaaaaatcgggccaggcacgatggctcatgcatgtaatcccagcactttgggaggccaaggcaggcagatcacaaggtcatgagatcgagaccatcctggccaacatagtgaaacccgtctccaataaaaa

SEQ ID NO: 281836 - DNA, 2877 bp, Homo sapiens
tcctcccactgagatgacccatagtaccccattccttgctgcaatgtaattatatttaattacaagtgtgcccctggtagtctttaactgaagggcactgactgggtcactggtgaagttccccgcaggaactgagtcagaccccatctcagggccctgcacaagataggtgcctgctctaaggcgtggaccctcgccacagccctggcccgtcttgacgggcgagggttactgtacttgtcccaaccatacagatgagaaagctgagactcagggccagcaacccgggtcccagcggagcgcccggcacacgccgacacttcagcaccagtggcggtggccaccactgtgcgcggagatggctgcgacgcgtgcgcaggtaaagtccatccgtgccttgcctcccaccggcgccttccccggcctctggtttttgtccccgccagcggctccgactccatcgcgtcctcttccagtctagtgcttttttccagatctcgatcccaaactccctcctgccagaatctggacccgaatccacccattgcccgttttctgctgccgctggagagaatctctgaggtccccaggagagcctgcctgcacggaagagacgcctcctcggtatggccgcccccggagaggagcgattaagtgcagacctccatgttgctcttgagcctgagcggcttcagggagccatgtttgttactggcgggcgccgacctcactgagcatgtgcagccctggccgggcggcctcaaagttctgacatcacagggcggttcctgaagtggacgtagttgtaagagctagttattttagacaatgcctctgtgatcagggactctaatctggaaataggtagtcggagaggtcggtgatgcagtctctggatcagagacctgagctatatggggttagagaggggccctgggcaggcgagtctctggggagtgtgatgagaatccttgtgtaagatgctgggaggaggtggggtcagggctggggtccgtgggccgacgggttgggggatggccagcgtcagggatcagtagtagagattctatgtgccctgatcgccagtggaggttttaaatacagagtattcatgagtttagcaatgtttttcgcctctcattatttaaataatttgaagttttccccaataactagtgtcttagaagtcatgaaaatttcagaaaatgacaggtcttctgagttcgtgatgggagttgggcagcagtcgcatacgagcacctggagagtccttgccagttctttggggatggggagctcttaagactgccctgagaccgccctttgacctcattgtggtcctttctagattaaatgctgttttccatgaccgtctctgttcttcccatacgcgaatggcaggcattcagatctccaagaatagaggattaggagagactccaccacctatgtcctcacagttaattatcgatttgtgtcagttgcccattttctcacttcctgtttgtgtgtcaaggggtattaataaatctttgcctatttaaagatattagccttggattttcaaatattgcatattttgacatgtaaaaatttgttagttttattttttcaaccgatctgacctgtatagttgggcttgaggaagcttcctcattctacatgttactatggattttctaatattaacacagggttgtattttttccatataactttctattgaatttctttttccatatgataggtggtgaaggtttagcccagtaaagcagagaggttaagaggttagattgggggctctggagccagacctgtgtagatctgagtcctggctctggcacttgaaagccgtgtgaccttggttaagatacttagtccctctctgccaaatggagaaataagggcacctaccccatagggtagttgtgtgattacacaagttaatacacttcaatcagtagcaagaaagtgaatgtcaagctgtatttgttcaggcagccatatggtagccccacgtccttagtaaactgaggtattgaagtatcttctttttctttcagaaaatatttgtcaagcaccttctgtgttcaaagaactgttctagagctttgcatgctatggaggtctagaaattcacattatggtggcaggtgacagacaatacaaagagataaagcaatttcatatagtgataagctagggaggagtgctaaaaggagccaaggtgtagtggtgactggaaggtgaccagggaaaccactgtagggtttctaagtgatgagatctgtgacaaatccctgtggtcagcagcaggcattggatatgtaactttattctgtcccattgatcttgtagtcaaccctggtctgttctgtattgttttaattacataatctttgtaataatctttaatacctggtggagtgctctgtttacttatttctgcgtaattaaccacccctaagcttaacttactcatggttctgcagggtgactgctctccatggttctaggtggttctgcatggggcctctcacatgtgctacagtcaaacattagccggggccacagtcatctgaaactcacttacatggctgacaattgatgttggctgttgcctggagaagacatatgtggcgtggtggaatggaatggtgactagattcaagaaagagcttcccaggaggaaggctaccaagagaccgaagtagaggcttcagtttcttaaaaaaaaaaaaaaaaaaaaaaatcgggccaggcacgatggctcatgcatgtaatcccagcactttgggaggccaaggcaggcagatcacaaggtcatgagatcgagaccatcctggccaacatagtgaaacccgtctccaataaaaa

SEQ ID NO: 281837 - DNA, 2923 bp, Homo sapiens
  misc_feature (8)..(8): n is a, c, g, or t
  misc_feature (77)..(77): n is a, c, g, or t
tttttttnaatgttagaattcttttttatttcctggaagctgagatacaaaaatggaaccaaaattcagtgatgtanatctttatcatatcttgcgtggtcctctttgtgcatcacagcagggtccatctgctctgggtccttatgacatgacactattctcagtgtcctggtatgttcccgacactgtacaatggctccaatcagccctactccgtgcctgctctaaggcgtggaccctcgccacagccctggcccgtcttgacgggcgagggttactgtacttgtcccaaccatacagatgagaaagctgagactcagggccagcaacccgggtcccagcggagcgcccggcacacgccgacacttcagcaccagtggcggtggccaccactgtgcgcggagatggctgcgacgcgtgcgcaggtaaagtccatccgtgccttgcctcccaccggcgccttccccggcctctggtttttgtccccgccagcggctccgactccatcgcgtcctcttccagtctagtgcttttttccagatctcgatcccaaactccctcctgccagaatctggacccgaatccacccattgcccgttttctgctgccgctggagagaatctctgaggtccccaggagagcctgcctgcacggaagagacgcctcctcggtatggccgcccccggagaggagcgattaagtgcagacctccatgttgctcttgagcctgagcggcttcagggagccatgtttgttactggcgggcgccgacctcactgagcatgtgcagccctggccgggcggcctcaaagttctgacatcacagggcggttcctgaagtggacgtagttgtaagagctagttattttagacaatgcctctgtgatcagggactctaatctggaaataggtagtcggagaggtcggtgatgcagtctctggatcagagacctgagctatatggggttagagaggggccctgggcaggcgagtctctggggagtgtgatgagaatccttgtgtaagatgctgggaggaggtggggtcagggctggggtccgtgggccgacgggttgggggatggccagcgtcagggatcagtagtagagattctatgtgccctgatcgccagtggaggttttaaatacagagtattcatgagtttagcaatgtttttcgcctctcattatttaaataatttgaagttttccccaataactagtgtcttagaagtcatgaaaatttcagaaaatgacaggtcttctgagttcgtgatgggagttgggcagcagtcgcatacgagcacctggagagtccttgccagttctttggggatggggagctcttaagactgccctgagaccgccctttgacctcattgtggtcctttctagattaaatgctgttttccatgaccgtctctgttcttcccatacgcgaatggcaggcattcagatctccaagaatagaggattaggagagactccaccacctatgtcctcacagttaattatcgatttgtgtcagttgcccattttctcacttcctgtttgtgtgtcaaggggtattaataaatctttgcctatttaaagatattagccttggattttcaaatattgcatattttgacatgtaaaaatttgttagttttattttttcaaccgatctgacctgtatagttgggcttgaggaagcttcctcattctacatgttactatggattttctaatattaacacagggttgtattttttccatataactttctattgaatttctttttccatatgataggtggtgaaggtttagcccagtaaagcagagaggttaagaggttagattgggggctctggagccagacctgtgtagatctgagtcctggctctggcacttgaaagccgtgtgaccttggttaagatacttagtccctctctgccaaatggagaaataagggcacctaccccatagggtagttgtgtgattacacaagttaatacacttcaatcagtagcaagaaagtgaatgtcaagctgtatttgttcaggcagccatatggtagccccacgtccttagtaaactgaggtattgaagtatcttctttttctttcagaaaatatttgtcaagcaccttctgtgttcaaagaactgttctagagctttgcatgctatggaggtctagaaattcacattatggtggcaggtgacagacaatacaaagagataaagcaatttcatatagtgataagctagggaggagtgctaaaaggagccaaggtgtagtggtgactggaaggtgaccagggaaaccactgtagggtttctaagtgatgagatctgtgacaaatccctgtggtcagcagcaggcattggatatgtaactttattctgtcccattgatcttgtagtcaaccctggtctgttctgtattgttttaattacataatctttgtaataatctttaatacctggtggagtgctctgtttacttatttctgcgtaattaaccacccctaagcttaacttactcatggttctgcagggtgactgctctccatggttctaggtggttctgcatggggcctctcacatgtgctacagtcaaacattagccggggccacagtcatctgaaactcacttacatggctgacaattgatgttggctgttgcctggagaagacatatgtggcgtggtggaatggaatggtgactagattcaagaaagagcttcccaggaggaaggctaccaagagaccgaagtagaggcttcagtttcttaaaaaaaaaaaaaaaaaaaaaaatcgggccaggcacgatggctcatgcatgtaatcccagcactttgggaggccaaggcaggcagatcacaaggtcatgagatcgagaccatcctggccaacatagtgaaacccgtctccaataaaaa

SEQ ID NO: 281838 - DNA, 1223 bp, Homo sapiens
ttttttttaagaaactgaagcctctacttcggtctcttggtagccttcctcctgggaagctctttctattgaatttctttttccatatgataggtggtgaaggtttagcccagtaaagcagagaggttaagaggttagattgggggctctggagccagacctgtgtagatctgagtcctggctctggcacttgaaagccgtgtgaccttggttaagatacttagtccctctctgccaaatggagaaataagggcacctaccccatagggtagttgtgtgattacacaagttaatacacttcaatcagtagcaagaaagtgaatgtcaagctgtatttgttcaggcagccatatggtagccccacgtccttagtaaactgaggtattgaagtatcttctttttctttcagaaaatatttgtcaagcaccttctgtgttcaaagaactgttctagagctttgcatgctatggaggtctagaaattcacattatggtggcaggtgacagacaatacaaagagataaagcaatttcatatagtgataagctagggaggagtgctaaaaggagccaaggtgtagtggtgactggaaggtgaccagggaaaccactgtagggtttctaagtgatgagatctgtgacaaatccctgtggtcagcagcaggcattggatatgtaactttattctgtcccattgatcttgtagtcaaccctggtctgttctgtattgttttaattacataatctttgtaataatctttaatacctggtggagtgctctgtttacttatttctgcgtaattaaccacccctaagcttaacttactcatggttctgcagggtgactgctctccatggttctaggtggttctgcatggggcctctcacatgtgctacagtcaaacattagccggggccacagtcatctgaaactcacttacatggctgacaattgatgttggctgttgcctggagaagacatatgtggcgtggtggaatggaatggtgactagattcaagaaagagcttcccaggaggaaggctaccaagagaccgaagtagaggcttcagtttcttaaaaaaaaaaaaaaaaaaaaaaatcgggccaggcacgatggctcatgcatgtaatcccagcactttgggaggccaaggcaggcagatcacaaggtcatgagatcgagaccatcctggccaacatagtgaaacccgtctccaataaaaa

SEQ ID NO: 281839 - DNA, 1066 bp, Homo sapiens
  misc_feature (8)..(8): n is a, c, g, or t
  misc_feature (77)..(77): n is a, c, g, or t
tttttttnaatgttagaattcttttttatttcctggaagctgagatacaaaaatggaaccaaaattcagtgatgtanatctttatcatatcttgcgtggtcctctttgtgcatcacagcagggtccatctgctctgggtccttatgacatgacactattctcagtgtcctggtatgttcccgacactgtacaatggctccaatcagccctactccaagtgtgcccctggtagtctttaactgaagggcactgactgggtcactggtgaagttccccgcaggaactgagtcagaccccatctcagggccctgcacaagataggtgcctgctctaaggcgtggaccctcgccacagccctggcccgtcttgacgggcgagggttactgtacttgtcccaaccatacagatgagaaagctgagactcagggccagcaacccgggtcccagcggagcgcccggcacacgccgacacttcagcaccagtggcggtggccaccactgtgcgcggagatggctgcgacgcgtgcgcagatctcgatcccaaactccctcctgccagaatctggacccgaatccacccattgcccgttttctgctgccgctggagagaatctctgaggtccccaggagagcctgcctgcacggaagagacgcctcctcgggaaatttgtgcacagagataacacaggggatatgccatatgaagatgaaggcagaattctacaagcccagggatgccaaagattgccagcaaaccaccagaagctaggagagaagtgtggattagattcttcctcacagccctcagaaggaaccagccctgccaagaacttgatctcagacttctagtctccagaactgtgagacagtgcattttgttttgtaagtcagccatatggtttgtggcactttgttatggcagccctaggagatgaagacaatatgcaacatggtatgtccattataggacactgtgggccataaatgtgttctttggcctgaagaaataaaacttgatgcggccggaaaccatccaatataatatactaataccatcaaacacaaa

SEQ ID NO: 281840 - DNA, 1009 bp, Homo sapiens
tcctcccactgagatgacccatagtaccccattccttgctgcaatgtaattatatttaattacaagtgtgcccctggtagtctttaactgaagggcactgactgggtcactggtgaagttccccgcaggaactgagtcagaccccatctcagggccctgcacaagataggtgcctgctctaaggcgtggaccctcgccacagccctggcccgtcttgacgggcgagggttactgtacttgtcccaaccatacagatgagaaagctgagactcagggccagcaacccgggtcccagcggagcgcccggcacacgccgacacttcagcaccagtggcggtggccaccactgtgcgcggagatggctgcgacgcgtgcgcaggtaaagtccatccgtgccttgcctcccaccggcgccttccccggcctctggtttttgtccccgccagcggctccgactccatcgcgtcctcttccagtctagtgcttttttccagatctcgatcccaaactccctcctgccagaatctggacccgaatccacccattgcccgttttctgctgccgctggagagaatctctgaggtccccaggagagcctgcctgcacggaagagacgcctcctcgggtgactgctctccatggttctaggtggttctgcatggggcctctcacatgtgctacagtcaaacattagccggggccacagtcatctgaaactcacttacatggctgacaattgatgttggctgttgcctggagaagacatatgtggcgtggtggaatggaatggtgactagattcaagaaagagcttcccaggaggaaggctaccaagagaccgaagtagaggcttcagtttcttaaaaaaaaaaaaaaaaaaaaaaatcgggccaggcacgatggctcatgcatgtaatcccagcactttgggaggccaaggcaggcagatcacaaggtcatgagatcgagaccatcctggccaacatagtgaaacccgtctccaataaaaa

SEQ ID NO: 281841 - DNA, 1038 bp, Homo sapiens
gtataacagtttctctctaactcctcccactgagatgacccatagtaccccattccttgctgcaatgtaattacaagtgtgctcctggtggtctttaactgaagggcactgactgggtactggtgaagttccccgcaggaactgagtcagaccccatctcagggccctgcagaagataggtgcctgctctaaggcgtggaccctcgcgacagccctggcccgtcttgacgggcgagggttactgtacttgtcccaaccgtacagatgagaaagctcagactcagggccagcaaccccggtcccagcggagcgcccggcacgcgccgacacttcagcaccagtcgcggtggccaccactgtgcgcggagatggctgcgacgcgtgcgcaggtaaagtccatccgtgccttgcctcccaccggcgccttccaccgcctctggttttgtccccgccagcggctccgactccatcgcgtcctcttccagtctagtgcttttttccagatctcgatcccaaactccctcctgccagaatctggacccgaatccacccattgcccattttccgctgccgctggagagaatctctgaggtccccaggacagcctgcctgcacggaagagatgcctcctcaggaaatttgtgcacagagataacacaggggatatgccatatgaagatgaaggcagaattctacaagcccagggatgccaaagattgccagcaaaccaccagaagctaggagagaagtgtggattagattcttcctcacagccctcagaaggaaccagccctgccaagaacttgatctcagacttctagtctccagaactgtgagacagtgcattttgttttgtaagtcagccatatggtttgtggcactttgttatggcagccctaggagatgaagacaatatgcaacatggtatgtccattataggacactgtgggccataaatgtgttctttggcctgaagaaataaaacttgatgcggccggaaaccatccaatataatatactaataccatcaaacacaaa

SEQ ID NO: 281842 - DNA, 794 bp, Homo sapiens
gtataacagtttctctctaactcctcccactgagatgacccatagtaccccattccttgctgcaatgtaattacaagtgtgctcctggtggtctttaactgaagggcactgactgggtactggtgaagttccccgcaggaactgagtcagaccccatctcagggccctgcagaagataggtgcctgctctaaggcgtggaccctcgcgacagccctggcccgtcttgacgggcgagggttactgtacttgtcccaaccgtacagatgagaaagctcagactcagggccagcaaccccggtcccagcggagcgcccggcacgcgccgacacttcagcaccagtcgcggtggccaccactgtgcgcggagatggctgcgacgcgtgcgcagggaaatttgtgcacagagataacacaggggatatgccatatgaagatgaaggcagaattctacaagcccagggatgccaaagattgccagcaaaccaccagaagctaggagagaagtgtggattagattcttcctcacagccctcagaaggaaccagccctgccaagaacttgatctcagacttctagtctccagaactgtgagacagtgcattttgttttgtaagtcagccatatggtttgtggcactttgttatggcagccctaggagatgaagacaatatgcaacatggtatgtccattataggacactgtgggccataaatgtgttctttggcctgaagaaataaaacttgatgcggccggaaaccatccaatataatatactaataccatcaaacacaaa

SEQ ID NO: 281843 - DNA, 1047 bp, Homo sapiens
  misc_feature (8)..(8): n is a, c, g, or t
  misc_feature (77)..(77): n is a, c, g, or t
tttttttnaatgttagaattcttttttatttcctggaagctgagatacaaaaatggaaccaaaattcagtgatgtanatctttatcatatcttgcgtggtcctctttgtgcatcacagcagggtccatctgctctgggtccttatgacatgacactattctcagtgtcctggtatgttcccgacactgtacaatggctccaatcagccctactccaagtgtgcccctggtagtctttaactgaagggcactgactgggtcactggtgaagttccccgcaggaactgagtcagaccccatctcagggccctgcacaagataggtgcctgctctaaggcgtggaccctcgccacagccctggcccgtcttgacgggcgagggttactgtacttgtcccaaccatacagatgagaaagctgagactcagggccagcaacccgggtcccagcggagcgcccggcacacgccgacacttcagcaccagtggcggtggccaccactgtgcgcggagatggctgcgacgcgtgcgcagatctcgatcccaaactccctcctgccagaatctggacccgaatccacccattgcccgttttctgctgccgctggagagaatctctgaggtccccaggagagcctgcctgcacggaagagacgcctcctcgggaaatttgtgcacagagataacacaggggatatgccatatgaagatgaaggcagaattctacaagcccagggatgccaaagattgccagcaaaccaccagaagctaggagagaagtgtggattagattcttcctcacagccctcagaaggaaccagccctgccaagaacttgatctcagacttctagtctccagaactgtgagacagtgcattttgttttgtaagtcagccatatggtttgtggcactttgttatggcagccctaggagatgaagacaatatgcaacatggtatgtccattataggacactgtgggccataaatgtgttctttggcctgaagaaataaaacttggtggtccaagttgatgtcttaaaaaaaattc

SEQ ID NO: 281844 - DNA, 2914 bp, Homo sapiens
  misc_feature (8)..(8): n is a, c, g, or t
  misc_feature (77)..(77): n is a, c, g, or t
tttttttnaatgttagaattcttttttatttcctggaagctgagatacaaaaatggaaccaaaattcagtgatgtanatctttatcatatcttgcgtggtcctctttgtgcatcacagcagggtccatctgctctgggtccttatgacatgacactattctcagtgtcctggtatgttcccgacactgtacaatggctccaatcagccctactccaagtgtgcccctggtagtctttaactgaagggcactgactgggtcactggtgaagttccccgcaggaactgagtcagaccccatctcagggccctgcacaagataggtgcctgctctaaggcgtggaccctcgccacagccctggcccgtcttgacgggcgagggttactgtacttgtcccaaccatacagatgagaaagctgagactcagggccagcaacccgggtcccagcggagcgcccggcacacgccgacacttcagcaccagtggcggtggccaccactgtgcgcggagatggctgcgacgcgtgcgcagatctcgatcccaaactccctcctgccagaatctggacccgaatccacccattgcccgttttctgctgccgctggagagaatctctgaggtccccaggagagcctgcctgcacggaagagacgcctcctcggtatggccgcccccggagaggagcgattaagtgcagacctccatgttgctcttgagcctgagcggcttcagggagccatgtttgttactggcgggcgccgacctcactgagcatgtgcagccctggccgggcggcctcaaagttctgacatcacagggcggttcctgaagtggacgtagttgtaagagctagttattttagacaatgcctctgtgatcagggactctaatctggaaataggtagtcggagaggtcggtgatgcagtctctggatcagagacctgagctatatggggttagagaggggccctgggcaggcgagtctctggggagtgtgatgagaatccttgtgtaagatgctgggaggaggtggggtcagggctggggtccgtgggccgacgggttgggggatggccagcgtcagggatcagtagtagagattctatgtgccctgatcgccagtggaggttttaaatacagagtattcatgagtttagcaatgtttttcgcctctcattatttaaataatttgaagttttccccaataactagtgtcttagaagtcatgaaaatttcagaaaatgacaggtcttctgagttcgtgatgggagttgggcagcagtcgcatacgagcacctggagagtccttgccagttctttggggatggggagctcttaagactgccctgagaccgccctttgacctcattgtggtcctttctagattaaatgctgttttccatgaccgtctctgttcttcccatacgcgaatggcaggcattcagatctccaagaatagaggattaggagagactccaccacctatgtcctcacagttaattatcgatttgtgtcagttgcccattttctcacttcctgtttgtgtgtcaaggggtattaataaatctttgcctatttaaagatattagccttggattttcaaatattgcatattttgacatgtaaaaatttgttagttttattttttcaaccgatctgacctgtatagttgggcttgaggaagcttcctcattctacatgttactatggattttctaatattaacacagggttgtattttttccatataactttctattgaatttctttttccatatgataggtggtgaaggtttagcccagtaaagcagagaggttaagaggttagattgggggctctggagccagacctgtgtagatctgagtcctggctctggcacttgaaagccgtgtgaccttggttaagatacttagtccctctctgccaaatggagaaataagggcacctaccccatagggtagttgtgtgattacacaagttaatacacttcaatcagtagcaagaaagtgaatgtcaagctgtatttgttcaggcagccatatggtagccccacgtccttagtaaactgaggtattgaagtatcttctttttctttcagaaaatatttgtcaagcaccttctgtgttcaaagaactgttctagagctttgcatgctatggaggtctagaaattcacattatggtggcaggtgacagacaatacaaagagataaagcaatttcatatagtgataagctagggaggagtgctaaaaggagccaaggtgtagtggtgactggaaggtgaccagggaaaccactgtagggtttctaagtgatgagatctgtgacaaatccctgtggtcagcagcaggcattggatatgtaactttattctgtcccattgatcttgtagtcaaccctggtctgttctgtattgttttaattacataatctttgtaataatctttaatacctggtggagtgctctgtttacttatttctgcgtaattaaccacccctaagcttaacttactcatggttctgcagggtgactgctctccatggttctaggtggttctgcatggggcctctcacatgtgctacagtcaaacattagccggggccacagtcatctgaaactcacttacatggctgacaattgatgttggctgttgcctggagaagacatatgtggcgtggtggaatggaatggtgactagattcaagaaagagcttcccaggaggaaggctaccaagagaccgaagtagaggcttcagtttcttaaaaaaaaaaaaaaaaaaaaaaatcgggccaggcacgatggctcatgcatgtaatcccagcactttgggaggccaaggcaggcagatcacaaggtcatgagatcgagaccatcctggccaacatagtgaaacccgtctccaataaaaa

SEQ ID NO: 281845 - DNA, 1300 bp, Homo sapiens
cgagctaattattagcatcatccctctactattttttaaccaaatcaacaacaacctatttagctgttccccaaccttttcctccgaccccctaacaacccccctcctaatactaactacctgactcctacccctcacaatcatggcaagccaacgccacttatccagtgaaccactatcacgaaaaaaactctacctctctatactaatctccctacaaatctccttaattataacattcacagccacagaactaatcatattttatatcttcttcgaaaccacacttatccccaccttggctatcatcacccgatgaggcaaccagccagaacgcctgaacgcaggcacatacttcctattctacaccctagtaggctcccttcccctactcatcgcactaatttacactcacaacaccctaggctcactaaacattctactactcactctcactgcccaagaactatcaaactccaaaaaaaaaaaaaaaaaaaaactcgaactagttctcctcgtgccgaattcggcacgagcggcacgaggttaaaagctgaaacaacttcaaggaaacttcagggaaaagagaaggcctggaatctgatcctccacttcagagaacaggggtggtggagtctatggcccttctccttgaatctgagtgaaattagtgagtctttcaatccaaagactacagtcatacctcaactatctacagaggactggttccaggactcccatggatcccaaaatccaaggatgcttcgaatcccttatataaaatggcatggtatttgcatataacctacatgcatcttcaaatatgttaaaccatctctagattacttataataccaaatacaatgtaatgctatgtaaacagttgttacaatgtattgtcaaagacaagctctccttgccaatccctgaccaaatgagagattcatgagccaaaataaatagttgctgatatttaaggcactaagtttggggcaatgtattacacagcaataaataactggaacagcatagtaaattctagttaaaaatactaaactactaagttttagttaacatacatgctcaagttaagggtgtggtatactaacaactgcaacttactttgaaaagcataaaaaaagacactagaagaagacaggatggatagatggacaagatagaagacaataacaaatagaacaaaatgttgtgaaattatattctacaattattttaaagtctgtgtggtttgaaaaattgtacgataaaatgaagagtgaaataaagacatttccataca

SEQ ID NO: 281846 - DNA, 804 bp, Homo sapiens
tggcaaaggtgtatacatttgtcacagctcatgaaatggtatatgtggtcaactgtattttccaaagatggtcacaatagaagccattccacatgctcttaacaatgtaacactgtcattttttcatcaggtggtggagtctatggcccttctccttgaatctgagtgaaattagtgagtctttcaatccaaagactacagtcatacctcaactatctacagaggactggttccaggactcccatggatcccaaaatccaaggatgcttcgaatcccttatataaaatggcatggtatttgcatataacctacatgcatcttcaaatatgttaaaccatctctagattacttataataccaaatacaatgtaatgctatgtaaacagttgttacaatgtattgtcaaagacaagctctccttgccaatccctgaccaaatgagagattcatgagccaaaataaatagttgctgatatttaaggcactaagtttggggcaatgtattacacagcaataaataactggaacagcatagtaaattctagttaaaaatactaaactactaagttttagttaacatacatgctcaagttaagggtgtggtatactaacaactgcaacttactttgaaaagcataaaaaaagacactagaagaagacaggatggatagatggacaagatagaagacaataacaaatagaacaaaatgttgtgaaattatattctacaattattttaaagtctgtgtggtttgaaaaattgtacgataaaatgaagagtgaaataaagacatttccataca

SEQ ID NO: 281847 - DNA, 446 bp, Homo sapiens
ctggcactgaaaatgtggcatccagtccactttaccatcagtgtttaaggaaaccatctctgataaggatgactgaggaagagtactctttggcttgttgacaccagcacagctgacacacccagatatctgtttggtctcctgtgaactttcaaccaggatttaaggatgccactctggttaaaagctgaaacaacttcaaggaaacttcagggaaaagagaaggcctggaatctgatcctccacttcagagaacaggggtcagcttactgtatgattaagtaacacaaggcacagtagccatctttttcattatgttgcaacactgatcacgtgcctcgataaaatggctgattcaacaagatgatggcaacacgaaggggagactttggattgtctatttaaaatctaggtaataagtaagtaattaataaaaactctatctt

SEQ ID NO: 281848 - DNA, 359 bp, Homo sapiens
ctggcactgaaaatgtggcatccagtccactttaccatcagtgtttaaggaaaccatctctgataaggatgactgaggaagagtactctttggcttgttgacaccagcacagctgacacacccagatatctgtttggtctcctgtgaactttcaaccaggatttaaggatgccactctggttaaaagctgaaacaacttcaaggaaacttcagggaaaagagaaggcctggaatctgatcctccacttcagagaacagggagaaaaaagtacatgtgaaatactactacttatccatctcctggctctgagcagtacatgtcaggaacaagagggaattgtagctggaagacagtagaa

SEQ ID NO: 281849 - DNA, 604 bp, Homo sapiens
gttaaaaatacataatccttttattttataatgcaataaaagaaattaacaacatcacatacacagaagactaggaaaggggaaactacttacttctggaaatcagtaatgtaaacttacttgtacttttccatagtacatgaaagtaacgtttaacatgttttgaattaattaattaaatttaatctgtggggctatacaatgtaattcttaggagtaatagtttcattcatttccaggtcagcttactgtatgattaagtaacacaaggcacagtagccatctttttcattatgttgcaacactgatcacgtgcctcgataaaatggctgattcaacaagatgatggcaacacgaaggggagactttggattgtctatttaaaatctaggtaataagtaagtaattaataaaaactctatcttaagtgcactttcacatgctttttgtttataataaacaaacaacaaacttcctaactttgttgcaataggcttgactaccatttcatttggccaaatgcactttccccagtaaacttaaaacaacaacgagaacaacaagaacaaaaatccctgtcctttcatatactaagaaagaggat

SEQ ID NO: 281850 - DNA, 1480 bp, Homo sapiens
  misc_feature (1472)..(1474): n is a, c, g, or t
  misc_feature (1476)..(1476): n is a, c, g, or t
  misc_feature (1478)..(1480): n is a, c, g, or t
ggggtggaaaaaaaaaaaaaaaaaaaaaaaaaaaaaaagaagaagaacaaaaaggtgaatggtctgcctcctgaaatagctgctgttcctgagctggcaaaatactgggcccagaggtacaggctcttctcccgttttgatgatgggattaagttggacagagagggctggttttcagttacacccgagaagattgctgaacacattgctggccgtgttagtcagtccttcaagtgtgacgttgtagtagacgcattctgtggagttggaggaaataccattcagtttgccttaacaggaatgagagtgattgccattgatatcgatcctgttaagattgcccttgctcgcaataatgcagaagtttatgggatagcagataagatagagttcatctgtggagatttcttgctgctggcttcttttttaaaggctgatgttgtgttcctcagcccaccttggggagggccagactatgccactgcagagacctttgacattagaacaatgatgtctcctgatggctttgaaattttcagactttctaagaagatcactaataatattgtttattttcttccaagaaatgctgatattgaccaggtggcatccttagctgggcctggagggcaagtggaaatagaacagaacttccttaacaacaaattgaagacaatcactgcatattttggtgacctaattcgaagaccagcctctgaaacctaactatgcagcagtgcgaggacaaaagatcatggagtggtcaaaatattcagatgagacatttggcatgtcttcctttattcactgatattttctacccatggtcttatatcaccgtatgaaatggaaacttacaggacttaaatatcagtgaaatattttgagatctttgaataattcctttagaggaattatacaaaattaatatatatgagtcctttgtaatttatttttttttgagacaggatctcacttttaccgcccaggctggagtgcagtgccatgatcacagctcactgcaggttcagccttctgagttcaagcaatccttctgtctcagtctcctcagtagctggggctttaggtgggcactgccacaccgtactaatttttgtattttttgtagagacgaggtcccaccatgttgcccaggctggtgtcaaactcctgggctcagtcagtccccccatctcaccctccccaagtgctggaattacaggcgtgagctactgtgcccagccttacggacatccttttgaattatctttttcactcatagaatatgaatacatttatttagactttttctagaactttcctgttttcatgtctttgcttcatctggaattggcttaacacccttttataaagtttgtgtttgtaaaatttccattgtgacatcaatacgcaatatattttgtaatataggagtttctatttttttattaaaatggcaatgaaagcaagannnanannn

SEQ ID NO: 281851 - DNA, 2239 bp, Homo sapiens
  misc_feature (2231)..(2233): n is a, c, g, or t
  misc_feature (2235)..(2235): n is a, c, g, or t
  misc_feature (2237)..(2239): n is a, c, g, or t
taaaatattttcattggctttgcaaatagcagaaaagttgtcaaaccaagggggaaaagctactgcaatatttctgcctctttagattcacagaagtcttcaggagcaaacacaagcaaagacagaccacatgccagtggtactgatggagatgaaagtgaggaagacccacctgagcataagccaagcaaactgaagaggagccatgaactggacattgatgaaaacccagcttcagactttgatgacagtggttcccttctaggattcaagtatggctcaggacaaaaatatggtggaatcccaaatttcagtcatcggcaggtcaggtatttagagaagaatgtgaagcttaagtctaagtacctagacatgcgcagacaaataaagatgaaaaacaaacacatcttctttaccaaagagtcagaaaaaccatttttcaagaaaagcaaaattctgagtaaggtagaaaaattcctcacatgggttaataaaccaatggatgaagaagcatcacaggaatcatcttctcatgacaatgtgcacgacgcttccacaagtagtgattcagaggaacaagacatgtctgttaaaaaaggtgatgacctactggagactaataatccagaacctgaaaagtgtcagagcgtatcttcagctggtgaacttgaaacagaaaactatgaaagagacagcttgctagcaactgttccagatgagcaggattgtgttactcaagaagtgccagactcccgccaggcagaaactgaagctgaagtgaaaaagaagaagaacaagaagaagaacaaaaaggtgaatggtctgcctcctgaaatagctgctgttcctgagctggcaaaatactgggcccagaggtacaggctcttctcccgttttgatgatgggattaagttggacagagagggctggttttcagttacacccgagaagattgctgaacacattgctggccgtgttagtcagtccttcaagtgtgacgttgtagtagacgcattctgtggagttggaggaaataccattcagtttgccttaacaggaatgagagtgattgccattgatatcgatcctgttaagattgcccttgctcgcaataatgcagaagtttatgggatagcagataagatagagttcatctgtggagatttcttgctgctggcttcttttttaaaggctgatgttgtgttcctcagcccaccttggggagggccagactatgccactgcagagacctttgacattagaacaatgatgtctcctgatggctttgaaattttcagactttctaagaagatcactaataatattgtttattttcttccaagaaatgctgatattgaccaggtggcatccttagctgggcctggagggcaagtggaaatagaacagaacttccttaacaacaaattgaagacaatcactgcatattttggtgacctaattcgaagaccagcctctgaaacctaactatgcagcagtgcgaggacaaaagatcatggagtggtcaaaatattcagatgagacatttggcatgtcttcctttattcactgatattttctacccatggtcttatatcaccgtatgaaatggaaacttacaggacttaaatatcagtgaaatattttgagatctttgaataattcctttagaggaattatacaaaattaatatatatgagtcctttgtaatttatttttttttgagacaggatctcacttttaccgcccaggctggagtgcagtgccatgatcacagctcactgcaggttcagccttctgagttcaagcaatccttctgtctcagtctcctcagtagctggggctttaggtgggcactgccacaccgtactaatttttgtattttttgtagagacgaggtcccaccatgttgcccaggctggtgtcaaactcctgggctcagtcagtccccccatctcaccctccccaagtgctggaattacaggcgtgagctactgtgcccagccttacggacatccttttgaattatctttttcactcatagaatatgaatacatttatttagactttttctagaactttcctgttttcatgtctttgcttcatctggaattggcttaacacccttttataaagtttgtgtttgtaaaatttccattgtgacatcaatacgcaatatattttgtaatataggagtttctatttttttattaaaatggcaatgaaagcaagannnanannn

SEQ ID NO: 281852 - DNA, 3552 bp, Homo sapiens
  misc_feature (3544)..(3546): n is a, c, g, or t
  misc_feature (3548)..(3548): n is a, c, g, or t
  misc_feature (3550)..(3552): n is a, c, g, or t
tgcccgcgaagagactggggattccgaggcggctcctgggagaccggacgcgcgcggcctccgccgctcccagtcccgccagacccgatgccgggctggagaagcgcgggggccgacgcacctcggataggcgggggcaggggcaggggcagctctcctttaccctagagcggcgacagaagctcttcgggggatcagtggccaagggggcggacagatttgcacggcggattcctccgaagcaacccgtgtgaaagaagccaagcggaggctgcagcccgggccgcgatgggggtgacaccgcccgtggtcccgccccttcccgtggcccctcggagccacttccggcggcagcgtccgggctagttcctggcgcgagcggccgcgggccagtttctatctcctcatccagggcttgcgggcgaggcctgttttaagtctccagtaaccgagcggaggcccggcaggcgcgacccgggctgcgtacgtcagagctgcctccgaagtggtaaaatgtgctgcgagaagtggagccgcgtggcggaaatgtttctcttcactgaggagcgggaggattgtaagatactgtgcctttgctccagggcatttgtggaggatcgaaaattgtacaatttgggattaaaaggctattacatcagagacagtggcaacaattcaggagaccaggcgacagaagaagaggaaggtggttattcctgtggtactgcagaatcacatgacagcaaaggcataggcctggatgaaagtgaacttgattctgaggctgaactcatgagaagtatgggattgccacttcaatttggtaggataactgcacataaggattttgaggtatctatgaatactagaaataaagttaaaataaaaaagaaaaaacatcaaaagaaatacttagatgaaattgtgcaagaatcttggagaaaagaatatgaagaagacgacattttggcttcagatgatccatcttcaattgaacagtatgagaacaccagaacatatgaacttcaaagcaaaaaagatactgagacagaaaatcctccagttgaaaacacattatctccaaagctagaaattacagagaaatgggaaaagtattggaatgaatatggaggaggactattgtggcaaagttggcaagaaaaacatccgggtcaagcactatcttctgaaccttggaactttcctgatacaaaggaagaatgggagcaacattatagtcaactttattggtattatttggaacaatttcagtattgggaagctcagggttggacttttgatgcctcgcaaagctgtgatacagatacttacacatctaaaacagaagctgatgacaagaacgatgaaaaatgcatgaaagttgacttagtatcttttccatcttcacctattatggttgataatgatagctctggtacaagtgataaggatcatagtgaaatacttgatggaattagtaacataaaactgaattcagaggaagtaacacagagccaattagattcctgtacaagtcatgatggtcatcaacagctaagtgaagttagtagcaaaagagagtgccctgcttccggccaaagtgaaccacgtaatggaggaaccaatgaggaaagcaactcatcggggaatacaaacacagacccaccagctgaggattcacagaagtcttcaggagcaaacacaagcaaagacagaccacatgccagtggtactgatggagatgaaagtgaggaagacccacctgagcataagccaagcaaactgaagaggagccatgaactggacattgatgaaaacccagcttcagactttgatgacagtggttcccttctaggattcaagtatggctcaggacaaaaatatggtggaatcccaaatttcagtcatcggcaggtcaggtatttagagaagaatgtgaagcttaagtctaagtacctagacatgcgcagacaaataaagatgaaaaacaaacacatcttctttaccaaagagtcagaaaaaccatttttcaagaaaagcaaaattctgagtaaggtagaaaaattcctcacatgggttaataaaccaatggatgaagaagcatcacaggaatcatcttctcatgacaatgtgcacgacgcttccacaagtagtgattcagaggaacaagacatgtctgttaaaaaaggtgatgacctactggagactaataatccagaacctgaaaagtgtcagagcgtatcttcagctggtgaacttgaaacagaaaactatgaaagagacagcttgctagcaactgttccagatgagcaggattgtgttactcaagaagtgccagactcccgccaggcagaaactgaagctgaagtgaaaaagaagaagaacaagaagaagaacaaaaaggtgaatggtctgcctcctgaaatagctgctgttcctgagctggcaaaatactgggcccagaggtacaggctcttctcccgttttgatgatgggattaagttggacagagagggctggttttcagttacacccgagaagattgctgaacacattgctggccgtgttagtcagtccttcaagtgtgacgttgtagtagacgcattctgtggagttggaggaaataccattcagtttgccttaacaggaatgagagaaatgctgatattgaccaggtggcatccttagctgggcctggagggcaagtggaaatagaacagaacttccttaacaacaaattgaagacaatcactgcatattttggtgacctaattcgaagaccagcctctgaaacctaactatgcagcagtgcgaggacaaaagatcatggagtggtcaaaatattcagatgagacatttggcatgtcttcctttattcactgatattttctacccatggtcttatatcaccgtatgaaatggaaacttacaggacttaaatatcagtgaaatattttgagatctttgaataattcctttagaggaattatacaaaattaatatatatgagtcctttgtaatttatttttttttgagacaggatctcacttttaccgcccaggctggagtgcagtgccatgatcacagctcactgcaggttcagccttctgagttcaagcaatccttctgtctcagtctcctcagtagctggggctttaggtgggcactgccacaccgtactaatttttgtattttttgtagagacgaggtcccaccatgttgcccaggctggtgtcaaactcctgggctcagtcagtccccccatctcaccctccccaagtgctggaattacaggcgtgagctactgtgcccagccttacggacatccttttgaattatctttttcactcatagaatatgaatacatttatttagactttttctagaactttcctgttttcatgtctttgcttcatctggaattggcttaacacccttttataaagtttgtgtttgtaaaatttccattgtgacatcaatacgcaatatattttgtaatataggagtttctatttttttattaaaatggcaatgaaagcaagannnanannn

SEQ ID NO: 281853 - DNA, 424 bp, Homo sapiens
ctttgaaattttcagactttctaagaagatcactaataatattgtttattttcttccaagaaatgctgatattgaccaggtaagccattactgaaaaacttccatgagtgtctgtcttaactgttacaagtacggtaaaagatacaggacatatccttaccagagaatgtgtttatgagaagtccctgactcactgactattcttagaaagctggaagtatctggaagttagatccatgtctattacatcgtcttcatttccatagctcctggcatacatagacacaaatagagcactctaggctttgactagacatattgaaaggatgattgaatgtgttgtgcttcaaatgctgcatagttaaactagcctttttttatttgtttcagcctgggcaacaaagtgagactgtctcaaaaaaaa

SEQ ID NO: 281854 - DNA, 3829 bp, Homo sapiens
  misc_feature (3821)..(3823): n is a, c, g, or t
  misc_feature (3825)..(3825): n is a, c, g, or t
  misc_feature (3827)..(3829): n is a, c, g, or t
tgcccgcgaagagactggggattccgaggcggctcctgggagaccggacgcgcgcggcctccgccgctcccagtcccgccagacccgatgccgggctggagaagcgcgggggccgacgcacctcggataggcgggggcaggggcaggggcagctctcctttaccctagagcggcgacagaagctcttcgggggatcagtggccaagggggcggacagatttgcacggcggattcctccgaagcaacccgtgtgaaagaagccaagcggaggctgcagcccgggccgcgatgggggtgacaccgcccgtggtcccgccccttcccgtggcccctcggagccacttccggcggcagcgtccgggctagttcctggcgcgagcggccgcgggccagtttctatctcctcatccagggcttgcgggcgaggcctgttttaagtctccagtaaccgagcggaggcccggcaggcgcgacccgggctgcgtacgtcagagctgcctccgaagtggtaaaatgtgctgcgagaagtggagccgcgtggcggaaatgtttctcttcactgaggagcgggaggattgtaagatactgtgcctttgctccagggcatttgtggaggatcgaaaattgtacaatttgggattaaaaggctattacatcagagacagtggcaacaattcaggagaccaggcgacagaagaagaggaaggtggttattcctgtggtactgcagaatcacatgacagcaaaggcataggcctggatgaaagtgaacttgattctgaggctgaactcatgagaagtatgggattgccacttcaatttggtaggataactgcacataaggattttgaggtatctatgaatactagaaataaagttaaaataaaaaagaaaaaacatcaaaagaaatacttagatgaaattgtgcaagaatcttggagaaaagaatatgaagaagacgacattttggcttcagatgatccatcttcaattgaacagtatgagaacaccagaacatatgaacttcaaagcaaaaaagatactgagacagaaaatcctccagttgaaaacacattatctccaaagctagaaattacagagaaatgggaaaagtattggaatgaatatggaggaggactattgtggcaaagttggcaagaaaaacatccgggtcaagcactatcttctgaaccttggaactttcctgatacaaaggaagaatgggagcaacattatagtcaactttattggtattatttggaacaatttcagtattgggaagctcagggttggacttttgatgcctcgcaaagctgtgatacagatacttacacatctaaaacagaagctgatgacaagaacgatgaaaaatgcatgaaagttgacttagtatcttttccatcttcacctattatggttgataatgatagctctggtacaagtgataaggatcatagtgaaatacttgatggaattagtaacataaaactgaattcagaggaagtaacacagagccaattagattcctgtacaagtcatgatggtcatcaacagctaagtgaagttagtagcaaaagagagtgccctgcttccggccaaagtgaaccacgtaatggaggaaccaatgaggaaagcaactcatcggggaatacaaacacagacccaccagctgaggattcacagaagtcttcaggagcaaacacaagcaaagacagaccacatgccagtggtactgatggagatgaaagtgaggaagacccacctgagcataagccaagcaaactgaagaggagccatgaactggacattgatgaaaacccagcttcagactttgatgacagtggttcccttctaggattcaagtatggctcaggacaaaaatatggtggaatcccaaatttcagtcatcggcaggtcaggtatttagagaagaatgtgaagcttaagtctaagtacctagacatgcgcagacaaataaagatgaaaaacaaacacatcttctttaccaaagagtcagaaaaaccatttttcaagaaaagcaaaattctgagtaaggtagaaaaattcctcacatgggttaataaaccaatggatgaagaagcatcacaggaatcatcttctcatgacaatgtgcacgacgcttccacaagtagtgattcagaggaacaagacatgtctgttaaaaaaggtgatgacctactggagactaataatccagaacctgaaaagtgtcagagcgtatcttcagctggtgaacttgaaacagaaaactatgaaagagacagcttgctagcaactgttccagatgagcaggattgtgttactcaagaagtgccagactcccgccaggcagaaactgaagctgaagtgaaaaagaagaagaacaagaagaagaacaaaaaggtgaatggtctgcctcctgaaatagctgctgttcctgagctggcaaaatactgggcccagaggtacaggctcttctcccgttttgatgatgggattaagttggacagagagggctggttttcagttacacccgagaagattgctgaacacattgctggccgtgttagtcagtccttcaagtgtgacgttgtagtagacgcattctgtggagttggaggaaataccattcagtttgccttaacaggaatgagagtgattgccattgatatcgatcctgttaagattgcccttgctcgcaataatgcagaagtttatgggatagcagataagatagagttcatctgtggagatttcttgctgctggcttcttttttaaaggctgatgttgtgttcctcagcccaccttggggagggccagactatgccactgcagagacctttgacattagaacaatgatgtctcctgatggctttgaaattttcagactttctaagaagatcactaataatattgtttattttcttccaagaaatgctgatattgaccaggtggcatccttagctgggcctggagggcaagtggaaatagaacagaacttccttaacaacaaattgaagacaatcactgcatattttggtgacctaattcgaagaccagcctctgaaacctaactatgcagcagtgcgaggacaaaagatcatggagtggtcaaaatattcagatgagacatttggcatgtcttcctttattcactgatattttctacccatggtcttatatcaccgtatgaaatggaaacttacaggacttaaatatcagtgaaatattttgagatctttgaataattcctttagaggaattatacaaaattaatatatatgagtcctttgtaatttatttttttttgagacaggatctcacttttaccgcccaggctggagtgcagtgccatgatcacagctcactgcaggttcagccttctgagttcaagcaatccttctgtctcagtctcctcagtagctggggctttaggtgggcactgccacaccgtactaatttttgtattttttgtagagacgaggtcccaccatgttgcccaggctggtgtcaaactcctgggctcagtcagtccccccatctcaccctccccaagtgctggaattacaggcgtgagctactgtgcccagccttacggacatccttttgaattatctttttcactcatagaatatgaatacatttatttagactttttctagaactttcctgttttcatgtctttgcttcatctggaattggcttaacacccttttataaagtttgtgtttgtaaaatttccattgtgacatcaatacgcaatatattttgtaatataggagtttctatttttttattaaaatggcaatgaaagcaagannnanannn

SEQ ID NO: 281855 - DNA, 3176 bp, Homo sapiens
  misc_feature (3168)..(3170): n is a, c, g, or t
  misc_feature (3172)..(3172): n is a, c, g, or t
  misc_feature (3174)..(3176): n is a, c, g, or t
aattcgcggccgcgtcgactacggccgagaccaggcgacagaagaagaggaaggtggttattcctgtggtactgcagaatcacatgacagcaaaggcataggcctggatgaaagtgaacttgattctgaggctgaactcatgagaagtatgggattgccacttcaatttggtaggataactgcacataaggattttgaggtatctatgaatactagaaataaagttaaaataaaaaagaaaaaacatcaaaagaaatacttagatgaaattgtgcaagaatcttggagaaaagaatatgaagaagacgacattttggcttcagatgatccatcttcaattgaacagtatgagaacaccagaacatatgaacttcaaagcaaaaaagatactgagacagaaaatcctccagttgaaaacacattatctccaaagctagaaattacagagaaatgggaaaagtattggaatgaatatggaggaggactattgtggcaaagttggcaagaaaaacatccgggtcaagcactatcttctgaaccttggaactttcctgatacaaaggaagaatgggagcaacattatagtcaactttattggtattatttggaacaatttcagtattgggaagctcagggttggacttttgatgcctcgcaaagctgtgatacagatacttacacatctaaaacagaagctgatgacaagaacgatgaaaaatgcatgaaagttgacttagtatcttttccatcttcacctattatggttgataatgatagctctggtacaagtgataaggatcatagtgaaatacttgatggaattagtaacataaaactgaattcagaggaagtaacacagagccaattagattcctgtacaagtcatgatggtcatcaacagctaagtgaagttagtagcaaaagagagtgccctgcttccggccaaagtgaaccacgtaatggaggaaccaatgaggaaagcaactcatcggggaatacaaacacagacccaccagctgaggattcacagaagtcttcaggagcaaacacaagcaaagacagaccacatgccagtggtactgatggagatgaaagtgaggaagacccacctgagcataagccaagcaaactgaagaggagccatgaactggacattgatgaaaacccagcttcagactttgatgacagtggttcccttctaggattcaagtatggctcaggacaaaaatatggtggaatcccaaatttcagtcatcggcaggtcaggtatttagagaagaatgtgaagcttaagtctaagtacctagacatgcgcagacaaataaagatgaaaaacaaacacatcttctttaccaaagagtcagaaaaaccatttttcaagaaaagcaaaattctgagtaaggtagaaaaattcctcacatgggttaataaaccaatggatgaagaagcatcacaggaatcatcttctcatgacaatgtgcacgacgcttccacaagtagtgattcagaggaacaagacatgtctgttaaaaaaggtgatgacctactggagactaataatccagaacctgaaaagtgtcagagcgtatcttcagctggtgaacttgaaacagaaaactatgaaagagacagcttgctagcaactgttccagatgagcaggattgtgttactcaagaagtgccagactcccgccaggcagaaactgaagctgaagtgaaaaagaagaagaacaagaagaagaacaaaaaggtgaatggtctgcctcctgaaatagctgctgttcctgagctggcaaaatactgggcccagaggtacaggctcttctcccgttttgatgatgggattaagttggacagagagggctggttttcagttacacccgagaagattgctgaacacattgctggccgtgttagtcagtccttcaagtgtgacgttgtagtagacgcattctgtggagttggaggaaataccattcagtttgccttaacaggaatgagagtgattgccattgatatcgatcctgttaagattgcccttgctcgcaataatgcagaagtttatgggatagcagataagatagagttcatctgtggagatttcttgctgctggcttcttttttaaaggctgatgttgtgttcctcagcccaccttggggagggccagactatgccactgcagagacctttgacattagaacaatgatgtctcctgatggctttgaaattttcagactttctaagaagatcactaataatattgtttattttcttccaagaaatgctgatattgaccaggtggcatccttagctgggcctggagggcaagtggaaatagaacagaacttccttaacaacaaattgaagacaatcactgcatattttggtgacctaattcgaagaccagcctctgaaacctaactatgcagcagtgcgaggacaaaagatcatggagtggtcaaaatattcagatgagacatttggcatgtcttcctttattcactgatattttctacccatggtcttatatcaccgtatgaaatggaaacttacaggacttaaatatcagtgaaatattttgagatctttgaataattcctttagaggaattatacaaaattaatatatatgagtcctttgtaatttatttttttttgagacaggatctcacttttaccgcccaggctggagtgcagtgccatgatcacagctcactgcaggttcagccttctgagttcaagcaatccttctgtctcagtctcctcagtagctggggctttaggtgggcactgccacaccgtactaatttttgtattttttgtagagacgaggtcccaccatgttgcccaggctggtgtcaaactcctgggctcagtcagtccccccatctcaccctccccaagtgctggaattacaggcgtgagctactgtgcccagccttacggacatccttttgaattatctttttcactcatagaatatgaatacatttatttagactttttctagaactttcctgttttcatgtctttgcttcatctggaattggcttaacacccttttataaagtttgtgtttgtaaaatttccattgtgacatcaatacgcaatatattttgtaatataggagtttctatttttttattaaaatggcaatgaaagcaagannnanannn

SEQ ID NO: 281856 - DNA, 711 bp, Homo sapiens
ttctatctcctcatccagggcttgcgggcgaggcctgttttaagtctccagtaaccgagcggaggcccggcaggcgcgacccgggctgcgtacgtcagagctgcctccgaagtggtaaaatgtgctgcgagaagtggagccgcgtggcggaaatgtttctcttcactgaggagcgggaggattgtaagatactgtgcctttgctccagggcatttgtggagtaagtagaaaagagaatctcttcatgttctagcacagtcattacccagaaatgtaggtattgcaaacgtggttgtaattgatccctgaaagcagccagaacatctgacccttgggcacggtgatgtttaagaaaaacaaaaccctcagacatgacggagtggtcgcccactgccattatttttatgtgaaggactacatctacttggtaggctgctatgaaaaaatgtcgtaggtgctatatgtcatctcatatttgtaaatcgaggggacatttaaaaattgggggaaagcgacatgtaaaatgaaatctctagtagatatgatgtcataaagtgaaagtttaaagttgagtgacttgctttggttaacgtctttttttaaacctaaaaatctacttaagcccaaatgcacataattaaaacttcaaactagttgagataaaagacttaaccatatttacatcagtttttgtgatatctttattttggg

SEQ ID NO: 281857 - DNA, 3574 bp, Homo sapiens
gcggcggcggcgctgagccgggcccgggtgtgggggcgcctatatccccagcccaagctgcaggaagccgcgccgcttcctcggaggggctgggacggcggcggccacgtggggggcgggggcgacgctcggggcccgcggctggagggggagtcgctgcctcacccgcgcctggcgcccgcggctccctccgcctcgccggcgttggcccaccctctcgtagctcaccccgcgaggctggacagctcccggaaccccggaaccgggatctatttcgggggctcggctgcgtggcgcccaggactctccagggtctcccaggatcgctccccgaattcgagtcgccccctctctctttcgggaataccagctgatgtcagtccgccagccaaaaccagggaggagaagcgggagccagccctctggagtcgggagaaggtctggggagtggggtagaggggaaagcaaagtccaaataccttcccttcagacacctcctggggcctagaccccacaaacctgttgtggggagggcaaaatacgatgactacgttcccaggaagaaggtgccacagctcttcaggaccacggttgggagaaagaatggaggggttttagaaccttcagtgtgcgacttcatgtgccagtcttcatctcaggatctcaagctcttggatcatgggcacggataacctgttgtcctcctctatggtcaagaggctgcttttgcaaagaatccagtgggagagagtcaatggcctgcttgacgtgaactccaaagtcctcctggccaagggtcatcctgcctggagcagggcaagaggtgacttgacccttaggaagagtggcatctctaatcttcaacttccaccaccaccacacacacaaatgcagagccacccaggaggaagtaaaaagtgctagggccttctacaccttgaaattatatgtggagcatcctgcaataagcatctctgtgatgcacagtcattcacacctgctggtctctcccccagctgtctgcaaaatgaagagcagagcacaagagaacatgtgagaaagaggcagggtcggggaagccagaagtcctggctggcaggggctgatccttcctaactagagagaggagacacacttcttgagagggcagggagatagcagggagaactagaggagctatagccagggagccagctaagggagggaagacaaaggagtggagacacaactactccatctctccccagcctcctcatctccagaatgatggcacacctgggaggggcctgactacctttcagggggaaaaatggtcactgggcctggtgcggtggctcatgcctgtcatcccagcactttgggaggccaaggtgggtggataacctgaggtcaggagttcgagaccagccagaacaacatggtgaaaccccatctctactaaaaatacaaaaatttgctgggcgtggtggtgcctgcctgtaatccagctacttaggaggctgaggcaggaaaatcgcttgaacccgaaaggcagaggttgcagtgtgccgagattaagccactgaactccagcctgggcaacaagagtgaaactctgtctgaaggaaaaaaaaaaaagccattggagaagacggggtccttccagagaagctgatcaagtcatattactcatcaactgctggggacctaacagtcactaccatgtattgaacacttactatgggctgcataatgtgcctactgacgcatgtgctgaaagctttgcatgtatgtcttaaagccacaccactataacatcagaattatcttctccatgtgtgaaatggggaaacaggaggagaaagtttacaatcccagagctagtaattggcagagccaggatttaaacccaggatatcttgatgctaaagttcatgtcttaaccattatgatttatcacctcctctcactgcagatcagaataccaatttcttactgggtctggaaaggaggagagaaggatagagagtttcttctaggaccaaattgattcctccacaaataggaagatccccagactgtgtgcacacaccctcctcctccttccttctccaaccctggctggaccatgacatcacatggtggaggctgttttttaaaaagaactcaggccagatttacaagaatgatgctcaggcagcgtgactgtcaaggaccgtggccaagtgacccatagcacacacccagcagtgctgagaacatagctagtcccttagcacctggggctgactcatggttgctgtaggacccaatgccagatgccaggattgctttctccctccattcattaggactgtcccatgaaaccctccccaggaacccttctaccccatcccggcatgccaggagcctggatactgcataacacagggtactcatatttgtttaccaagccttgaagatgacaggcaatatgctgatatgctcaatgcatcatacaaattgttttatttaaaactgaactattaaattaagtatcatagcaactcactttacagacaaggaaactgaagctcaaaggttaagtaagggccaggcatggtggctcactcctgtaatcccagcagtttgggaggctgaggtgggaggaggattgcttaagcccgcgagtttgagaccagcctaggcaatatagggagaccccatctctacaaaaaattatctgggcctggtgatgtgtgcctgtagtcccagctacttgagaggctgaggtgggaggattgcttgagcccagaagttgaggctgcagtgagccatgatcatgccattgtactccagcctgggcagcaaagcaaaaccctgtattgaaaacaaacaaacaggctgggcacggtggctcacacctgtaatcccaacactttgggaggccgaggcaggtggatcacctgaggtcaggagttagagaccagcctggccaacatggtgaaacccgcctctactgaaaatacaaaaattagcagggcattgtggcacatgccaaggtgggcagatcacctgaggtcaggagttcgagaccagcctggccaacatggtgaaaccccatctctactaaaaatacaaaaattagctgggcgtggtggtgggcgcctgtagtcccagctactcaggaggctgaggcaggagaatcgcttgaacctgggaggtggaggttgcagtaagccaagatagtgccactgcactccagcctgggcgacagacaaaaaaaaaaaaaaaaagaagttggagcagtgtgaagaagaggtgagaacaacccccggactgatcaaagcccacatgccactgcatcccgcgtccagcgcctacatcctgccaccgtcgctgccaccaccatgcccaagagaaaggctaaaggggatgctaaaggagacaaagccaaggtgaaggacgaaccatagagaagatccacaaggttgtctgctaaacctgctcctccaaagccacagcccaagcctaaaaaggcccctgcaaagaagggagagaagatacccaaagggaaaaagggaaaagctgatgctggcaaggaggggaataaccc

SEQ ID NO: 281858 - DNA, 2288 bp, Homo sapiens
gcggcggcggcgctgagccgggcccgggtgtgggggcgcctatatccccagcccaagctgcaggaagccgcgccgcttcctcggaggggctgggacggcggcggccacgtggggggcgggggcgacgctcggggcccgcggctggagggggagtcgctgcctcacccgcgcctggcgcccgcggctccctccgcctcgccggcgttggcccaccctctcgtagctcaccccgcgaggctggacagctcccggaaccccggaaccgggatctatttcgggggctcggctgcgtggcgcccaggactctccagggtctcccaggatcgctccccgaattcgagtcgccccctctctctttcgggaataccagctgatgtcagtccgccagccaaaaccagggaggagaagcgggagccagccctctggagtcgggagaaggaagaaggtgccacagctcttcaggaccacggttgggagaaagaatggaggggttttagaaccttcagtgtgcgacttcatgtgccagtcttcatctcaggatctcaagctcttggatcatgggcacggataacctgttgtcctcctctatggtcaagaggctgcttttgcaaagaatccagtgggagagagtcaatggcctgcttgacgtgaactccaaagtcctcctgatcagaataccaatttcttactgggtctggaaaggaggagagaaggatagagagtttcttctaggaccaaattgattcctccacaaataggaagatccccagactgtgtgcacacaccctcctcctccttccttctccaaccctggctggaccatgacatcacatggtggaggctgttttttaaaaagaactcaggccagatttacaagaatgatgctcaggcagcgtgactgtcaaggaccgtggccaagtgacccatagcacacacccagcagtgctgagaacatagctagtcccttagcacctggggctgactcatggttgctgtaggacccaatgccagatgccaggattgctttctccctccattcattaggactgtcccatgaaaccctccccaggaacccttctaccccatcccggcatgccaggagcctggatactgcataacacagggtactcatatttgtttaccaagccttgaagatgacaggcaatatgctgatatgctcaatgcatcatacaaattgttttatttaaaactgaactattaaattaagtatcatagcaactcactttacagacaaggaaactgaagctcaaaggttaagtaagggccaggcatggtggctcactcctgtaatcccagcagtttgggaggctgaggtgggaggaggattgcttaagcccgcgagtttgagaccagcctaggcaatatagggagaccccatctctacaaaaaattatctgggcctggtgatgtgtgcctgtagtcccagctacttgagaggctgaggtgggaggattgcttgagcccagaagttgaggctgcagtgagccatgatcatgccattgtactccagcctgggcagcaaagcaaaaccctgtattgaaaacaaacaaacaggctgggcacggtggctcacacctgtaatcccaacactttgggaggccgaggcaggtggatcacctgaggtcaggagttagagaccagcctggccaacatggtgaaacccgcctctactgaaaatacaaaaattagcagggcattgtggcacatgccaaggtgggcagatcacctgaggtcaggagttcgagaccagcctggccaacatggtgaaaccccatctctactaaaaatacaaaaattagctgggcgtggtggtgggcgcctgtagtcccagctactcaggaggctgaggcaggagaatcgcttgaacctgggaggtggaggttgcagtaagccaagatagtgccactgcactccagcctgggcgacagacaaaaaaaaaaaaaaaaagaagttggagcagtgtgaagaagaggtgagaacaacccccggactgatcaaagcccacatgccactgcatcccgcgtccagcgcctacatcctgccaccgtcgctgccaccaccatgcccaagagaaaggctaaaggggatgctaaaggagacaaagccaaggtgaaggacgaaccatagagaagatccacaaggttgtctgctaaacctgctcctccaaagccacagcccaagcctaaaaaggcccctgcaaagaagggagagaagatacccaaagggaaaaagggaaaagctgatgctggcaaggaggggaataaccc

SEQ ID NO: 281859 - DNA, 2456 bp, Homo sapiens
gcggcggcggcgctgagccgggcccgggtgtgggggcgcctatatccccagcccaagctgcaggaagccgcgccgcttcctcggaggggctgggacggcggcggccacgtggggggcgggggcgacgctcggggcccgcggctggagggggagtcgctgcctcacccgcgcctggcgcccgcggctccctccgcctcgccggcgttggcccaccctctcgtagctcaccccgcgaggctggacagctcccggaaccccggaaccgggatctatttcgggggctcggctgcgtggcgcccaggactctccagggtctcccaggatcgctccccgaattcgagtcgccccctctctctttcgggtctggaggggtcggcaagctgctctcccagacgtggagaagagggagggggctgggagctccagcggcctctcgacgccgctgcttctaaggggctgtcctgggttgtgggggaaggggcgcctggagctgagccacgcagctcagggttccttatcctatccctaggaataccagctgatgtcagtccgccagccaaaaccagggaggagaagcgggagccagccctctggagtcgggagaaggaagaaggtgccacagctcttcaggaccacggttgggagaaagaatggaggggttttagaaccttcagtgtgcgacttcatgtgccagtcttcatctcaggatctcaagctcttggatcatgggcacggataacctgttgtcctcctctatggtcaagaggctgcttttgcaaagaatccagtgggagagagtcaatggcctgcttgacgtgaactccaaagtcctcctgatcagaataccaatttcttactgggtctggaaaggaggagagaaggatagagagtttcttctaggaccaaattgattcctccacaaataggaagatccccagactgtgtgcacacaccctcctcctccttccttctccaaccctggctggaccatgacatcacatggtggaggctgttttttaaaaagaactcaggccagatttacaagaatgatgctcaggcagcgtgactgtcaaggaccgtggccaagtgacccatagcacacacccagcagtgctgagaacatagctagtcccttagcacctggggctgactcatggttgctgtaggacccaatgccagatgccaggattgctttctccctccattcattaggactgtcccatgaaaccctccccaggaacccttctaccccatcccggcatgccaggagcctggatactgcataacacagggtactcatatttgtttaccaagccttgaagatgacaggcaatatgctgatatgctcaatgcatcatacaaattgttttatttaaaactgaactattaaattaagtatcatagcaactcactttacagacaaggaaactgaagctcaaaggttaagtaagggccaggcatggtggctcactcctgtaatcccagcagtttgggaggctgaggtgggaggaggattgcttaagcccgcgagtttgagaccagcctaggcaatatagggagaccccatctctacaaaaaattatctgggcctggtgatgtgtgcctgtagtcccagctacttgagaggctgaggtgggaggattgcttgagcccagaagttgaggctgcagtgagccatgatcatgccattgtactccagcctgggcagcaaagcaaaaccctgtattgaaaacaaacaaacaggctgggcacggtggctcacacctgtaatcccaacactttgggaggccgaggcaggtggatcacctgaggtcaggagttagagaccagcctggccaacatggtgaaacccgcctctactgaaaatacaaaaattagcagggcattgtggcacatgccaaggtgggcagatcacctgaggtcaggagttcgagaccagcctggccaacatggtgaaaccccatctctactaaaaatacaaaaattagctgggcgtggtggtgggcgcctgtagtcccagctactcaggaggctgaggcaggagaatcgcttgaacctgggaggtggaggttgcagtaagccaagatagtgccactgcactccagcctgggcgacagacaaaaaaaaaaaaaaaaagaagttggagcagtgtgaagaagaggtgagaacaacccccggactgatcaaagcccacatgccactgcatcccgcgtccagcgcctacatcctgccaccgtcgctgccaccaccatgcccaagagaaaggctaaaggggatgctaaaggagacaaagccaaggtgaaggacgaaccatagagaagatccacaaggttgtctgctaaacctgctcctccaaagccacagcccaagcctaaaaaggcccctgcaaagaagggagagaagatacccaaagggaaaaagggaaaagctgatgctggcaaggaggggaataaccc

SEQ ID NO: 281860 - DNA, 839 bp, Homo sapiens
  misc_feature (11)..(11): n is a, c, g, or t
  misc_feature (660)..(660): n is a, c, g, or t
  misc_feature (668)..(669): n is a, c, g, or t
  misc_feature (688)..(688): n is a, c, g, or t
ctatacgggcntaagtacaggctcggtggctttcgtagggttagcgaaattgaggtttcttggtattgcgcgtttctcttccttgctgactctccgaatggccatggactcgtcgcttcaggcccgcctgtttcccggtctcgctatcaagatccaacgcagtaatggtttaattcacagtgccaatgtaaggactgtgaacttggagaaatcctgtgtttcagtggaatgggcagaaggaggtgccacaaagggcaaagagattgattttgatgatgtggctgcaataaacccagaactcttacagcttcttcccttacatccgaaggacaatctgcccttgcaggaaaatgtaacaatccagaaacaaaaacggagatccgtcaactccaaaattcctgctccaaaagaaagtcttcgaagccgctccactcgcatgtccactgtctcagagcttcgcatcacggctcaggagaatgacatggaggtggagctgcctgcagctgcaaactcccgcaagcagttttcagttcctcctgcccccactaggccttcctgccctgcagtggctgaaataccattgaggatggtcagcgaggagatggaagagcaagtccattccatccgaggcagctcttctgcaaaccctgtgaactcagntcggaggnnatcatgtcttgtgacggangtggcacaatgagacaatgggaaggaagagcccgaaaccgtattgattaaagcccagagttacacagttccaatgggttgccccgttaaacaccggcacactagagtgccctaaggacttaagcaatgttgtggaccctcaatgaaagttt

SEQ ID NO: 281861 - DNA, 788 bp, Homo sapiens
ggcaggaagccgtaactggggaagtttctgggcccagaagaaaatgtaggtagtcttagggttaggtagcagctgtcaggaacttgcccctgcccataagatcctaaagggcccccatttgactctcaccagacagttagaacttgtttcctcctccgtgtcagccatcaagaggtgcttggggggctgtgcccagcaggacctcactgcccagcagatcagcaggggagccaagtggcctagatctgctgtggagtacccgactgtttgcctgcctgtctgccctcctcttcacctcattctcatcactgacgtctaccattggcttggaaatcagaaacccatatccatctagatgattgattttgatgatgtggctgcaataaacccagaactcttacagcttcttcccttacatccgaaggacaatctgcccttgcaggaaaatgtaacaatccagaaacaaaaacggagatccgtcaactccaaaattcctgctccaaaagaaagaatatgggaagttggcgagcccctttcctggtagctgggacctatttcaccttgtacagaaacttggaggtttgcccctgaccaccctcgagatcgtgcagcactgactggctactgctctcggttctccaggtcttcgaagccgctccactcgcatgtccactgtctcagagcttcgcatcacggctcaggagaatgacatggaggtggagctgcctgcagctgcaaactcccgcaagcagttttcagttcctcgtgagtaacgaatgtgcccccaa

SEQ ID NO: 281862 - DNA, 2885 bp, Homo sapiens
aggacgcttgcgcgcgggatttaaactgcggcggtttacgcggcgttaagacttcgtagggttagcgaaattgaggtttcttggtattgcgcgtttctcttccttgctgactctccgaatggccatggactcgtcgcttcaggcccgcctgtttcccggtctcgctatcaagatccaacgcagtaatggtttaattcacagtgccaatgtaaggactgtgaacttggagaaatcctgtgtttcagtggaatgggcagaaggaggtgccacaaagggcaaagagattgattttgatgatgtggctgcaataaacccagaactcttacagcttcttcccttacatccgaaggacaatctgcccttgcaggaaaatgtaacaatccagaaacaaaaacggagatccgtcaactccaaaattcctgctccaaaagaaagtcttcgaagccgctccactcgcatgtccactgtctcagagcttcgcatcacggctcaggagaatgacatggaggtggagctgcctgcagctgcaaactcccgcaagcagttttcagttcctcctgcccccactaggccttcctgccctgcagtggctgaaataccattgaggatggtcagcgaggagatggaagagcaagtccattccatccgaggcagctcttctgcaaaccctgtgaactcagttcggaggaaatcatgtcttgtgaaggaagtggaaaaaatgaagaacaagcgagaagagaagaaggcccagaactctgaaatgagaatgaagagagctcaggagtatgacagtagttttccaaactgggaatttgcccgaatgattaaagaatttcgggctactttggaatgtcatccacttactatgactgatcctatcgaagagcacagaatatgtgtctgtgttaggaaacgcccactgaataagcaagaattggccaagaaagaaattgatgtgatttccattcctagcaagtgtctcctcttggtacatgaacccaagttgaaagtggacttaacaaagtatctggagaaccaagcattctgctttgactttgcatttgatgaaacagcttcgaatgaagttgtctacaggttcacagcaaggccactggtacagacaatctttgaaggtggaaaagcaacttgttttgcatatggccagacaggaagtggcaagacacatactatgggcggagacctctctgggaaagcccagaatgcatccaaagggatctatgccatggcctcccgggacgtcttcctcctgaagaatcaaccctgctaccggaagttgggcctggaagtctatgtgacattcttcgagatctacaatgggaagctgtttgacctgctcaacaagaaggccaagctgcgcgtgctggaggacggcaagcaacaggtgcaagtggtggggctgcaggagcatctggttaactctgctgatgatgtcatcaagatgatcgacatgggcagcgcctgcagaacctctgggcagacatttgccaactccaattcctcccgctcccacgcgtgcttccaaattattcttcgagctaaagggagaatgcatggcaagttctctttggtagatctggcagggaatgagcgaggcgcggacacttccagtgctgaccggcagacccgcatggagggcgcagaaatcaacaagagtctcttagccctgaaggagtgcatcagggccctgggacagaacaaggctcacaccccgttccgtgagagcaagctgacacaggtgctgagggactccttcattggggagaactctaggacttgcatgattgccacgatctcaccaggcataagctcctgtgaatatactttaaacaccctgagatatgcagacagggtcaaggagctgagcccccacagtgggcccagtggagagcagttgattcaaatggaaacagaagagatggaagcctgctctaacggggcgctgattccaggcaatttatccaaggaagaggaggaactgtcttcccagatgtccagctttaacgaagccatgactcagatcagggagctggaggagaaggctatggaagagctcaaggagatcatacagcaaggaccagactggcttgagctctctgagatgaccgagcagccagactatgacctggagacctttgtgaacaaagcggaatctgctctggcccagcaagccaagcatttctcagccctgcgagatgtcatcaaggccttgcgcctggccatgcagctggaagagcaggctagcagacaaataagcagcaagaaacggccccagtgacgactgcaaataaaaatctgtttggtttgacacccagcctcttccctggccctccccagagaactttgggtacctggtgggtctaggcagggtctgagctgggacaggttctggtaaatgccaagtatgggggcatctgggcccagggcagctggggagggggtcagagtgacatgggacactccttttctgttcctcagttgtcgccctcacgagaggaaggagctcttagttacccttttgtgttgcccttctttccatcaaggggaatgttctcagcatagagctttctccgcagcatcctgcctgcgtggactggctgctaatggagagctccctggggttgtcctggctctggggagagagacggagcctttagtacagctatctgctggctctaaaccttctacgcctttgggccgagcactgaatgtcttgtactttaaaaaaatgtttctgagacctctttctactttactgtctccctagagatcctagaggatccctactgttttctgttttatgtgtttatacattgtatgtaacaataaagagaaaaaataaatcagctgtttaagtgtgtggaaag

SEQ ID NO: 281863 - DNA, 2846 bp, Homo sapiens
aggacgcttgcgcgcgggatttaaactgcggcggtttacgcggcgttaagacttcgtagggttagcgaaattgaggtttcttggtattgcgcgtttctcttccttgctgactctccgaatggccatggactcgtcgcttcaggcccgcctgtttcccggtctcgctatcaagatccaacgcagtaatggtttaattcacagtgccaatgtaaggactgtgaacttggagaaatcctgtgtttcagtggaatgggcagaaggaggtgccacaaagggcaaagagattgattttgatgatgtggctgcaataaacccagaactcttacagcttcttcccttacatccgaaggacaatctgcccttgcaggaaaatgtaacaatccagaaacaaaaacggagatccgtcaactccaaaattcctgctccaaaagaaagtcttcgaagccgctccactcgcatgtccactgtctcagagcttcgcatcacggctcaggagaatgacatggaggtggagctgcctgcagctgcaaactcccgcaagcagttttcagttcctcctgcccccactaggccttcctgccctgcagtggctgaaataccattgaggatggtcagcgaggagatggaagagcaagtccattccatccgaggcagctcttctgcaaaccctgtgaactcagttcggaggaaatcatgtcttgtgaaggaagtggaaaaaatgaagaacaagcgagaagagaagaaggcccagaactctgaaatgagaatgaagagagctcaggagtatgacagtagttttccaaactgggaatttgcccgaatgattaaagaatttcgggctactttggaatgtcatccacttactatgactgatcctatcgaagagcacagaatatgtgtctgtgttaggaaacgcccactgaataagcaagaattggccaagaaagaaattgatgtgatttccattcctagcaagtgtctcctcttggtacatgaacccaagttgaaagtggacttaacaaagtatctggagaaccaagcattctgctttgactttgcatttgatgaaacagcttcgaatgaagttgtctacaggttcacagcaaggccactggtacagacaatctttgaaggtggaaaagcaacttgttttgcatatggccagacaggaagtggcaagacacatactatgggcggagacctctctgggaaagcccagaatgcatccaaagggatctatgccatggcctcccgggacgtcttcctcctgaagaatcaaccctgctaccggaagttgggcctggaagtctatgtgacattcttcgagatctacaatgggaagctgtttgacctgctcaacaagaaggccaagctgcgcgtgctggaggacggcaagcaacaggtgcaagtggtggggctgcaggagcatctggttaactctgctgatgatgtcatcaagatgatcgacatgggcagcgcctgcagaacctctgggcagacatttgccaactccaattcctcccgctcccacgcgtgcttccaaattattcttcgagctaaagggagaatgcatggcaagttctctttggtagatctggcagggaatgagcgaggcgcggacacttccagtgctgaccggcagacccgcatggagggcgcagaaatcaacaagagtctcttagccctgaaggagtgcatcagggccctgggacagaacaaggctcacaccccgttccgtgagagcaagctgacacaggtgctgagggactccttcattggggagaactctaggacttgcatgattgccacgatctcaccaggcataagctcctgtgaatatactttaaacaccctgagatatgcagacaggcaaggttgccattccatccccttggagcctcaagcctcgaagcctgggcggtgccacattcctctgttatccaaggaagaggaggaactgtcttcccagatgtccagctttaacgaagccatgactcagatcagggagctggaggagaaggctatggaagagctcaaggagatcatacagcaaggaccagactggcttgagctctctgagatgaccgagcagccagactatgacctggagacctttgtgaacaaagcggaatctgctctggcccagcaagccaagcatttctcagccctgcgagatgtcatcaaggccttgcgcctggccatgcagctggaagagcaggctagcagacaaataagcagcaagaaacggccccagtgacgactgcaaataaaaatctgtttggtttgacacccagcctcttccctggccctccccagagaactttgggtacctggtgggtctaggcagggtctgagctgggacaggttctggtaaatgccaagtatgggggcatctgggcccagggcagctggggagggggtcagagtgacatgggacactccttttctgttcctcagttgtcgccctcacgagaggaaggagctcttagttacccttttgtgttgcccttctttccatcaaggggaatgttctcagcatagagctttctccgcagcatcctgcctgcgtggactggctgctaatggagagctccctggggttgtcctggctctggggagagagacggagcctttagtacagctatctgctggctctaaaccttctacgcctttgggccgagcactgaatgtcttgtactttaaaaaaatgtttctgagacctctttctactttactgtctccctagagatcctagaggatccctactgttttctgttttatgtgtttatacattgtatgtaacaataaagagaaaaaataaatcagctgtttaagtgtgtggaaag

SEQ ID NO: 281864 - DNA, 2864 bp, Homo sapiens
ggcaggaagccgtaactggggaagtttctgggcccagaagaaaatgtaggtagtcttagggttaggtagcagctgtcaggaacttgcccctgcccataagatcctaaagggcccccatttgactctcaccagacagttagaacttgtttcctcctccgtgtcagccatcaagaggtgcttggggggctgtgcccagcaggacctcactgcccagcagatcagcaggggagccaagtggcctagatctgctgtggagtacccgactgtttgcctgcctgtctgccctcctcttcacctcattctcatcactgacgtctaccattggcttggaaatcagaaacccatatccatctagatgattgattttgatgatgtggctgcaataaacccagaactcttacagcttcttcccttacatccgaaggacaatctgcccttgcaggaaaatgtaacaatccagaaacaaaaacggagatccgtcaactccaaaattcctgctccaaaagaaagtcttcgaagccgctccactcgcatgtccactgtctcagagcttcgcatcacggctcaggagaatgacatggaggtggagctgcctgcagctgcaaactcccgcaagcagttttcagttcctcctgcccccactaggccttcctgccctgcagtggctgaaataccattgaggatggtcagcgaggagatggaagagcaagtccattccatccgaggcagctcttctgcaaaccctgtgaactcagttcggaggaaatcatgtcttgtgaaggaagtggaaaaaatgaagaacaagcgagaagagaagaaggcccagaactctgaaatgagaatgaagagagctcagatcgaagagcacagaatatgtgtctgtgttaggaaacgcccactgaataagcaagaattggccaagaaagaaattgatgtgatttccattcctagcaagtgtctcctcttggtacatgaacccaagttgaaagtggacttaacaaagtatctggagaaccaagcattctgctttgactttgcatttgatgaaacagcttcgaatgaagttgtctacaggttcacagcaaggccactggtacagacaatctttgaaggtggaaaagcaacttgttttgcatatggccagacaggaagtggcaagacacatactatgggcggagacctctctgggaaagcccagaatgcatccaaagggatctatgccatggcctcccgggacgtcttcctcctgaagaatcaaccctgctaccggaagttgggcctggaagtctatgtgacattcttcgagatctacaatgggaagctgtttgacctgctcaacaagaaggccaagctgcgcgtgctggaggacggcaagcaacaggtgcaagtggtggggctgcaggagcatctggttaactctgctgatgatgtcatcaagatgatcgacatgggcagcgcctgcagaacctctgggcagacatttgccaactccaattcctcccgctcccacgcgtgcttccaaattattcttcgagctaaagggagaatgcatggcaagttctctttggtagatctggcagggaatgagcgaggcgcggacacttccagtgctgaccggcagacccgcatggagggcgcagaaatcaacaagagtctcttagccctgaaggagtgcatcagggccctgggacagaacaaggctcacaccccgttccgtgagagcaagctgacacaggtgctgagggactccttcattggggagaactctaggacttgcatgattgccacgatctcaccaggcataagctcctgtgaatatactttaaacaccctgagatatgcagacagggtcaaggagctgagcccccacagtgggcccagtggagagcagttgattcaaatggaaacagaagagatggaagcctgctctaacggggcgctgattccaggcaatttatccaaggaagaggaggaactgtcttcccagatgtccagctttaacgaagccatgactcagatcagggagctggaggagaaggctatggaagagctcaaggagatcatacagcaaggaccagactggcttgagctctctgagatgaccgagcagccagactatgacctggagacctttgtgaacaaagcggaatctgctctggcccagcaagccaagcatttctcagccctgcgagatgtcatcaaggccttgcgcctggccatgcagctggaagagcaggctagcagacaaataagcagcaagaaacggccccagtgacgactgcaaataaaaatctgtttggtttgacacccagcctcttccctggccctccccagagaactttgggtacctggtgggtctaggcagggtctgagctgggacaggttctggtaaatgccaagtatgggggcatctgggcccagggcagctggggagggggtcagagtgacatgggacactccttttctgttcctcagttgtcgccctcacgagaggaaggagctcttagttacccttttgtgttgcccttctttccatcaaggggaatgttctcagcatagagctttctccgcagcatcctgcctgcgtggactggctgctaatggagagctccctggggttgtcctggctctggggagagagacggagcctttagtacagctatctgctggctctaaaccttctacgcctttgggccgagcactgaatgtcttgtactttaaaaaaatgtttctgagacctctttctactttactgtctccctagagatcctagaggatccctactgttttctgttttatgtgtttatacattgtatgtaacaataaagagaaaaaataaatcagctgtttaagtgtgtggaaag

SEQ ID NO: 281865 - DNA, 1975 bp, Homo sapiens
cggacgcgtgggtcgacccacgaattggccaagaaagaaattgatgtgatttccattcctagcaagtgtctcctcttggtacatgaacccaagttgaaagtggacttaacaaagtatctggagaaccaagcattctgctttgactttgcatttgatgaaacagcttcgaatgaagttgtctacaggttcacagcaaggccactggtacagacaatctttgaaggtggaaaagcaacttgttttgcatatggccagacaggaagtggcaagacacatactatgggcggagacctctctgggaaagcccagaatgcatccaaagggatctatgccatggcctcccgggacgtcttcctcctgaagaatcaaccctgctaccggaagttgggcctggaagtctatgtgacattcttcgagatctacaatgggaagctgtttgacctgctcaacaagaaggccaagctgcgcgtgctggaggacggcaagcaacaggtgcaagtggtggggctgcaggagcatctggttaactctgctgatgatgtcatcaagatgatcgacatgggcagcgcctgcagaacctctgggcagacatttgccaactccaattcctcccgctcccacgcgtgcttccaaattattcttcgagctaaagggagaatgcatggcaagttctctttggtagatctggcagggaatgagcgaggcgcggacacttccagtgctgaccggcagacccgcatggagggcgcagaaatcaacaagagtctcttagccctgaaggagtgcatcagggccctgggacagaacaaggctcacaccccgttccgtgagagcaagctgacacaggtgctgagggactccttcattggggagaactctaggacttgcatgattgccacgatctcaccaggcataagctcctgtgaatatactttaaacaccctgagatatgcagacagggtcaaggagctgagcccccacagtgggcccagtggagagcagttgattcaaatggaaacagaagagatggaagcctgctctaacggggcgctgattccaggcaatttatccaaggaagaggaggaactgtcttcccagatgtccagctttaacgaagccatgactcagatcagggagctggaggagaaggctatggaagagctcaaggagatcatacagcaaggaccagactggcttgagctctctgagatgaccgagcagccagactatgacctggagacctttgtgaacaaagcggaatctgctctggcccagcaagccaagcatttctcagccctgcgagatgtcatcaaggccttgcgcctggccatgcagctggaagagcaggctagcagacaaataagcagcaagaaacggccccagtgacgactgcaaataaaaatctgtttggtttgacacccagcctcttccctggccctccccagagaactttgggtacctggtgggtctaggcagggtctgagctgggacaggttctggtaaatgccaagtatgggggcatctgggcccagggcagctggggagggggtcagagtgacatgggacactccttttctgttcctcagttgtcgccctcacgagaggaaggagctcttagttacccttttgtgttgcccttctttccatcaaggggaatgttctcagcatagagctttctccgcagcatcctgcctgcgtggactggctgctaatggagagctccctggggttgtcctggctctggggagagagacggagcctttagtacagctatctgctggctctaaaccttctacgcctttgggccgagcactgaatgtcttgtactttaaaaaaatgtttctgagacctctttctactttactgtctccctagagatcctagaggatccctactgttttctgttttatgtgtttatacattgtatgtaacaataaagagaaaaaataaatcagctgtttaagtgtgtggaaag

SEQ ID NO: 281866 - DNA, 2010 bp, Homo sapiens
gtgggggacacttcagggtactaccagcggatgttggtggttctccttcaggctaacagagaccctgatgctggaattgatgaagctcaagttgaacaagatgctcaggctttatttatgaacccaagttgaaagtggacttaacaaagtatctggagaaccaagcattctgctttgactttgcatttgatgaaacagcttcgaatgaagttgtctacaggttcacagcaaggccactggtacagacaatctttgaaggtggaaaagcaacttgttttgcatatggccagacaggaagtggcaagacacatactatgggcggagacctctctgggaaagcccagaatgcatccaaagggatctatgccatggcctcccgggacgtcttcctcctgaagaatcaaccctgctaccggaagttgggcctggaagtctatgtgacattcttcgagatctacaatgggaagctgtttgacctgctcaacaagaaggccaagctgcgcgtgctggaggacggcaagcaacaggtgcaagtggtggggctgcaggagcatctggttaactctgctgatgatgtcatcaagatgatcgacatgggcagcgcctgcagaacctctgggcagacatttgccaactccaattcctcccgctcccacgcgtgcttccaaattattcttcgagctaaagggagaatgcatggcaagttctctttggtagatctggcagggaatgagcgaggcgcggacacttccagtgctgaccggcagacccgcatggagggcgcagaaatcaacaagagtctcttagccctgaaggagtgcatcagggccctgggacagaacaaggctcacaccccgttccgtgagagcaagctgacacaggtgctgagggactccttcattggggagaactctaggacttgcatgattgccacgatctcaccaggcataagctcctgtgaatatactttaaacaccctgagatatgcagacagggtcaaggagctgagcccccacagtgggcccagtggagagcagttgattcaaatggaaacagaagagatggaagcctgctctaacggggcgctgattccaggcaatttatccaaggaagaggaggaactgtcttcccagatgtccagctttaacgaagccatgactcagatcagggagctggaggagaaggctatggaagagctcaaggagatcatacagcaaggaccagactggcttgagctctctgagatgaccgagcagccagactatgacctggagacctttgtgaacaaagcggaatctgctctggcccagcaagccaagcatttctcagccctgcgagatgtcatcaaggccttgcgcctggccatgcagctggaagagcaggctagcagacaaataagcagcaagaaacggccccagtgacgactgcaaataaaaatctgtttggtttgacacccagcctcttccctggccctccccagagaactttgggtacctggtgggtctaggcagggtctgagctgggacaggttctggtaaatgccaagtatgggggcatctgggcccagggcagctggggagggggtcagagtgacatgggacactccttttctgttcctcagttgtcgccctcacgagaggaaggagctcttagttacccttttgtgttgcccttctttccatcaaggggaatgttctcagcatagagctttctccgcagcatcctgcctgcgtggactggctgctaatggagagctccctggggttgtcctggctctggggagagagacggagcctttagtacagctatctgctggctctaaaccttctacgcctttgggccgagcactgaatgtcttgtactttaaaaaaatgtttctgagacctctttctactttactgtctccctagagatcctagaggatccctactgttttctgttttatgtgtttatacattgtatgtaacaataaagagaaaaaataaatcagctgtttaagtgtgtggaaag

SEQ ID NO: 281867 - DNA, 2364 bp, Homo sapiens
aggacgcttgcgcgcgggatttaaactgcggcggtttacgcggcgttaagacttcgtagggttagcgaaattgaggtttcttggtattgcgcgtttctcttccttgctgactctccgaatggccatggactcgtcgcttcaggcccgcctgtttcccggtctcgctatcaagatccaacgcagtaatggtttaattcacagtgccaatgtaaggactgtgaacttggagaaatcctgtgtttcagtggaatgggcagaaggaggtgccacaaagggcaaagagattgattttgatgatgtggctgcaataaacccagaactcttacagcttcttcccttacatccgaaggacaatctgcccttgcaggaaaatgtaacaatccagaaacaaaaacggagatccgtcaactccaaaattcctgctccaaaagaaagtcttcgaagccgctccactcgcatgtccactgtctcagagcttcgcatcacggctcaggagaatgacatggaggtggagctgcctgcagctgcaaactcccgcaagcagttttcagttcctcctgcccccactaggccttcctgccctgcagtggctgaaataccattgaggatggtcagcgaggagatggaagagcaagtccattccatccgaggcagctcttctgcaaaccctgtgaactcagttcggaggaaatcatgtcttgtgaaggaagtggaaaaaatgaagaacaagcgagaagagaagaaggcccagaactctgaaatgagaatgaagagagctcaggagtatgacagtagttttccaaactgggaatttgcccgaatgattaaagaatttcgggctactttggaatgtcatccacttactatgactgatcctatcgaagagcacagaatatgtgtctgtgttaggaaacgcccactgaataagcaagaattggccaagaaagaaattgatgtgatttccattcctagcaagtgtctcctcttggtacatgaacccaagttgaaagtggacttaacaaagtatctggagaaccaagcattctgctttgactttgcatttgatgaaacagcttcgaatgaagttgtctacaggttcacagcaaggccactggtacagacaatctttgaaggtggaaaagcaacttgttttgcatatggccagacaggaagtggcaagacacatactatgggcggagacctctctgggaaagcccagaatgcatccaaagggatctatgccatggcctcccgggacgtcttcctcctgaagaatcaaccctgctaccggaagttgggcctggaagtctatgtgacattcttcgagatctacaatgggaagctgtttgacctgctcaacaagaaggccaagctgcgcgtgctggaggacggcaagcaacaggtgcaagtggtggggctgcaggagcatctggttaactctgctgatgatgtcatcaagatgatcgacatgggcagcgcctgcagaacctctgggcagacatttgccaactccaattcctcccgctcccacgcgtgcttccaaattattcttcgagctaaagggagaatgcatggcaagttctctttggtagatctggcagggaatgagcgaggcgcggacacttccagtgctgaccggcagacccgcatggagggcgcagaaatcaacaagagtctcttagccctgaaggagtgcatcagggccctgggacagaacaaggctcacaccccgttccgtgagagcaagctgacacaggtgctgagggactccttcattggggagaactctaggacttgcatgattgccacgatctcaccaggcataagctcctgtgaatatactttaaacaccctgagatatgcagacagggtcaaggagctgagcccccacagtgggcccagtggagagcagttgattcaaatggaaacagaagagatggaagcctgctctaacggggcgctgattccaggcaatttatccaaggaagaggaggaactgtcttcccagatgtccagctttaacgaagccatgactcagatcagggagctggaggagaaggctatggaagagctcaaggagatcatacagactggctgctaatggagagctccctggggttgtcctggctctggggagagagacggagcctttagtacagctatctgctggctctaaaccttctacgcctttgggccgagcactgaatgtcttgtactttaaaaaaatgtttctgagacctctttctactttactgtctccctagagatcctagaggatccctactgttttctgttttatgtgtttatacattgtatgtaacaataaagagaaaaaataaatcagctgtttaagtgtgtggaaag

SEQ ID NO: 281868 - DNA, 450 bp, Homo sapiens
gtggaaaagcaacttgttttgcatatggccagacaggaagtggcaagacacatgtgagtattgaggcctggcggggaaagagcctttcccttgtgcacccctggctccctataaagggagacaatgagtttgttgagaaaggccccttgttacagatgccccatcaccagatagccttgccatgtcagatgcagggaggggctttaggtccagccttctggctttgttgtggcccactgtagtgaaggagccagtagtgctctgctctaggccaacagcccttttccatggtcttctaccccttccctttgcagactatgggcggagacctctctgggaaagcccagaatgcatccaaagggatctatgccatggcctgtaagtactgtgtactgctgcttcagggttgggcacagaaaggcaggttgtttgcttagcaaagttctctcc

SEQ ID NO: 281869 - DNA, 511 bp, Homo sapiens
gacagaacaaggctcacaccccgttccgtgagagcaagctgacacaggtgctgagggactccttcattggggagaactctaggacttgcatggtgagtagggtcactttgaaggtgatggtacaggaggagacagagttgctttccacagagacacttagtcctgtccctgggctggaagctcagcactgctggctgcctgggtttccaggctgtaccgtgactgggcttccagaccctgctttaatgcacgagactccttgtggcctaaccaagcgtggaggaaaggatctattccctttaagatgtgtaggtgcagctcttggtttgggagaggtcattcctgcattacctgatgaaaagggggttccagaattcggaagatgggcctttgggtcagcaggagagggaagtccttgtcttttccatggcctccctcaggttcactggctcccagcctagaaaatagaaatagcctggatcataaggctgtgtccttgaatgacgtcctc

SEQ ID NO: 281870 - DNA, 856 bp, Homo sapiens
  misc_feature (681)..(681): n is a, c, g, or t
  misc_feature (689)..(690): n is a, c, g, or t
  misc_feature (709)..(709): n is a, c, g, or t
aggacgcttgcgcgcgggatttaaactgcggcggtttacgcggcgttaagacttcgtagggttagcgaaattgaggtttcttggtattgcgcgtttctcttccttgctgactctccgaatggccatggactcgtcgcttcaggcccgcctgtttcccggtctcgctatcaagatccaacgcagtaatggtttaattcacagtgccaatgtaaggactgtgaacttggagaaatcctgtgtttcagtggaatgggcagaaggaggtgccacaaagggcaaagagattgattttgatgatgtggctgcaataaacccagaactcttacagcttcttcccttacatccgaaggacaatctgcccttgcaggaaaatgtaacaatccagaaacaaaaacggagatccgtcaactccaaaattcctgctccaaaagaaagtcttcgaagccgctccactcgcatgtccactgtctcagagcttcgcatcacggctcaggagaatgacatggaggtggagctgcctgcagctgcaaactcccgcaagcagttttcagttcctcctgcccccactaggccttcctgccctgcagtggctgaaataccattgaggatggtcagcgaggagatggaagagcaagtccattccatccgaggcagctcttctgcaaaccctgtgaactcagntcggaggnnatcatgtcttgtgacggangtggacccctgagaacagcgagagagaagatgcctgaatcctgaatggattgagaggccccgagttgacggtgttccccggattgccctgttagattcggcctgggttcctttgcggcttgggcccttttgttacccgtacatgccc

SEQ ID NO: 281871 - DNA, 2960 bp, Homo sapiens
ggcaggaagccgtaactggggaagtttctgggcccagaagaaaatgtaggtagtcttagggttaggtagcagctgtcaggaacttgcccctgcccataagatcctaaagggcccccatttgactctcaccagacagttagaacttgtttcctcctccgtgtcagccatcaagaggtgcttggggggctgtgcccagcaggacctcactgcccagcagatcagcaggggagccaagtggcctagatctgctgtggagtacccgactgtttgcctgcctgtctgccctcctcttcacctcattctcatcactgacgtctaccattggcttggaaatcagaaacccatatccatctagatgattgattttgatgatgtggctgcaataaacccagaactcttacagcttcttcccttacatccgaaggacaatctgcccttgcaggaaaatgtaacaatccagaaacaaaaacggagatccgtcaactccaaaattcctgctccaaaagaaagtcttcgaagccgctccactcgcatgtccactgtctcagagcttcgcatcacggctcaggagaatgacatggaggtggagctgcctgcagctgcaaactcccgcaagcagttttcagttcctcctgcccccactaggccttcctgccctgcagtggctgaaataccattgaggatggtcagcgaggagatggaagagcaagtccattccatccgaggcagctcttctgcaaaccctgtgaactcagttcggaggaaatcatgtcttgtgaaggaagtggaaaaaatgaagaacaagcgagaagagaagaaggcccagaactctgaaatgagaatgaagagagctcaggagtatgacagtagttttccaaactgggaatttgcccgaatgattaaagaatttcgggctactttggaatgtcatccacttactatgactgatcctatcgaagagcacagaatatgtgtctgtgttaggaaacgcccactgaataagcaagaattggccaagaaagaaattgatgtgatttccattcctagcaagtgtctcctcttggtacatgaacccaagttgaaagtggacttaacaaagtatctggagaaccaagcattctgctttgactttgcatttgatgaaacagcttcgaatgaagttgtctacaggttcacagcaaggccactggtacagacaatctttgaaggtggaaaagcaacttgttttgcatatggccagacaggaagtggcaagacacatactatgggcggagacctctctgggaaagcccagaatgcatccaaagggatctatgccatggcctcccgggacgtcttcctcctgaagaatcaaccctgctaccggaagttgggcctggaagtctatgtgacattcttcgagatctacaatgggaagctgtttgacctgctcaacaagaaggccaagctgcgcgtgctggaggacggcaagcaacaggtgcaagtggtggggctgcaggagcatctggttaactctgctgatgatgtcatcaagatgatcgacatgggcagcgcctgcagaacctctgggcagacatttgccaactccaattcctcccgctcccacgcgtgcttccaaattattcttcgagctaaagggagaatgcatggcaagttctctttggtagatctggcagggaatgagcgaggcgcggacacttccagtgctgaccggcagacccgcatggagggcgcagaaatcaacaagagtctcttagccctgaaggagtgcatcagggccctgggacagaacaaggctcacaccccgttccgtgagagcaagctgacacaggtgctgagggactccttcattggggagaactctaggacttgcatgattgccacgatctcaccaggcataagctcctgtgaatatactttaaacaccctgagatatgcagacagggtcaaggagctgagcccccacagtgggcccagtggagagcagttgattcaaatggaaacagaagagatggaagcctgctctaacggggcgctgattccaggcaatttatccaaggaagaggaggaactgtcttcccagatgtccagctttaacgaagccatgactcagatcagggagctggaggagaaggctatggaagagctcaaggagatcatacagcaaggaccagactggcttgagctctctgagatgaccgagcagccagactatgacctggagacctttgtgaacaaagcggaatctgctctggcccagcaagccaagcatttctcagccctgcgagatgtcatcaaggccttgcgcctggccatgcagctggaagagcaggctagcagacaaataagcagcaagaaacggccccagtgacgactgcaaataaaaatctgtttggtttgacacccagcctcttccctggccctccccagagaactttgggtacctggtgggtctaggcagggtctgagctgggacaggttctggtaaatgccaagtatgggggcatctgggcccagggcagctggggagggggtcagagtgacatgggacactccttttctgttcctcagttgtcgccctcacgagaggaaggagctcttagttacccttttgtgttgcccttctttccatcaaggggaatgttctcagcatagagctttctccgcagcatcctgcctgcgtggactggctgctaatggagagctccctggggttgtcctggctctggggagagagacggagcctttagtacagctatctgctggctctaaaccttctacgcctttgggccgagcactgaatgtcttgtactttaaaaaaatgtttctgagacctctttctactttactgtctccctagagatcctagaggatccctactgttttctgttttatgtgtttatacattgtatgtaacaataaagagaaaaaataaatcagctgtttaagtgtgtggaaag

SEQ ID NO: 281872 - DNA, 2762 bp, Homo sapiens
aggacgcttgcgcgcgggatttaaactgcggcggtttacgcggcgttaagacttcgtagggttagcgaaattgaggtttcttggtattgcgcgtttctcttccttgctgactctccgaatggccatggactcgtcgcttcaggcccgcctgtttcccggtctcgctatcaagatccaacgcagtaatggtttaattcacagtgccaatgtaaggactgtgaacttggagaaatcctgtgtttcagtggaatgggcagaaggaggtgccacaaagggcaaagagattgattttgatgatgtggctgcaataaacccagaactcttacagcttcttcccttacatccgaaggacaatctgcccttgcaggaaaatgtaacaatccagaaacaaaaacggagatccgtcaactccaaaattcctgctccaaaagaaagtcttcgaagccgctccactcgcatgtccactgtctcagagcttcgcatcacggctcaggagaatgacatggaggtggagctgcctgcagctgcaaactcccgcaagcagttttcagttcctcttcggaggaaatcatgtcttgtgaaggaagtggaaaaaatgaagaacaagcgagaagagaagaaggcccagaactctgaaatgagaatgaagagagctcaggagtatgacagtagttttccaaactgggaatttgcccgaatgattaaagaatttcgggctactttggaatgtcatccacttactatgactgatcctatcgaagagcacagaatatgtgtctgtgttaggaaacgcccactgaataagcaagaattggccaagaaagaaattgatgtgatttccattcctagcaagtgtctcctcttggtacatgaacccaagttgaaagtggacttaacaaagtatctggagaaccaagcattctgctttgactttgcatttgatgaaacagcttcgaatgaagttgtctacaggttcacagcaaggccactggtacagacaatctttgaaggtggaaaagcaacttgttttgcatatggccagacaggaagtggcaagacacatactatgggcggagacctctctgggaaagcccagaatgcatccaaagggatctatgccatggcctcccgggacgtcttcctcctgaagaatcaaccctgctaccggaagttgggcctggaagtctatgtgacattcttcgagatctacaatgggaagctgtttgacctgctcaacaagaaggccaagctgcgcgtgctggaggacggcaagcaacaggtgcaagtggtggggctgcaggagcatctggttaactctgctgatgatgtcatcaagatgatcgacatgggcagcgcctgcagaacctctgggcagacatttgccaactccaattcctcccgctcccacgcgtgcttccaaattattcttcgagctaaagggagaatgcatggcaagttctctttggtagatctggcagggaatgagcgaggcgcggacacttccagtgctgaccggcagacccgcatggagggcgcagaaatcaacaagagtctcttagccctgaaggagtgcatcagggccctgggacagaacaaggctcacaccccgttccgtgagagcaagctgacacaggtgctgagggactccttcattggggagaactctaggacttgcatgattgccacgatctcaccaggcataagctcctgtgaatatactttaaacaccctgagatatgcagacagggtcaaggagctgagcccccacagtgggcccagtggagagcagttgattcaaatggaaacagaagagatggaagcctgctctaacggggcgctgattccaggcaatttatccaaggaagaggaggaactgtcttcccagatgtccagctttaacgaagccatgactcagatcagggagctggaggagaaggctatggaagagctcaaggagatcatacagcaaggaccagactggcttgagctctctgagatgaccgagcagccagactatgacctggagacctttgtgaacaaagcggaatctgctctggcccagcaagccaagcatttctcagccctgcgagatgtcatcaaggccttgcgcctggccatgcagctggaagagcaggctagcagacaaataagcagcaagaaacggccccagtgacgactgcaaataaaaatctgtttggtttgacacccagcctcttccctggccctccccagagaactttgggtacctggtgggtctaggcagggtctgagctgggacaggttctggtaaatgccaagtatgggggcatctgggcccagggcagctggggagggggtcagagtgacatgggacactccttttctgttcctcagttgtcgccctcacgagaggaaggagctcttagttacccttttgtgttgcccttctttccatcaaggggaatgttctcagcatagagctttctccgcagcatcctgcctgcgtggactggctgctaatggagagctccctggggttgtcctggctctggggagagagacggagcctttagtacagctatctgctggctctaaaccttctacgcctttgggccgagcactgaatgtcttgtactttaaaaaaatgtttctgagacctctttctactttactgtctccctagagatcctagaggatccctactgttttctgttttatgtgtttatacattgtatgtaacaataaagagaaaaaataaatcagctgtttaagtgtgtggaaag

SEQ ID NO: 281873 - DNA, 2341 bp, Homo sapiens
aagctagtgaggcccacatggggaggggtctgatctttataaactgggttccacccccataccataggttggctagattcctgcattagtaaaaatcatgaaagtagtgctgaaactcttgtaggcagcagagtgagaaaaatgggaacaaaatccagtgctcccttcttgtgctctggagtatctaatggaggatgcaggggtcctagtgttagatcttggcctctgactgggccagacatgggattggaaggggtgggagttctggacaagctcgcttttgaaattgctctgaccctttgctgttggttgcctcctctcatccgcttgcagatcgaagagcacagaatatgtgtctgtgttaggaaacgcccactgaataagcaagaattggccaagaaagaaattgatgtgatttccattcctagcaagtgtctcctcttggtacatgaacccaagttgaaagtggacttaacaaagtatctggagaaccaagcattctgctttgactttgcatttgatgaaacagcttcgaatgaagttgtctacaggttcacagcaaggccactggtacagacaatctttgaaggtggaaaagcaacttgttttgcatatggccagacaggaagtggcaagacacatactatgggcggagacctctctgggaaagcccagaatgcatccaaagggatctatgccatggcctcccgggacgtcttcctcctgaagaatcaaccctgctaccggaagttgggcctggaagtctatgtgacattcttcgagatctacaatgggaagctgtttgacctgctcaacaagaaggccaagctgcgcgtgctggaggacggcaagcaacaggtgcaagtggtggggctgcaggagcatctggttaactctgctgatgatgtcatcaagatgatcgacatgggcagcgcctgcagaacctctgggcagacatttgccaactccaattcctcccgctcccacgcgtgcttccaaattattcttcgagctaaagggagaatgcatggcaagttctctttggtagatctggcagggaatgagcgaggcgcggacacttccagtgctgaccggcagacccgcatggagggcgcagaaatcaacaagagtctcttagccctgaaggagtgcatcagggccctgggacagaacaaggctcacaccccgttccgtgagagcaagctgacacaggtgctgagggactccttcattggggagaactctaggacttgcatgattgccacgatctcaccaggcataagctcctgtgaatatactttaaacaccctgagatatgcagacagggtcaaggagctgagcccccacagtgggcccagtggagagcagttgattcaaatggaaacagaagagatggaagcctgctctaacggggcgctgattccaggcaatttatccaaggaagaggaggaactgtcttcccagatgtccagctttaacgaagccatgactcagatcagggagctggaggagaaggctatggaagagctcaaggagatcatacagcaaggaccagactggcttgagctctctgagatgaccgagcagccagactatgacctggagacctttgtgaacaaagcggaatctgctctggcccagcaagccaagcatttctcagccctgcgagatgtcatcaaggccttgcgcctggccatgcagctggaagagcaggctagcagacaaataagcagcaagaaacggccccagtgacgactgcaaataaaaatctgtttggtttgacacccagcctcttccctggccctccccagagaactttgggtacctggtgggtctaggcagggtctgagctgggacaggttctggtaaatgccaagtatgggggcatctgggcccagggcagctggggagggggtcagagtgacatgggacactccttttctgttcctcagttgtcgccctcacgagaggaaggagctcttagttacccttttgtgttgcccttctttccatcaaggggaatgttctcagcatagagctttctccgcagcatcctgcctgcgtggactggctgctaatggagagctccctggggttgtcctggctctggggagagagacggagcctttagtacagctatctgctggctctaaaccttctacgcctttgggccgagcactgaatgtcttgtactttaaaaaaatgtttctgagacctctttctactttactgtctccctagagatcctagaggatccctactgttttctgttttatgtgtttatacattgtatgtaacaataaagagaaaaaataaatcagctgtttaagtgtgtggaaag

SEQ ID NO: 281874 - DNA, 2418 bp, Homo sapiens
aggacgcttgcgcgcgggatttaaactgcggcggtttacgcggcgttaagacttcgtagggttagcgaaattgaggtttcttggtattgcgcgtttctcttccttgctgactctccgaatggccatggactcgtcgcttcaggcccgcctgtttcccggtctcgctatcaagatccaacgcagtaatggtttaattcacagtgccaatgtaaggactgtgaacttggagaaatcctgtgtttcagtggaatgggcagaaggaggtgccacaaagggcaaagagattgattttgatgatgtggctgcaataaacccagaactcttacagcttcttcccttacatccgaaggacaatctgcccttgcaggaaaatgtaacaatccagaaacaaaaacggagatccgtcaactccaaaattcctgctccaaaagaaagtcttcgaagccgctccactcgcatgtccactgtctcagagcttcgcatcacggctcaggagaatgacatggaggtggagctgcctgcagctgcaaactcccgcaagcagttttcagttcctcctgcccccactaggccttcctgccctgcagtggctgaaataccattgaggatggtcagcgaggagatggaagagcaagtccattccatccgaggcagctcttctgcaaaccctgtgaactcagttcggaggaaatcatgtcttgtgaaggaagtggaaaaaatgaagaacaagcgagaagagaagaaggcccagaactctgaaatgagaatgaagagagctcaggagtatgacagtagttttccaaactgggaatttgcccgaatgattaaagaatttcgggctactttggaatgtcatccacttactatgactgatcctatcgaagagcacagaatatgtgtctgtgttaggaaacgcccactgaataagcaagaattggccaagaaagaaattgatgtgatttccattcctagcaagtgtctcctcttggtacatgaacccaagttgaaagtggacttaacaaagtatctggagaaccaagcattctgctttgactttgcatttgatgaaacagcttcgaatgaagttgtctacaggttcacagcaaggccactggtacagacaatctttgaaggtggaaaagcaacttgttttgcatatggccagacaggaagtggcaagacacatactatgggcggagacctctctgggaaagcccagaatgcatccaaagggatctatgccatggcctcccgggacgtcttcctcctgaagaatcaaccctgctaccggaagttgggcctggaagtctatgtgacattcttcgagatctacaatgggaagctgtttgacctgctcaacaagaaggccaagctgcgcgtgctggaggacggcaagcaacaggtgcaagtggtggggctgcaggagcatctggttaactctgctgatgatgtcatcaagatgatcgacatgggcagcgcctgcagaacctctgggcagacatttgccaactccaattcctcccgctcccacgcgtgcttccaaattattcttcgagctaaagggagaatgcatggcaagttctctttggtagatctggcagggaatgagcgaggcgcggacacttccagtgctgaccggcagacccgcatggagggcgcagaaatcaacaagagtctcttagccctgaaggagtgcatcagggccctgggacagaacaaggctcacaccccgttccgtgagagcaagctgacacaggtgctgagggactccttcattggggagaactctaggacttgcatgattgccacgatctcaccaggcataagctcctgtgaatatactttaaacaccctgagatatgcagacagggtcaaggagctgagcccccacagtgggcccagtggagagcagttgattcaaatggaaacagaagagatggaagcctgctctaacggggcgctgattccaggcaatggcagctggggagggggtcagagtgacatgggacactccttttctgttcctcagttgtcgccctcacgagaggaaggagctcttagttacccttttgtgttgcccttctttccatcaaggggaatgttctcagcatagagctttctccgcagcatcctgcctgcgtggactggctgctaatggagagctccctggggttgtcctggctctggggagagagacggagcctttagtacagctatctgctggctctaaaccttctacgcctttgggccgagcactgaatgtcttgtactttaaaaaaatgtttctgagacctctttctactttactgtctccctagagatcctagaggatccctactgttttctgttttatgtgtttatacattgtatgtaacaataaagagaaaaaataaatcagctgtttaagtgtgtggaaag

SEQ ID NO: 281875 - DNA, 936 bp, Homo sapiens
  misc_feature (10)..(10): n is a, c, g, or t
  misc_feature (14)..(14): n is a, c, g, or t
  misc_feature (19)..(19): n is a, c, g, or t
  misc_feature (53)..(53): n is a, c, g, or t
  misc_feature (57)..(57): n is a, c, g, or t
ctttgatggnccancatgngcacgtgcacacacacacagaggcatatgtcacncacngcatgtccagctttaacgaagccatgactcagatcagggagctggaggagaaggctatggaagagctcaaggagatcatacagcaaggaccagactggcttgagctctctgagatgaccgagcagccagactatgacctggagacctttgtgaacaaagcggaatctgctctggcccagcaagccaagcatttctcagccctgcgagatgtcatcaaggccttgcgcctggccatgcagctggaagagcaggctagcagacaaataagcagcaagaaacggccccagtgacgactgcaaataaaaatctgtttggtttgacacccagcctcttccctggccctccccagagaactttgggtacctggtgggtctaggcagggtctgagctgggacaggttctggtaaatgccaagtatgggggcatctgggcccagggcagctggggagggggtcagagtgacatgggacactccttttctgttcctcagttgtcgccctcacgagaggaaggagctcttagttacccttttgtgttgcccttctttccatcaaggggaatgttctcagcatagagctttctccgcagcatcctgcctgcgtggactggctgctaatggagagctccctggggttgtcctggctctggggagagagacggagcctttagtacagctatctgctggctctaaaccttctacgcctttgggccgagcactgaatgtcttgtactttaaaaaaatgtttctgagacctctttctactttactgtctccctagagatcctagaggatccctactgttttctgttttatgtgtttatacattgtatgtaacaataaagagaaaaaataaatcagctgtttaagtgtgtggaaag

SEQ ID NO: 281876 - DNA, 493 bp, Homo sapiens
gctgtgggatctgagacctccttgtttcctcagggtcaaggagctgagcccccacagtgggcccagtggagagcagttgattcaaatggaaacagaagagatggaagcctgctctaacggggcgctgattccaggcaatatgtaaggaccaggatgcggccaagcaagacagaagtgtggcctgctgaggcggcacctgggtcacataattgtctttctttttggccctctcagttatccaaggaagaggaggaactgtcttcccagatgtccagctttaacgaagccatgactcagatcagggagctggaggagaaggctatggaagagctcaaggagatcatacagaggcagctggccctggacagggagctggatgcagcacggccctcagtatgctccacaccattcccagaacatgacctgggccttgttcccacaggtattcacatagcaagaagcagccctctacaccagcactctttaattcttt

SEQ ID NO: 281877 - DNA, 256 bp, Homo sapiens
tcaggaggatttgagccccaaatccaacaacaggaacaacaaagaaggttgcagactatgctgttctgcagtttctttattttaggaagtccagggggcccaggcaagccagggaggccagggctacccagagaaccctggaaagcaaaaacaaagtccccggagttactgtcactgcaacactgaaagcacggaaggcagaaacaaccttgggtgtgttgacttgtgtctaaaataaacgtgctgtggttggttg

SEQ ID NO: 281878 - DNA, 484 bp, Homo sapiens
gaggatcatgtctgcatcttaaaagatccctttctgtagacaatggactgaagggggtgaccagtcaggaggcagttgctgcattgcaagatgaaatgctggaagtggtagggattgatgcagacctccttctgcttggaaccaaaaggaaactcacagcattccagtggttttagttcatggtggctctgaagatcgggccagcgccacacacggcagtaaatgacatgaggcagtcccttccggtgggagacttgcagcctgccatccagagagcggggaatggtgacacagttactcggttgccctgggcagctcaaggccttttccagttcctccatggcacctttctttttcttcagttttttcaccaaagcatcaacagctttctctgcccatttttcttcttcatcgccctgtttccacccaagaagtctcttcacagctggacttgtaaaggaaaataaacttgtcacattcataa

SEQ ID NO: 281879 - DNA, 834 bp, Homo sapiens
cgaccaccatgacgaaaataaggaacctgaggagcccggaaggcatgacatcaccgttcctcctcccagctaccgaaggcgccgcgcgctgacctcacaaacacggcttctcctggtacgggctggttacgccctccagctgcgccccctacacgacgacagacgcgtcccccagcccttctcctgtcctaccacttgtggcggccatgaaggggacccccagctccctggacaccctgatgtggatctaccacttccacagctccaccgaggtggccctccagcccccgcttctgtcttccctggaactctccgtggccgcagcccatgaatatctggagcagaggttcagagagctgaagtccctggagccacccgaaccgaagatgcaggggatgctgcctgccccgaagcccaccctggggctggtgttgagagaagccacagccagcctcgtgagcttcggcaccaccttgttagaggtggggtactggggggcttaggatacgcggcgatcgggtagcgggaacaaggacctctgcctccccgctaacccctgtgcccccaatgcagatctcagccctgtggctgcagcaggaggcgcggcgactagacggcagcgcgggcccagccccagacggcagggatccgggtgcagcgctgagccgggtagcccaagccgcagggcagggggttcggcaagctggggctgcggtgggcgccagcgcccggctcctagtccagggagcatggctatgcctgtgtggacggggtctgcaggggtctgcctcattcctgcgacagtcgcaacagcagctaggcctcggaatcccc

SEQ ID NO: 281880 - DNA, 763 bp, Homo sapiens
agcgcaagtctctgaggcacgggaggggcggacgcagagaccgagcgcctaatgtggctagcggatcgtctgctccccggacccaggaactacccgaagcccgcgcggacccacagaccacccccagctccgccccgcgaggccccgcctcttcatgcaacctaaaagtaaccaactccccccacgcgaaggttcctatcggtcgacgggctgtgggtgtattgctcagtgacggcttcgtttagtttctcccagcacccataattcaaagcaagaacaacgacattatggggagaaaacgtccttttgtgaaacagaaggcaatccacaccattagtaaaccccatcaattttgccttcagaatatatccagattcttcccaattctaccgccaccattctggttcaagctacctgtagagacggggtttcaccatgttagccaggatggtctcgatcttctgacctcgtgatccgtccgcctcagccttccaaagttctgggattacagacgtgagccaccgcgcccggccaaaagatccataaactttgagtcaccagatagagctaacatttaccacagaggcatgtaaagaaaacgattctagcagagtaactataatacaaaagaacaatattccaattatgttcctatgttctatccaggaaggtttaagaggagccttttaaactgaactatattctaagaggtgggaaaaagttttcttttgtttttcttattaaccgtaccttgaaagcccca

SEQ ID NO: 281881 - DNA, 874 bp, Homo sapiens
agcgcaagtctctgaggcacgggaggggcggacgcagagaccgagcgcctaatgtggctagcggatcgtctgctccccggacccaggaactacccgaagcccgcgcggacccacagaccacccccagctccgccccgcgaggccccgcctcttcatgcaacctaaaagtaaccaactccccccacgcgaaggttcctatcggtcgacgggctgtgggtgtattgctcagtgacggcttcgtttagtttctcccagcacccataattcaaagcaagaacaacgacattatggggagaaaacgtccttttgtgaaacagaaggcaatccacaccattagtaaaccccatcaattttgccttcagaatatatccagattcttcccaattctaccgccaccattctggttcaagctacctggtaaaacatgcacagagcaaatttcggttgtatcctagaaatgatagccatattgaggatactggttacacctgacgaaacatctccatgaaagttaagcatacacaggatctcactttgttacccaggctagagtgcaatggtgtgaccacagctcactgaagcctcaacctcctgagctcacttttaagcaatcctctcacttcggcctcctgagtagctgggcctacaggcatgtaccaacactcccagcaagtttttcttatttttgtgaagacagagtcttgcagtattgcccaagctggacttgaactcctggcctcaagcaatcctcccatctaggcctcccaaagtgctaggattacaggcatgagccactgtgccaagcaacacttgcagtttttaagtgaaaatgatcctgtaaatatatatatgaataaaatctagaaagctatat

SEQ ID NO: 281882 - DNA, 872 bp, Homo sapiens
tccatggcaaaaatcattattttttttaagtttcattttgagtattagcagctataggatcttcagggttatcctccttgaagtatttcctatggtcaccctggactaatgtctttaaataaaacacataatattaaagggtccataccgacagtgaataagctatcaatgctagccaatcagtgttggggagaagcacaggaaagccttaggaaaaatattgggaaaattggaggtcttctgtttgccaatacttcagatcaatttctgcattagttttcttccatacccagaattgcatagaattaaggaggatgtaaagccagaagaagcctaaaggcagattctggttcagtcactatgaaattcttacattctcaaatatacttctttacatttttatctaaaattttaggtaaaacatgcacagagcaaatttcggttgtatcctagaaatgatagccatattgaggatactggttacacctgacgaaacatctccatgaaagttaagcatacacaggatctcactttgttacccaggctagagtgcaatggtgtgaccacagctcactgaagcctcaacctcctgagctcacttttaagcaatcctctcacttcggcctcctgagtagctgggcctacaggcatgtaccaacactcccagcaagtttttcttatttttgtgaagacagagtcttgcagtattgcccaagctggacttgaactcctggcctcaagcaatcctcccatctaggcctcccaaagtgctaggattacaggcatgagccactgtgccaagcaacacttgcagtttttaagtgaaaatgatcctgtaaatatatatatgaataaaatctagaaagctatat

SEQ ID NO: 281883 - DNA, 1804 bp, Homo sapiens
  misc_feature (218)..(218): n is a, c, g, or t
ctggatctcggccacggatcttttgctcgcgaaagttcctccgtctagctgcacacaacgctgctgcaggaaaccgaggtaagggatttgccgagacttagctccaccacactccccgaggccccgccctcctctctggccctcccctaggcccaggtgtctcgcgttgcacgtgcagttgttgtggttctacgtcacgtggtcccggaagtcaaganagacccgcctcaaacatggcggcgcccagcgcgcgaggacgtgatccgcttctgctccggcttggattgtagccttgacgaggtctgagcgaccatggaccggccggggttcgtggcagcgctggtgctgctgcattttttatcacctatgaatatgtgaagtggtttttgcatgctgattcatcttcatatttgacacctatgaaacatatgttggctgcctctgctggagaagtggttgcctgcctgattcgagttccatctgaagtggttaagcagagggcacaggtatctgcttctacaagaacatttcagattttctctaacatcttatatgaagagggtatccaagggttgtatcgaggctataaaagcacagttttaagagagattcctttttctttggtccagtttcccttatgggagtccttaaaagccctctggtcctggaggcaggatcatgtggtggattcttggcagtcagcagtctgtggagcttttgcaggtggatttgccgctgcagtcaccacccctctagacgtggcaaagacaagaattacgctggcaaaggctggctccagcactgctgatgggaatgtgctctctgtcctgcatggggtctggcggtcacaggggctggcaggattatttgcaggtgtcttccctcgaatggcagccatcagtctgggaggtttcatctttctgggggcttatgaccgaacgcacagcttgctgttggaagttggcagaaagagtccttgaagcagagacaagcctcacctccacttctgtcaagagaggggcctgcagtgcaaaccctcttccgctgagcagctgtctgaactataggccccagtgctgaagaccagttgtgctaagataccggcatggagattgtgccatccgtggtataggctggctggtatgaagtcattggcctgtatgccagagagctaagagaagaaaacggggtctgtggcggtactctgaacaatttcctcagaacctcttaataaataagtttggtaatgctgaggccaggccttttagagctttcatttgatctgtatctgatctttcatttcctgccacctgatggtggattcagcagaaggcaagatggttataattctaaaagaatagcttgtttgtttgtttgggaaaaggagacttggggaagagttgtgtatgtgggtgtttctccccctagttaattcctgttgtgtaagggtaggctttgttgaaaaagaaagaaagattgaactacaggtgcatagcaagcactctttctgggtaactaggctgctggttttaattaccctcagatttcacccataaaaacgcacaattgtattattttacagagatgtgtccagcgccccctgtggtgtgtgagagaaagcagctgcaactcaagtgactaggtgggcccagctggcttcgtgcaggagggcacggtgggtgagccattctcgccattctcatgtcagactgaaaggagggcctgggccagctttgaaaaggcaggatgaaatggaaaggtcaccacacgaagggggatggacacaacgaagggggatggacac

SEQ ID NO: 281884 - DNA, 1889 bp, Homo sapiens
  misc_feature (218)..(218): n is a, c, g, or t
ctggatctcggccacggatcttttgctcgcgaaagttcctccgtctagctgcacacaacgctgctgcaggaaaccgaggtaagggatttgccgagacttagctccaccacactccccgaggccccgccctcctctctggccctcccctaggcccaggtgtctcgcgttgcacgtgcagttgttgtggttctacgtcacgtggtcccggaagtcaaganagacccgcctcaaacatggcggcgcccagcgcgcgaggacgtgatccgcttctgctccggcttggattgtagccttgacgaggtctgagcgaccatggaccggccggggttcgtggcagcgctggtgctgctgcattttttatcacctatgaatatgtgaagtggtttttgcatgctgattcatcttcatatttgacacctatgaaacatatgttggctgcctctgctggagaagtggttgcctgcctgattcgagttccatctgaagtggttaagcagagggcacaggtatctgcttctacaagaacatttcagattttctctaacatcttatatgaagagggtatccaagggttgtatcgaggctataaaagcacagttttaagagaggaggaggattagagtcaaaggtgtggggaggcttgtgagcttctgtgagttgttgtgtgtggcttgtatacatgctgttatactgattcctttttctttggtccagtttcccttatgggagtccttaaaagccctctggtcctggaggcaggatcatgtggtggattcttggcagtcagcagtctgtggagcttttgcaggtggatttgccgctgcagtcaccacccctctagacgtggcaaagacaagaattacgctggcaaaggctggctccagcactgctgatgggaatgtgctctctgtcctgcatggggtctggcggtcacaggggctggcaggattatttgcaggtgtcttccctcgaatggcagccatcagtctgggaggtttcatctttctgggggcttatgaccgaacgcacagcttgctgttggaagttggcagaaagagtccttgaagcagagacaagcctcacctccacttctgtcaagagaggggcctgcagtgcaaaccctcttccgctgagcagctgtctgaactataggccccagtgctgaagaccagttgtgctaagataccggcatggagattgtgccatccgtggtataggctggctggtatgaagtcattggcctgtatgccagagagctaagagaagaaaacggggtctgtggcggtactctgaacaatttcctcagaacctcttaataaataagtttggtaatgctgaggccaggccttttagagctttcatttgatctgtatctgatctttcatttcctgccacctgatggtggattcagcagaaggcaagatggttataattctaaaagaatagcttgtttgtttgtttgggaaaaggagacttggggaagagttgtgtatgtgggtgtttctccccctagttaattcctgttgtgtaagggtaggctttgttgaaaaagaaagaaagattgaactacaggtgcatagcaagcactctttctgggtaactaggctgctggttttaattaccctcagatttcacccataaaaacgcacaattgtattattttacagagatgtgtccagcgccccctgtggtgtgtgagagaaagcagctgcaactcaagtgactaggtgggcccagctggcttcgtgcaggagggcacggtgggtgagccattctcgccattctcatgtcagactgaaaggagggcctgggccagctttgaaaaggcaggatgaaatggaaaggtcaccacacgaagggggatggacacaacgaagggggatggacac

SEQ ID NO: 281885 - DNA, 1759 bp, Homo sapiens
  misc_feature (218)..(218): n is a, c, g, or t
ctggatctcggccacggatcttttgctcgcgaaagttcctccgtctagctgcacacaacgctgctgcaggaaaccgaggtaagggatttgccgagacttagctccaccacactccccgaggccccgccctcctctctggccctcccctaggcccaggtgtctcgcgttgcacgtgcagttgttgtggttctacgtcacgtggtcccggaagtcaaganagacccgcctcaaacatggcggcgcccagcgcgcgaggacgtgatccgcttctgctccggcttggattgtagccttgacgaggtctgagcgaccatggaccggccggggttcgtggcagcgctggtgctgctgcattttttatcacctatgaatatgtgaagtggtttttgcatgctgattcatcttcatatttgacacctatgaaacatatgttggctgcctctgctggagaagtggttgcctgcctgattcgagttccatctgaagtggttaagcagagggcacaggtatctgcttctacaagaacatttcagattttctctaacatcttatatgaagagggtatccaagggttgtatcgaggctataaaagcacagttttaagagaggccctctggtcctggaggcaggatcatgtggtggattcttggcagtcagcagtctgtggagcttttgcaggtggatttgccgctgcagtcaccacccctctagacgtggcaaagacaagaattacgctggcaaaggctggctccagcactgctgatgggaatgtgctctctgtcctgcatggggtctggcggtcacaggggctggcaggattatttgcaggtgtcttccctcgaatggcagccatcagtctgggaggtttcatctttctgggggcttatgaccgaacgcacagcttgctgttggaagttggcagaaagagtccttgaagcagagacaagcctcacctccacttctgtcaagagaggggcctgcagtgcaaaccctcttccgctgagcagctgtctgaactataggccccagtgctgaagaccagttgtgctaagataccggcatggagattgtgccatccgtggtataggctggctggtatgaagtcattggcctgtatgccagagagctaagagaagaaaacggggtctgtggcggtactctgaacaatttcctcagaacctcttaataaataagtttggtaatgctgaggccaggccttttagagctttcatttgatctgtatctgatctttcatttcctgccacctgatggtggattcagcagaaggcaagatggttataattctaaaagaatagcttgtttgtttgtttgggaaaaggagacttggggaagagttgtgtatgtgggtgtttctccccctagttaattcctgttgtgtaagggtaggctttgttgaaaaagaaagaaagattgaactacaggtgcatagcaagcactctttctgggtaactaggctgctggttttaattaccctcagatttcacccataaaaacgcacaattgtattattttacagagatgtgtccagcgccccctgtggtgtgtgagagaaagcagctgcaactcaagtgactaggtgggcccagctggcttcgtgcaggagggcacggtgggtgagccattctcgccattctcatgtcagactgaaaggagggcctgggccagctttgaaaaggcaggatgaaatggaaaggtcaccacacgaagggggatggacacaacgaagggggatggacac

SEQ ID NO: 281886 - DNA, 1273 bp, Homo sapiens
taataccgaaacgaggaggtttaaggtaaacttacgaaaggggaccctttaaagaacacgcacagttttaagacgagattcctttttctttggtccagtttcccttatgggagtccttaaaagccctctggtcctggaggcaggatcatgtggtggattcttggcagtcagcagtctgtggagcttttgcaggtggatttgccgctgcagtcaccacccctctagacgtggcaaagacaagaattacgctggcaaaggctggctccagcactgctgatgggaatgtgctctctgtcctgcatggggtctggcggtcacaggggctggcaggattatttgcaggtgtcttccctcgaatggcagccatcagtctgggaggtttcatctttctgggggcttatgaccgaacgcacagcttgctgttggaagttggcagaaagagtccttgaagcagagacaagcctcacctccacttctgtcaagagaggggcctgcagtgcaaaccctcttccgctgagcagctgtctgaactataggccccagtgctgaagaccagttgtgctaagataccggcatggagattgtgccatccgtggtataggctggctggtatgaagtcattggcctgtatgccagagagctaagagaagaaaacggggtctgtggcggtactctgaacaatttcctcagaacctcttaataaataagtttggtaatgctgaggccaggccttttagagctttcatttgatctgtatctgatctttcatttcctgccacctgatggtggattcagcagaaggcaagatggttataattctaaaagaatagcttgtttgtttgtttgggaaaaggagacttggggaagagttgtgtatgtgggtgtttctccccctagttaattcctgttgtgtaagggtaggctttgttgaaaaagaaagaaagattgaactacaggtgcatagcaagcactctttctgggtaactaggctgctggttttaattaccctcagatttcacccataaaaacgcacaattgtattattttacagagatgtgtccagcgccccctgtggtgtgtgagagaaagcagctgcaactcaagtgactaggtgggcccagctggcttcgtgcaggagggcacggtgggtgagccattctcgccattctcatgtcagactgaaaggagggcctgggccagctttgaaaaggcaggatgaaatggaaaggtcaccacacgaagggggatggacacaacgaagggggatggacac

SEQ ID NO: 281887 - DNA, 1734 bp, Homo sapiens
  misc_feature (218)..(218): n is a, c, g, or t
ctggatctcggccacggatcttttgctcgcgaaagttcctccgtctagctgcacacaacgctgctgcaggaaaccgaggtaagggatttgccgagacttagctccaccacactccccgaggccccgccctcctctctggccctcccctaggcccaggtgtctcgcgttgcacgtgcagttgttgtggttctacgtcacgtggtcccggaagtcaaganagacccgcctcaaacatggcggcgcccagcgcgcgaggacgtgatccgcttctgctccggcttggattgtagccttgacgaggtctgagcgaccatggaccggccggggttcgtggcagcgctggtgctgctgcattttttatcacctatgaatatgtgaagtggtttttgcatgctgattcatcttcatatttgacacctatgaaacatatgttggctgcctctgctggagaagtggttgcctgcctgattcgagttccatctgaagtggttaagcagagggcacaggtatctgcttctacaagaacatttcagattttctctaacatcttatatgaagagggtatccaagggttgtatcgaggctataaaagcacagttttaagagagattcctttttctttggtccagtttcccttatgggagtccttaaaagtggatttgccgctgcagtcaccacccctctagacgtggcaaagacaagaattacgctggcaaaggctggctccagcactgctgatgggaatgtgctctctgtcctgcatggggtctggcggtcacaggggctggcaggattatttgcaggtgtcttccctcgaatggcagccatcagtctgggaggtttcatctttctgggggcttatgaccgaacgcacagcttgctgttggaagttggcagaaagagtccttgaagcagagacaagcctcacctccacttctgtcaagagaggggcctgcagtgcaaaccctcttccgctgagcagctgtctgaactataggccccagtgctgaagaccagttgtgctaagataccggcatggagattgtgccatccgtggtataggctggctggtatgaagtcattggcctgtatgccagagagctaagagaagaaaacggggtctgtggcggtactctgaacaatttcctcagaacctcttaataaataagtttggtaatgctgaggccaggccttttagagctttcatttgatctgtatctgatctttcatttcctgccacctgatggtggattcagcagaaggcaagatggttataattctaaaagaatagcttgtttgtttgtttgggaaaaggagacttggggaagagttgtgtatgtgggtgtttctccccctagttaattcctgttgtgtaagggtaggctttgttgaaaaagaaagaaagattgaactacaggtgcatagcaagcactctttctgggtaactaggctgctggttttaattaccctcagatttcacccataaaaacgcacaattgtattattttacagagatgtgtccagcgccccctgtggtgtgtgagagaaagcagctgcaactcaagtgactaggtgggcccagctggcttcgtgcaggagggcacggtgggtgagccattctcgccattctcatgtcagactgaaaggagggcctgggccagctttgaaaaggcaggatgaaatggaaaggtcaccacacgaagggggatggacacaacgaagggggatggacac

SEQ ID NO: 281888 - DNA, 1335 bp, Homo sapiens
gttggtgaagggtggaaggctgggtaccagctgatggtcagcttgcctctacggatgttgcctgcctgattcgagttccatctgaagtggttaagcagagggcacaggtatctgcttctacaagaacatttcagattttctctaacatcttatatgaagagggtatccaagggttgtatcgaggctataaaagcacagttttaagagagattcctttttctttggtccagtttcccttatgggagtccttaaaagtggatttgccgctgcagtcaccacccctctagacgtggcaaagacaagaattacgctggcaaaggctggctccagcactgctgatgggaatgtgctctctgtcctgcatggggtctggcggtcacaggggctggcaggattatttgcaggtgtcttccctcgaatggcagccatcagtctgggaggtttcatctttctgggggcttatgaccgaacgcacagcttgctgttggaagttggcagaaagagtccttgaagcagagacaagcctcacctccacttctgtcaagagaggggcctgcagtgcaaaccctcttccgctgagcagctgtctgaactataggccccagtgctgaagaccagttgtgctaagataccggcatggagattgtgccatccgtggtataggctggctggtatgaagtcattggcctgtatgccagagagctaagagaagaaaacggggtctgtggcggtactctgaacaatttcctcagaacctcttaataaataagtttggtaatgctgaggccaggccttttagagctttcatttgatctgtatctgatctttcatttcctgccacctgatggtggattcagcagaaggcaagatggttataattctaaaagaatagcttgtttgtttgtttgggaaaaggagacttggggaagagttgtgtatgtgggtgtttctccccctagttaattcctgttgtgtaagggtaggctttgttgaaaaagaaagaaagattgaactacaggtgcatagcaagcactctttctgggtaactaggctgctggttttaattaccctcagatttcacccataaaaacgcacaattgtattattttacagagatgtgtccagcgccccctgtggtgtgtgagagaaagcagctgcaactcaagtgactaggtgggcccagctggcttcgtgcaggagggcacggtgggtgagccattctcgccattctcatgtcagactgaaaggagggcctgggccagctttgaaaaggcaggatgaaatggaaaggtcaccacacgaagggggatggacacaacgaagggggatggacac

SEQ ID NO: 281889 - DNA, 1730 bp, Homo sapiens
  misc_feature (218)..(218): n is a, c, g, or t
ctggatctcggccacggatcttttgctcgcgaaagttcctccgtctagctgcacacaacgctgctgcaggaaaccgaggtaagggatttgccgagacttagctccaccacactccccgaggccccgccctcctctctggccctcccctaggcccaggtgtctcgcgttgcacgtgcagttgttgtggttctacgtcacgtggtcccggaagtcaaganagacccgcctcaaacatggcggcgcccagcgcgcgaggacgtgatccgcttctgctccggcttggattgtagccttgacgaggtctgagcgaccatggaccggccggggttcgtggcagcgctggtgctgctgcattttttatcacctatgaatatgtgaagtggtttttgcatgctgattcatcttcatatttgacacctatgaaacatatgttggctgcctctgctggagaagtggttgcctgcctgattcgagttccatctgaagtggttaagcagagggcacaggtatctgcttctacaagaacatttcagattttctctaacatcttatatgaagagggtatccaagggttgtatcgaggctataaaagcacagttttaagagagattcctttttctttggtccagtttcccttatgggagtccttaaaagccctctggtcctggaggcaggatcatgtggtggattcttggcagtcagcagtctgtggagcttttgcaggtggatttgccgctgcagtcaccacccctctagacgtggcaaagacaagaattacgctggcaaagattatttgcaggtgtcttccctcgaatggcagccatcagtctgggaggtttcatctttctgggggcttatgaccgaacgcacagcttgctgttggaagttggcagaaagagtccttgaagcagagacaagcctcacctccacttctgtcaagagaggggcctgcagtgcaaaccctcttccgctgagcagctgtctgaactataggccccagtgctgaagaccagttgtgctaagataccggcatggagattgtgccatccgtggtataggctggctggtatgaagtcattggcctgtatgccagagagctaagagaagaaaacggggtctgtggcggtactctgaacaatttcctcagaacctcttaataaataagtttggtaatgctgaggccaggccttttagagctttcatttgatctgtatctgatctttcatttcctgccacctgatggtggattcagcagaaggcaagatggttataattctaaaagaatagcttgtttgtttgtttgggaaaaggagacttggggaagagttgtgtatgtgggtgtttctccccctagttaattcctgttgtgtaagggtaggctttgttgaaaaagaaagaaagattgaactacaggtgcatagcaagcactctttctgggtaactaggctgctggttttaattaccctcagatttcacccataaaaacgcacaattgtattattttacagagatgtgtccagcgccccctgtggtgtgtgagagaaagcagctgcaactcaagtgactaggtgggcccagctggcttcgtgcaggagggcacggtgggtgagccattctcgccattctcatgtcagactgaaaggagggcctgggccagctttgaaaaggcaggatgaaatggaaaggtcaccacacgaagggggatggacacaacgaagggggatggacac

SEQ ID NO: 281890 - DNA, 2173 bp, Homo sapiens
  misc_feature (218)..(218): n is a, c, g, or t
ctggatctcggccacggatcttttgctcgcgaaagttcctccgtctagctgcacacaacgctgctgcaggaaaccgaggtaagggatttgccgagacttagctccaccacactccccgaggccccgccctcctctctggccctcccctaggcccaggtgtctcgcgttgcacgtgcagttgttgtggttctacgtcacgtggtcccggaagtcaaganagacccgcctcaaacatggcggcgcccagcgcgcgaggacgtgatccgcttctgctccggcttggattgtagccttgacgaggtctgagcgaccatggaccggccggggttcgtggcagcgctggtggctggtggggtagcaggtgtttctgttgacttgatattatttcctctggataccattaaaaccaggctgcagagtccccaaggatttagtaaggctggtggttttcatggaatatatgctggcgttccttctgctgctattggatcctttcctaatgctgctgcattttttatcacctatgaatatgtgaagtggtttttgcatgctgattcatcttcatatttgacacctatgaaacatatgttggctgcctctgctggagaagtggttgcctgcctgattcgagttccatctgaagtggttaagcagagggcacaggtatctgcttctacaagaacatttcagattttctctaacatcttatatgaagagggtatccaagggttgtatcgaggctataaaagcacagttttaagagagattcctttttctttggtccagtttcccttatgggagtccttaaaagccctctggtcctggaggcaggatcatgtggtggattcttggcagtcagcagtctgtggagcttttgcaggtggatttgccgctgcagtcaccacccctctagacgtggcaaagacaagaattacgctggcaaaggctggctccagcactgctgatgggaatgtgctctctgtcctgcatggggtctggcggtcacaggggctggcaggggaccatataccagggattttcttgcaagagcaaagcagtggcctccctttgcagagggtcggtcggcagctgcctggacttcgggcgtctcagctggcagtgccacctcctcatcctgatgccgagttggatcacttatgtgattgtagtttttgtgtacctttggcagttttaatctcagctatttgatgatctggaggacatgaagtagattatttgcaggtgtcttccctcgaatggcagccatcagtctgggaggtttcatctttctgggggcttatgaccgaacgcacagcttgctgttggaagttggcagaaagagtccttgaagcagagacaagcctcacctccacttctgtcaagagaggggcctgcagtgcaaaccctcttccgctgagcagctgtctgaactataggccccagtgctgaagaccagttgtgctaagataccggcatggagattgtgccatccgtggtataggctggctggtatgaagtcattggcctgtatgccagagagctaagagaagaaaacggggtctgtggcggtactctgaacaatttcctcagaacctcttaataaataagtttggtaatgctgaggccaggccttttagagctttcatttgatctgtatctgatctttcatttcctgccacctgatggtggattcagcagaaggcaagatggttataattctaaaagaatagcttgtttgtttgtttgggaaaaggagacttggggaagagttgtgtatgtgggtgtttctccccctagttaattcctgttgtgtaagggtaggctttgttgaaaaagaaagaaagattgaactacaggtgcatagcaagcactctttctgggtaactaggctgctggttttaattaccctcagatttcacccataaaaacgcacaattgtattattttacagagatgtgtccagcgccccctgtggtgtgtgagagaaagcagctgcaactcaagtgactaggtgggcccagctggcttcgtgcaggagggcacggtgggtgagccattctcgccattctcatgtcagactgaaaggagggcctgggccagctttgaaaaggcaggatgaaatggaaaggtcaccacacgaagggggatggacacaacgaagggggatggacac

SEQ ID NO: 281891 - DNA, 2098 bp, Homo sapiens
  misc_feature (218)..(218): n is a, c, g, or t
ctggatctcggccacggatcttttgctcgcgaaagttcctccgtctagctgcacacaacgctgctgcaggaaaccgaggtaagggatttgccgagacttagctccaccacactccccgaggccccgccctcctctctggccctcccctaggcccaggtgtctcgcgttgcacgtgcagttgttgtggttctacgtcacgtggtcccggaagtcaaganagacccgcctcaaacatggcggcgcccagcgcgcgaggacgtgatccgcttctgctccggcttggattgtagccttgacgaggtctgagcgaccatggaccggccggggttcgtggcagcgctggtgctgctgcattttttatcacctatgaatatgtgaagtggtttttgcatgctgattcatcttcatatttgacacctatgaaacatatgttggctgcctctgctggagaagtggttgcctgcctgattcgagttccatctgaagtggttaagcagagggcacaggtatctgcttctacaagaacatttcagattttctctaacatcttatatgaagagggtatccaagggttgtatcgaggctataaaagcacagttttaagagagattcctttttctttggtccagtttcccttatgggagtccttaaaagccctctggtcctggaggcaggatcatgtggtggattcttggcagtcagcagtctgtggagcttttgcaggtggatttgccgctgcagtcaccacccctctagacgtggcaaagacaagaattacgctggcaaaggctggctccagcactgctgatgggaatgtgctctctgtcctgcatggggtctggcggtcacaggggctggcaggattatttgcaggtgtcttccctcgaatggcagccatcagtctgggaggtttcatctttctgggggcttatgaccgaacgcacagcttgctgttggaagttggcagaaagagtccttgaagcagagacaagcctcacctccacttctgtcaagagaggggcctgcagtgcaaaccctcttccgctgagcagctgtctgaactataggccccagtgctgaagaccagttgtgctaagataccggcatggagattgtgccatccgtggtataggctggctggtatgaagtcattggcctgtatgccagagagctaagagaagaaaacggggtctgtggcggtactctgaacaatttcctcagaacctcttaataaataagtttggtaatgctgaggccaggccttttagagctttcatttgatctgtatctgatctttcatttcctgccacctgatggtggattcagcagaaggcaagatggttataattctaaaagaatagcttgtttgtttgtttgggaaaaggagacttggggaagagttgtgtatgtgggtgtttctccccctagttaattcctgttgtgtaagggtaggctttgttgaaaaagaaagaaagattgaactacaggtgcatagcaagcactctttctgggtaactaggctgctggttttaattaccctcagatttcacccataaaaacgcacaattgtattattttacagagatgtgtccagcgccccctgtggtgtgtgagagaaagcagctgcaactcaagtgactaggtgggcccagctggcttcgtgcaggagggcacggtgggtgagccattctcgccattctcatgtcagactgaaaggagggcctgggccagctttgaaaaggcaggatgaaatggaaaggtcaccacacttagggattttagaccttgactaacaagctccaggtgtagaaaaattcaaaacaaaatgtcaggaatctagcagtgttgtctgccctggagcaaacaaacagtatgtgattttgcttcgcctattttttttttcttttttgggggaagataattaaaggcagaatgactgcgtttgtaaaagaaggaccaccaactatactgacatttataaatgaacctttattaaagacacttcaatgccatttgttagacacttcaatattttacatggttttcaatgtacactgtaccaaaatttctataaataaataactttgtacataaaagt

SEQ ID NO: 281892 - DNA, 1961 bp, Homo sapiens
  misc_feature (218)..(218): n is a, c, g, or t
ctggatctcggccacggatcttttgctcgcgaaagttcctccgtctagctgcacacaacgctgctgcaggaaaccgaggtaagggatttgccgagacttagctccaccacactccccgaggccccgccctcctctctggccctcccctaggcccaggtgtctcgcgttgcacgtgcagttgttgtggttctacgtcacgtggtcccggaagtcaaganagacccgcctcaaacatggcggcgcccagcgcgcgaggacgtgatccgcttctgctccggcttggattgtagccttgacgaggtctgagcgaccatggaccggccggggttcgtggcagcgctggtggctggtggggtagcaggtgtttctgttgacttgatattatttcctctggataccattaaaaccaggctgcagagtccccaaggatttagtaaggctggtggttttcatggaatatatgctggcgttccttctgctgctattggatcctttcctaatgctgctgcattttttatcacctatgaatatgtgaagtggtttttgcatgctgattcatcttcatatttgacacctatgaaacatatgttggctgcctctgctggagaagtggttgcctgcctgattcgagttccatctgaagtggttaagcagagggcacaggtatctgcttctacaagaacatttcagattttctctaacatcttatatgaagagggtatccaagggttgtatcgaggctataaaagcacagttttaagagagattcctttttctttggtccagtttcccttatgggagtccttaaaagccctctggtcctggaggcaggatcatgtggtggattcttggcagtcagcagtctgtggagcttttgcaggtggatttgccgctgcagtcaccacccctctagacgtggcaaagacaagaattacgctggcaaaggctggctccagcactgctgatgggaatgtgctctctgtcctgcatggggtctggcggtcacaggggctggcaggattatttgcaggtgtcttccctcgaatggcagccatcagtctgggaggtttcatctttctgggggcttatgaccgaacgcacagcttgctgttggaagttggcagaaagagtccttgaagcagagacaagcctcacctccacttctgtcaagagaggggcctgcagtgcaaaccctcttccgctgagcagctgtctgaactataggccccagtgctgaagaccagttgtgctaagataccggcatggagattgtgccatccgtggtataggctggctggtatgaagtcattggcctgtatgccagagagctaagagaagaaaacggggtctgtggcggtactctgaacaatttcctcagaacctcttaataaataagtttggtaatgctgaggccaggccttttagagctttcatttgatctgtatctgatctttcatttcctgccacctgatggtggattcagcagaaggcaagatggttataattctaaaagaatagcttgtttgtttgtttgggaaaaggagacttggggaagagttgtgtatgtgggtgtttctccccctagttaattcctgttgtgtaagggtaggctttgttgaaaaagaaagaaagattgaactacaggtgcatagcaagcactctttctgggtaactaggctgctggttttaattaccctcagatttcacccataaaaacgcacaattgtattattttacagagatgtgtccagcgccccctgtggtgtgtgagagaaagcagctgcaactcaagtgactaggtgggcccagctggcttcgtgcaggagggcacggtgggtgagccattctcgccattctcatgtcagactgaaaggagggcctgggccagctttgaaaaggcaggatgaaatggaaaggtcaccacacgaagggggatggacacaacgaagggggatggacac

SEQ ID NO: 281893 - DNA, 1916 bp, Homo sapiens
  misc_feature (218)..(218): n is a, c, g, or t
ctggatctcggccacggatcttttgctcgcgaaagttcctccgtctagctgcacacaacgctgctgcaggaaaccgaggtaagggatttgccgagacttagctccaccacactccccgaggccccgccctcctctctggccctcccctaggcccaggtgtctcgcgttgcacgtgcagttgttgtggttctacgtcacgtggtcccggaagtcaaganagacccgcctcaaacatggcggcgcccagcgcgcgaggacgtgatccgcttctgctccggcttggattgtagccttgacgaggtctgagcgaccatggaccggccggggttcgtggcagcgctggtggctggtggggtagcaggtgtttctgttgacttgatattatttcctctggataccattaaaaccaggctgcagagtccccaaggatttagtaaggctggtggttttcatggaatatatgctggcgttccttctgctgctattggatcctttcctaatgctgctgcattttttatcacctatgaatatgtgaagtggtttttgcatgctgattcatcttcatatttgacacctatgaaacatatgttggctgcctctgctggagaagtggttgcctgcctgattcgagttccatctgaagtggttaagcagagggcacaggtatctgcttctacaagaacatttcagattttctctaacatcttatatgaagagggtatccaagggttgtatcgaggctataaaagcacagttttaagagaggccctctggtcctggaggcaggatcatgtggtggattcttggcagtcagcagtctgtggagcttttgcaggtggatttgccgctgcagtcaccacccctctagacgtggcaaagacaagaattacgctggcaaaggctggctccagcactgctgatgggaatgtgctctctgtcctgcatggggtctggcggtcacaggggctggcaggattatttgcaggtgtcttccctcgaatggcagccatcagtctgggaggtttcatctttctgggggcttatgaccgaacgcacagcttgctgttggaagttggcagaaagagtccttgaagcagagacaagcctcacctccacttctgtcaagagaggggcctgcagtgcaaaccctcttccgctgagcagctgtctgaactataggccccagtgctgaagaccagttgtgctaagataccggcatggagattgtgccatccgtggtataggctggctggtatgaagtcattggcctgtatgccagagagctaagagaagaaaacggggtctgtggcggtactctgaacaatttcctcagaacctcttaataaataagtttggtaatgctgaggccaggccttttagagctttcatttgatctgtatctgatctttcatttcctgccacctgatggtggattcagcagaaggcaagatggttataattctaaaagaatagcttgtttgtttgtttgggaaaaggagacttggggaagagttgtgtatgtgggtgtttctccccctagttaattcctgttgtgtaagggtaggctttgttgaaaaagaaagaaagattgaactacaggtgcatagcaagcactctttctgggtaactaggctgctggttttaattaccctcagatttcacccataaaaacgcacaattgtattattttacagagatgtgtccagcgccccctgtggtgtgtgagagaaagcagctgcaactcaagtgactaggtgggcccagctggcttcgtgcaggagggcacggtgggtgagccattctcgccattctcatgtcagactgaaaggagggcctgggccagctttgaaaaggcaggatgaaatggaaaggtcaccacacgaagggggatggacacaacgaagggggatggacac

SEQ ID NO: 281894 - DNA, 1891 bp, Homo sapiens
  misc_feature (218)..(218): n is a, c, g, or t
ctggatctcggccacggatcttttgctcgcgaaagttcctccgtctagctgcacacaacgctgctgcaggaaaccgaggtaagggatttgccgagacttagctccaccacactccccgaggccccgccctcctctctggccctcccctaggcccaggtgtctcgcgttgcacgtgcagttgttgtggttctacgtcacgtggtcccggaagtcaaganagacccgcctcaaacatggcggcgcccagcgcgcgaggacgtgatccgcttctgctccggcttggattgtagccttgacgaggtctgagcgaccatggaccggccggggttcgtggcagcgctggtggctggtggggtagcaggtgtttctgttgacttgatattatttcctctggataccattaaaaccaggctgcagagtccccaaggatttagtaaggctggtggttttcatggaatatatgctggcgttccttctgctgctattggatcctttcctaatgctgctgcattttttatcacctatgaatatgtgaagtggtttttgcatgctgattcatcttcatatttgacacctatgaaacatatgttggctgcctctgctggagaagtggttgcctgcctgattcgagttccatctgaagtggttaagcagagggcacaggtatctgcttctacaagaacatttcagattttctctaacatcttatatgaagagggtatccaagggttgtatcgaggctataaaagcacagttttaagagagattcctttttctttggtccagtttcccttatgggagtccttaaaagtggatttgccgctgcagtcaccacccctctagacgtggcaaagacaagaattacgctggcaaaggctggctccagcactgctgatgggaatgtgctctctgtcctgcatggggtctggcggtcacaggggctggcaggattatttgcaggtgtcttccctcgaatggcagccatcagtctgggaggtttcatctttctgggggcttatgaccgaacgcacagcttgctgttggaagttggcagaaagagtccttgaagcagagacaagcctcacctccacttctgtcaagagaggggcctgcagtgcaaaccctcttccgctgagcagctgtctgaactataggccccagtgctgaagaccagttgtgctaagataccggcatggagattgtgccatccgtggtataggctggctggtatgaagtcattggcctgtatgccagagagctaagagaagaaaacggggtctgtggcggtactctgaacaatttcctcagaacctcttaataaataagtttggtaatgctgaggccaggccttttagagctttcatttgatctgtatctgatctttcatttcctgccacctgatggtggattcagcagaaggcaagatggttataattctaaaagaatagcttgtttgtttgtttgggaaaaggagacttggggaagagttgtgtatgtgggtgtttctccccctagttaattcctgttgtgtaagggtaggctttgttgaaaaagaaagaaagattgaactacaggtgcatagcaagcactctttctgggtaactaggctgctggttttaattaccctcagatttcacccataaaaacgcacaattgtattattttacagagatgtgtccagcgccccctgtggtgtgtgagagaaagcagctgcaactcaagtgactaggtgggcccagctggcttcgtgcaggagggcacggtgggtgagccattctcgccattctcatgtcagactgaaaggagggcctgggccagctttgaaaaggcaggatgaaatggaaaggtcaccacacgaagggggatggacacaacgaagggggatggacac

SEQ ID NO: 281895 - DNA, 1297 bp, Homo sapiens
  misc_feature (218)..(218): n is a, c, g, or t
  misc_feature (1262)..(1262): n is a, c, g, or t
ctggatctcggccacggatcttttgctcgcgaaagttcctccgtctagctgcacacaacgctgctgcaggaaaccgaggtaagggatttgccgagacttagctccaccacactccccgaggccccgccctcctctctggccctcccctaggcccaggtgtctcgcgttgcacgtgcagttgttgtggttctacgtcacgtggtcccggaagtcaaganagacccgcctcaaacatggcggcgcccagcgcgcgaggacgtgatccgcttctgctccggcttggattgtagccttgacgaggtctgagcgaccatggaccggccggggttcgtggcagcgctggtgctgctgcattttttatcacctatgaatatgtgaagtggtttttgcatgctgattcatcttcatatttgacacctatgaaacatatgttggctgcctctgctggagaagtggttgcctgcctgattcgagttccatctgaagtggttaagcagagggcacaggtatctgcttctacaagaacatttcagattttctctaacatcttatatgaagagggtatccaagggttgtatcgaggctataaaagcacagttttaagagagattcctttttctttggtccagtttcccttatgggagtccttaaaagccctctggtcctggaggcaggatcatgtggtggattcttggcagtcagcagtctgtggagcttttgcaggtggatttgccgctgcagtcaccacccctctagacgtggcaaagacaagaattacgctggcaaaggctggctccagcactgctgatgggaatgtgctctctgtcctgcatggggtctggcggtcacaggggctggcaggattatttgcaggtgtcttccctcgaatggcagccatcagtctgggaggtttcatctttctgggggcttatgaccgaacgcacagcttgctgttggaagttggcagaaagagtccttgaagcagagacaagcctcacctccacttctgtcaagagaggggcctgcagtgcaaaccctcttccgctgagcagctgtctgaactataggccccagtgctgaagaccagttgtgctaagataccggcatggagattgtgccatccgtggtataggctggctggtatgaagtcattggcctgtatgccagagagctaagagaagaaaacggggtctgtggcggtactctgaacaatttcctcagaacctcttaataaataaggatgcggccagcatatgggaganaatcactggttttaatatgttcaccatatcacaca

SEQ ID NO: 281896 - DNA, 1597 bp, Homo sapiens
  misc_feature (218)..(218): n is a, c, g, or t
ctggatctcggccacggatcttttgctcgcgaaagttcctccgtctagctgcacacaacgctgctgcaggaaaccgaggtaagggatttgccgagacttagctccaccacactccccgaggccccgccctcctctctggccctcccctaggcccaggtgtctcgcgttgcacgtgcagttgttgtggttctacgtcacgtggtcccggaagtcaaganagacccgcctcaaacatggcggcgcccagcgcgcgaggacgtgatccgcttctgctccggcttggattgtagccttgacgaggtctgagcgaccatggaccggccggggttcgtggcagcgctggtgctgctgcattttttatcacctatgaatatgtgaagtggtttttgcatgctgattcatcttcatatttgacacctatgaaacatatgttggctgcctctgctggagaagtggttgcctgcctgattcgagttccatctgaagtggttaagcagagggcacaggtatctgcttctacaagaacatttcagattttctctaacatcttatatgaagagggtatccaagggttgtatcgaggctataaaagcacagttttaagagagattcctttttctttggtccagtttcccttatgggagtccttaaaagccctctggtcctggaggcaggatcatgtggtggattcttggcagtcagcagtctgtggagcttttgcaggtggatttgccgctgcagtcaccacccctctagacgtggcaaagacaagaattacgctggcaaaggctggctccagcactgctgatgggaatgtgctctctgtcctgcatggggtctggcggtcacaggggctggcaggattatttgcaggtgtcttccctcgaatggcagccatcagtctgggaggtttcatctttctgggggcttatgaccgaacgcacagcttgctgttggaagttggcagaaagagtccttgaagcagagacaagcctcacctccacttctgtcaagagaggggcctgcagtgcaaaccctcttccgctgagcagctgtctgaactataggccccagtgctgaagaccagttgtgctaagataccggcatggagattgtgccatccgtggtataggctggctgagatgtgtccagcgccccctgtggtgtgtgagagaaagcagctgcaactcaagtgactaggtgggcccagctggcttcgtgcaggagggcacgacggacagattctacgccttacagacagacaggacttaaacctaaaaggaaaagccattcactgcaagtgtggatggcacttgcacccctggctctacagacagggaagcctgttgcaggggcatccacacatgagcagtgctcacctgaagctccttccggcgcatgtggagtcccaccgcacagcagcctaggggtctatgaagtgcaatataaatccaaggccttccatccttcccaccccgcaccaaaaactcctgtgaacaaatgtggttgtagcctctataaattccagccatgcgttaaggcaccagaactatttccccaccccctccaaaattaaacagcaacctgatacgaaaaa

SEQ ID NO: 281897 - DNA, 3757 bp, Homo sapiens
cgaacactggcctgaccctgggctttagaaacccatggacaacaggaaggaagcttattaacccctctcttccccctccctcttctccccggtggagaatcagctcctcctcctcccggtcgtgagaccctggtgcaaaatgcaaacaaccacccgctttccccaccctgcgcgcttctcccagaggagggagagggaagaggcgagggcgcagccccaagccgagtccagcaagtctgtcaatcggacgtgaacgtcccgacgagacaacttgaacctcagggccctcgcgccagccggacaccgcaggtaccccctttacctgcttctctgctgggtttgcatccgataccccaactcctagcctcattttccccccagccccataatattccggacccctgctccccgtgcaggtggtgcaaacgcccctgctctccggcgccccctgccgggaagagggaaggcggcggcggccgcggaggagcaggacgcttggtccggacggagctcggcgctgggaagaagccgggagcttccctgatggtgccgccgcctccgagccggggaggagctgccaggggccagctgggcaggagcctgggtccgctgctgctgctcctggcgttgggacacacgtggacctacagagaggagccggaggacggcgacagagaaatctgctcagagagcaaaatcgcgacgactaaatacccgtgtctgaagtcttcaggcgagctcaccacatgctacaggaaaaagtgctgcaaaggatataaatttgttcttggacaatgcatcccagaagattacgacgtttgtgccgaggctccctgtgaacagcagtgcacggacaactttggccgagtgctgtgtacttgttatccgggataccgatatgaccgggagagacaccggaagcgggagaagccatactgtctggatattgatgagtgtgccagcagcaatgggacgctgtgtgcccacatctgcatcaataccttgggcagctaccgctgcgagtgccgggaaggctacatccgggaagatgatgggaagacatgtaccaggggagacaaatatcccaatgacactggccatgagaagtctgagaacatggtgaaagccggaacttgctgtgccacatgcaaggagttctaccagatgaagcagaccgtgctgcagctgaagcaaaagattgctctgctccccaacaatgcagctgacctgggcaagtatatcactggtgacaaggtgctggcctcaaacacctaccttccaggacctcctggcctgcctgggggccagggccctcccggctcaccaggaccaaagggaagcccaggcttccccggtatgccaggccctcctgggcagcccggcccacggggctcaatgggacccatgggaccatctcctgatctgtcccacattaagcaaggccggaggggccctgtgggtccaccaggggcaccaggaagagatggttctaagggggagagaggagcgcctgggcccagagggtctccaggaccccctggttctttcgacttcctgctacttatgctggctgacatccgcaatgacatcactgagctgcaggaaaaggtgttcgggcaccggactcactcttcagcagaggagttccctttacctcaggaatttcccagctacccagaagccatggacctgggctctggagatgaccatccaagaagaactgagacaagagacttgagagcccccagagacttctacccatagcacatcccaacaccgtcacgccaaaggaagagaaagatcaactcacctgcagttaaaccatctaaagagaagaaagaccactggagacctagaaaacatacatttttctcttctcttctcctgacgtctctccactcctcttcttccaaatacgatgctattttcagagtcccctcctaggcctgcagacatgagggagtgaatgattgatttacctgcttctcactaagagtccattggggtggtttgcattgtaacttttcttttacatcctatttttccaggaactttggatttaagtactctcacagtgtcttaaatcataaattcttgaagttaaatttggcagagtatcaaaagggggaaaatgacaaagtgagctctaagaaaatgtgaggctacttctaagatgtgtgttcacaatagaccataactcctctagtatcaaaattggggctcttcagttaaaaaggggtggggaggacaaacgtgtcgatgtgctttggtggagaattttttccttgtgcttctagtagactttaaatattgtatccctttgtcaaaccttgtttcccaaattcaattaaagagaggagagaattgaatggcgtttagagaagatagaaaagaatcacagtcatatatttactgttatatagattgccacattctaaaattcaaatacggtgcttaaggtttcatgccatgcttatctgtaagtatcctatttagggaagaagattaaactctcttttcaaaaaaacaaagtgaaatgcctggattcacattaaaacaatgggctctcgtttgctagaatattttaaagctgtttaatcaacagtggagtctgctctataaatatagattatttgttcaataaactggctgagcttagagagaggtgcagaattcctggttctgagcaggtgcccagaaggtaccattaggtgccatgatccaggctgaaccaatatacagtggggctgaagtctgcaaggaggttgctggcttgggctgacctcactaatgccatcagcagcggtaggtaaattttttctccttgggtattacaagtttttgtctggagccaaccaagcttgccaccaacatattgagagtaatacactattgaaagttatcttggatggggagaaaaaaaaatagtggttttccttgtttgcaaaaacttccttcctattctcattttttcttaattttctttaatttagtccaagttccagttcttttaggccttctctttgatttattttcccctgcatgtgagaagcagttcagaaaaaggtctatatctccacctcctagtgagttagagtgttttctcagagcacctctgggtggcaaagggaagcatgttcctgccaaggtttgctgtggattcagaagcaccaggagcaagagaccagaaggatgatctgctcctttgtaacgttgttgagggccctcttgtttccaatgagcagcttataggttactcacagtccactttctcactggacacacaaagtggctctttatctacctttgcgggagattttcactctcctgcaaatgatcgttctcacactcatattagctcatgttggaatttcccatcctgccatgtcctttcccatttctttttggcttttttgcctccaccttttagcccacatcatttaactccactactgtgaaagcttgcttaaagaaaatccctcttggccgggtgtggtagcccacgcctctaatcccagcactttgggaggctgaggcggggagatcacaaggtcaggagatcgagaccagcctgaccaacatggtgaaaccctgtctctactaaaaatacaaaaattagctgggcgtgttggcacacacctgtaatcccagctactcaggaggctgaggcaggagaattactttaacctgcggggggagcctagattgcgctactgcactccagcctaggcaacagagggagactctgtctcattaa

SEQ ID NO: 281898 - DNA, 668 bp, Homo sapiens
gaggagcaggacgcttggtccggacggagctcggcgctgggaagaagccgggagcttccctgatggtgccgccgcctccgagccggggaggagctgccaggggccagctgggcaggagcctgggtccgctgctgctgctcctggcgttgggacacacgtggacctacagagaggagccggaggacggcgacaggtaagcgctgcaagccccagcggagggcgagctcctgcttgatgcgcgcccggctcgcggggtgcgggcggtcctccccggcgcccactcccacagcgatccgcacgccctcacttctccggggataaggagagtgctcagctgtcctgggcgacacttccctccgctcccgggtatcagcctttgcgccctgccatccgtgggtcgcgtcagggatacccttcgccccgcgttcctgcctccccccgggtgccacactggctggcacagctcgtgaaccccgcttcctttctcctggagctggttcgcttcgtcgtgaccctcgcgtggctcgtccctgtggccggagtctgccccgcgtacgcgtttggggaccagcccctgcccagagcgccgggacggggagcctggcgatccccacgcgccagggattccccagcgcgcgctgcccgcctccgctctcccgctgagaatc

SEQ ID NO: 281899 - DNA, 739 bp, Homo sapiens
cggaccgagggttcgagggagggacacggaccaggaacctgagctaggtcaaagacgcccgggccaggtgccccgtcgcaggtgcccctggccggagatgcggtaggaggggcgagcgcgagaagccccttcctcggcgctgccaacccgccacccagcccatggcgaaccccgggctggggctgcttctggcgctgggcctgccgttcctgctggcccgctggggccgagcctgggggcaaatacagaccacttctgcaaatgagaatagcactgttttgccttcatccaccagctccagctccgatggcaacctgcgtccagaagccatcactgctatcatcgtggtcttctccctcttggctgccttgctcctggctgtggggctggcactgttggtgcggaagcttcgggagaagcggcagacggagggcacctaccggcccagtagcgaggagcagctttcagttctcccatgcagccgaggcccgggcccctcaggactccaaggagacggtgcagggctgcctgcccatctaggtcccctctcctgcatctgtctcccttcattgctgtgtgaccttggggaaaggcagtgccctctctgggcagtcagatccacccagtgcttaatagcagggaagaaggtacttcaaagactctgcccctgaggtcaagagaggatggggctattcacttttatatatttatataaaattagtagtgagatgtaacaaaa

SEQ ID NO: 281900 - DNA, 861 bp, Homo sapiens
gaattcggcacgagccacccccaacctcaagttgccgccgggcgagcgcgagaagccccttcctcggcgctgccaacccgccacccagcccatggcgaaccccgggctggggctgcttctggcgctgggcctgccgttcctgctggcccgctggggccgagcctgggggcaaatacagaccacttctgcaaatgagaatagcactgttttgccttcatccaccagctccagctccgatggcaacctgcgtccagaagccatcactgctatcatcgtggtcttctccctcttggctgccttgctcctggctgtggggctggcactgttggtgcggaagcttcgggagaagcggcagacggagggcacctaccggcccagtagcgaggagcagccaccaacactgcccaggactgcgggttgctggcttgtacaccgcagctgccaccgagacaccagcctctgatggctcaggaggacttgtggggagaggctgggggcacccatgtggtgggctctgtgcagcatgttgcctctgcttggctgtgcctgcagctcagggtgctggggctcgggacccacccccctttcagttctcccatgcagccgaggcccgggcccctcaggactccaaggagacggtgcagggctgcctgcccatctaggtcccctctcctgcatctgtctcccttcattgctgtgtgaccttggggaaaggcagtgccctctctgggcagtcagatccacccagtgcttaatagcagggaagaaggtacttcaaagactctgcccctgaggtcaagagaggatggggctattcacttttatatatttatataaaattagtagtgagatgtaacaaaa

SEQ ID NO: 281901 - DNA, 784 bp, Homo sapiens
tgactctagacgatcgccttatagtcgctctggaccgtccagaagccatcactgctatcatcgtggtcttctccctcttggctgccttgctcctggctgtggggctggcactgttggtgcggaagcttcgggagaagcggcagacggagggcacctaccggcccagtagcgaggagcagcccgcgtgccaccgacccctaacctcaagttgccgccggaagagcggctcatctgaacgctggggcctgctgcagccaccaacactgcccaggactgcgggttgctggcttgtacaccgcagctgccaccgagacaccagcctctgatggctcaggaggacttgtggggagaggctgggggcacccatgtggtgggctctgtgcagcatgttgcctctgcttggctgtgcctgcagctcagggtgctggggctcgggacccacccccctgcttgcggaaccaacttttctctgtgtgtccagcaggccccacaaccccctctcctttctttcagttctcccatgcagccgaggcccgggcccctcaggactccaaggagacggtgcagggctgcctgcccatctaggtcccctctcctgcatctgtctcccttcattgctgtgtgaccttggggaaaggcagtgccctctctgggcagtcagatccacccagtgcttaatagcagggaagaaggtacttcaaagactctgcccctgaggtcaagagaggatggggctattcacttttatatatttatataaaattagtagtgagatgtaacaaaa

SEQ ID NO: 281902 - DNA, 701 bp, Homo sapiens
aaaaaactggcagaatttgcagtgtgatcagcaagtctacgctgaggatgcccatcttctctgcctcctgaccccagcataaagacatgggatatgtgagaaaaggaataggaaaaagccaaagagacaccggcttacattagaaaatctactcaaaatcactcaaaggattgacaactgacaaaataaatggtggccagatgcagtggcttaggcctgtaatcctagcactttgggaggccaaggtggaagaactgcttgagtccaggagttcaagaccagcctggacaacacggtgaaaccgtgtctctacaaaaaacacaaaaacattagccaggcatagtggcatgtgcctgaagtctcagctacccgggaggctgaggaggaaggatcacctgagacctggaggttaagacttacattgagccacgatcacaccagccctccagcctgggtgcaaaccagctctcctctactagagtttggaagactttcaaccaatcagtcgttcagaaaataatactggatacctactaagttcaaggcattgtttgtgctatatgaacacagcaatgaacaacaataataacaataaataaacaaaaactcatctatactcatggagtttacagtcaaggggccaagagagaaaattaagaaataaaatgaatgaactcctcaatctgaacagatcaatggtg

SEQ ID NO: 281903 - DNA, 944 bp, Homo sapiens
  misc_feature (893)..(893): n is a, c, g, or t
cggacgcgtgggtcgacccacgcgtcgcggacgcgtgggcgaagccgtcgcggcggggaccatgttgcttccgaacatcctgctcaccggtacaccaggggttggaaaaaccacactaggcaaagaacttgcgtcaaaatcaggactgaaatacattaatgtgggtgatttagctcgagaagtctgatcatcggatatcatggagtctggcaagacggcttctcccaagagcatgccgaaagatgcacagatgatggcacaaatcctgaaggatatggggattacagaatatgagccaagagttataaatcagatgttggagtttgccttccgatatgtgaccacaattctagatgatgcaaaaatttattcaagccatgctaagaaagctactgttgatgcagatgatgtgcgattggcaatccagtgccgcgctgatcagtcttttacctctcctcccccaagagattttttattagatattgcaaggcaaagaaatcaaacccctttgccattgatcaagccatattcaggtcctaggttgccacctgatagatactgcttaacagctccaaactataggctgaaatctttacagaaaaaggcatcaacttctgcgggaagaataacagtcccgcggttaagtgttggttcagttactagcagaccaagtactcccacactaggcacaccaaccccacagaccatgtctgtttcaactaaagtagggactcccatgtccctcacaggtcaaaggtttacagtacagatgcctacttctcagtctccagctgtaaaagcttcaattcctgcaacctcagcagttcagaatgttctgattaatccatcattaatcgggtccaaaaacattctctttttttcctatttgtgtnttcaaaaggcggggttccaggtgagaaccgggtgtttgtaggtaaaaatgc

SEQ ID NO: 281904 - DNA, 239 bp, Homo sapiens
atatcgtcgacccacgcgtccgccacgcgtccgctgtaatctagccttgctgaatgtaacatgtatacttggtcttgaattcattgtactgatattaaacatgcatgctggatgttttcaagttgtgttttagaaaactaataataatgagtaaacacagttaccatacttttcaattgaaatgaaggtttttcatcagccttaaaagtgtaagaaaaataaagttgtcattcattcga

SEQ ID NO: 281905 - DNA, 1285 bp, Homo sapiens
gcggctgggccgccggggcaggctaggggcgccgcggtgggcttcggggcctttggggccgtgggcttttgctgccgcccgccccttccggctcctccctgtagagcaaagggcacgtgagcgaggcgcccgaagccgtcgcggcggggaccatgttgcttccgaacatcctgctcaccggtacaccaggggttggaaaaaccacactaggcaaagaacttgcgtcaaaatcaggactgaaatacattaatgtgggtgatttagctcgagaagtctgatcatcggatatcatggagtctggcaagacggcttctcccaagagcatgccgaaagatgcacagatgatggcacaaatcctgaaggatatggggattacagaatatgagccaagagttataaatcagatgttggagtttgccttccgatatgtgaccacaattctagatgatgcaaaaatttattcaagccatgctaagaaagctactgttgatgcagatgatgtgcgattggcaatccagtgccgcgctgatcagtcttttacctctcctcccccaagagattttttattagatattgcaaggcaaagaaatcaaacccctttgccattgatcaagccatattcaggtcctaggttgccacctgatagatactgcttaacagctccaaactataggctgaaatctttacagaaaaaggcatcaacttctgcgggaagaataacagtcccgcggttaagtgttggttcagttactagcagaccaagtactcccacactaggcacaccaaccccacagaccatgtctgtttcaactaaagtagggactcccatgtccctcacaggtcaaaggtttacagtacagatgcctacttctcagtctccagctgtaaaagcttcaattcctgcaacctcagcagttcagaatgttctgattaatccatcattaatcgggtccaaaaacattcttattaccactaatatgatgtcatcacaaaatactgccaatgaatcatcaaatgcattgaaaagaaaacgtgaagatgatgatgatgacgatgatgatgatgatgactatgataatctgtaatctagccttgctgaatgtaacatgtatacttggtcttgaattcattgtactgatattaaacatgcatgctggatgttttcaagttgtgttttagaaaactaataataatgagtaaacacagttaccatacttttcaattgaaatgaaggtttttcatcagccttaaaagtgtaagaaaaataaagttgtcattcattcga

SEQ ID NO: 281906 - DNA, 1194 bp, Homo sapiens
cggacgcgtgggtcgacccacgcgtcgcggacgcgtgggcgaagccgtcgcggcggggaccatgttgcttccgaacatcctgctcaccggtacaccaggggttggaaaaaccacactaggcaaagaacttgcgtcaaaatcaggactgaaatacattaatgtgggtgatttagctcgagaagtctgatcatcggatatcatggagtctggcaagacggcttctcccaagagcatgccgaaagatgcacagatgatggcacaaatcctgaaggatatggggattacagaatatgagccaagagttataaatcagatgttggagtttgccttccgatatgtgaccacaattctagatgatgcaaaaatttattcaagccatgctaagaaagctactgttgatgcagatgatgtgcgattggcaatccagtgccgcgctgatcagtcttttacctctcctcccccaagagattttttattagatattgcaaggcaaagaaatcaaacccctttgccattgatcaagccatattcaggtcctaggttgccacctgatagatactgcttaacagctccaaactataggctgaaatctttacagaaaaaggcatcaacttctgcgggaagaataacagtcccgcggttaagtgttggttcagttactagcagaccaagtactcccacactaggcacaccaaccccacagaccatgtctgtttcaactaaagtagggactcccatgtccctcacaggtcaaaggtttacagtacagatgcctacttctcagtctccagctgtaaaagcttcaattcctgcaacctcagcagttcagaatgttctgattaatccatcattaatcgggtccaaaaacattcttattaccactaatatgatgtcatcacaaaatactgccaatgaatcatcaaatgcattgaaaagaaaacgtgaagatgatgatgatgacgatgatgatgatgatgactatgataatctgtaatctagccttgctgaatgtaacatgtatacttggtcttgaattcattgtactgatattaaacatgcatgctggatgttttcaagttgtgttttagaaaactaataataatgagtaaacacagttaccatacttttcaattgaaatgaaggtttttcatcagccttaaaagtgtaagaaaaataaagttgtcattcattcga

SEQ ID NO: 281907 - DNA, 1632 bp, Homo sapiens
cccacacagtgaacagggaatactaagctcaaatattcgtccaacgtaatcctgtaatcagtggggtgccgggttgagctcgctaatccccgctgcaggacagggctctgcaccctcaatcttctcatccccagatgggatgggcgggtcgggaggaggagcgacgagagcccaggaaagcttgaaggcagagatagactcgcgtctctaagacatatacataatatagccgcaaccgcggcggccttactttcccggagctgcatccccttttgggcgaagagcggaggcgaccagggactaccctaggtgaaagggcagccacctggccctacccgggctcaacgccgagcctctcggaggtacggcctcccggggaccttccagactggtcggcgcaagcgaagggcggggaccaccgaaggagtgtgtgacttaggcatccagcgcactgcctgacccgaagtaccgacccgagttatgcccaccctccaactttgcgacggaaatgtgtcatcgaaagccaggtacaccaggggttggaaaaaccacactaggcaaagaacttgcgtcaaaatcaggactgaaatacattaatgtgggtgatttagctcgagaagtctgatcatcggatatcatggagtctggcaagacggcttctcccaagagcatgccgaaagatgcacagatgatggcacaaatcctgaaggatatggggattacagaatatgagccaagagttataaatcagatgttggagtttgccttccgatatgtgaccacaattctagatgatgcaaaaatttattcaagccatgctaagaaagctactgttgatgcagatgatgtgcgattggcaatccagtgccgcgctgatcagtcttttacctctcctcccccaagagattttttattagatattgcaaggcaaagaaatcaaacccctttgccattgatcaagccatattcaggtcctaggttgccacctgatagatactgcttaacagctccaaactataggctgaaatctttacagaaaaaggcatcaacttctgcgggaagaataacagtcccgcggttaagtgttggttcagttactagcagaccaagtactcccacactaggcacaccaaccccacagaccatgtctgtttcaactaaagtagggactcccatgtccctcacaggtcaaaggtttacagtacagatgcctacttctcagtctccagctgtaaaagcttcaattcctgcaacctcagcagttcagaatgttctgattaatccatcattaatcgggtccaaaaacattcttattaccactaatatgatgtcatcacaaaatactgccaatgaatcatcaaatgcattgaaaagaaaacgtgaagatgatgatgatgacgatgatgatgatgatgactatgataatctgtaatctagccttgctgaatgtaacatgtatacttggtcttgaattcattgtactgatattaaacatgcatgctggatgttttcaagttgtgttttagaaaactaataataatgagtaaacacagttaccatacttttcaattgaaatgaaggtttttcatcagccttaaaagtgtaagaaaaataaagttgtcattcattcga

SEQ ID NO: 281908 - DNA, 1942 bp, Homo sapiens
cccacacagtgaacagggaatactaagctcaaatattcgtccaacgtaatcctgtaatcagtggggtgccgggttgagctcgctaatccccgctgcaggacagggctctgcaccctcaatcttctcatccccagatgggatgggcgggtcgggaggaggagcgacgagagcccaggaaagcttgaaggcagagatagactcgcgtctctaagacatatacataatatagccgcaaccgcggcggccttactttcccggagctgcatccccttttgggcgaagagcggaggcgaccagggactaccctaggtgaaagggcagccacctggccctacccgggctcaacgccgagcctctcggaggtacggcctcccggggaccttccagactggtcggcgcaagcgaagggcggggaccaccgaaggagtgtgtgacttaggcatccagcgcactgcctgacccgaagtaccgacccgagttatgcccaccctccaacttttcgcggcggggaccatgttgcttccgaacatcctgctcaccggtcagggcgcgcggccgggagggactgggctggggcaggctgggggcgcagagtgctctgggcatcgggcgcccaggtgggggcccctcactgccctcttcagaggccggccgagggccacgaggcggttgtcagcgccccgggagccgaccctcgcgggcgttgcgggaggcgagggaggggacgcggaacgttaattccgttggcctgaggctccggggggggcggggggggtggagagaggtcggcagatccagctctccagcttggcaacctgcttagtctttctgaatctggtacaccaggggttggaaaaaccacactaggcaaagaacttgcgtcaaaatcaggactgaaatacattaatgtgggtgatttagctcgagaagtctgatcatcggatatcatggagtctggcaagacggcttctcccaagagcatgccgaaagatgcacagatgatggcacaaatcctgaaggatatggggattacagaatatgagccaagagttataaatcagatgttggagtttgccttccgatatgtgaccacaattctagatgatgcaaaaatttattcaagccatgctaagaaagctactgttgatgcagatgatgtgcgattggcaatccagtgccgcgctgatcagtcttttacctctcctcccccaagagattttttattagatattgcaaggcaaagaaatcaaacccctttgccattgatcaagccatattcaggtcctaggttgccacctgatagatactgcttaacagctccaaactataggctgaaatctttacagaaaaaggcatcaacttctgcgggaagaataacagtcccgcggttaagtgttggttcagttactagcagaccaagtactcccacactaggcacaccaaccccacagaccatgtctgtttcaactaaagtagggactcccatgtccctcacaggtcaaaggtttacagtacagatgcctacttctcagtctccagctgtaaaagcttcaattcctgcaacctcagcagttcagaatgttctgattaatccatcattaatcgggtccaaaaacattcttattaccactaatatgatgtcatcacaaaatactgccaatgaatcatcaaatgcattgaaaagaaaacgtgaagatgatgatgatgacgatgatgatgatgatgactatgataatctgtaatctagccttgctgaatgtaacatgtatacttggtcttgaattcattgtactgatattaaacatgcatgctggatgttttcaagttgtgttttagaaaactaataataatgagtaaacacagttaccatacttttcaattgaaatgaaggtttttcatcagccttaaaagtgtaagaaaaataaagttgtcattcattcga

SEQ ID NO: 281909 - DNA, 2480 bp, Homo sapiens
cccacacagtgaacagggaatactaagctcaaatattcgtccaacgtaatcctgtaatcagtggggtgccgggttgagctcgctaatccccgctgcaggacagggctctgcaccctcaatcttctcatccccagatgggatgggcgggtcgggaggaggagcgacgagagcccaggaaagcttgaaggcagagatagactcgcgtctctaagacatatacataatatagccgcaaccgcggcggccttactttcccggagctgcatccccttttgggcgaagagcggaggcgaccagggactaccctaggtgaaagggcagccacctggccctacccgggctcaacgccgagcctctcggaggtacggcctcccggggaccttccagactggtcggcgcaagcgaagggcggggaccaccgaaggagtgtgtgacttaggcatccagcgcactgcctgacccgaagtaccgacccgagttatgcccaccctccaacttttcgcggcggggaccatgttgcttccgaacatcctgctcaccggtcagggcgcgcggccgggagggactgggctggggcaggctgggggcgcagagtgctctgggcatcgggcgcccaggtgggggcccctcactgccctcttcagaggccggccgagggccacgaggcggttgtcagcgccccgggagccgaccctcgcgggcgttgcgggaggcgagggaggggacgcggaacgttaattccgttggcctgaggctccggggggggcggggggggtggagagaggtcggcagatccagctctccagcttggcaacctgcttagtctttctgaatctggtatttcgtttgtaaaatgggttgttgattctttggcagggttggccttgggatttttagcgaaataacgtaaggccatatctgcttcccggtagagtcattaatggtggatgcctcactccttaggcctccgtgggccgtattttattttttctttgcttctgataaacgcctcagattagatttcggtaaacgagttcagatgtttgtgacgtgacgaaattgctgtatgcttttgttgagttacatcaaaggatccccccgccccttaaaaggaaggcatatagagcatttcgggtcgtttctcgcgtaggagtgggtctttgaagccatactcagggtgcgtgttatcagtgaagggaattaaaatgctgcataacgactttaacgaatatttttgctagccgtttagtcctgaaagtgtttatcaaattgtaggccattcgtggaaaaatctaatgcatgtagattttattacaaggtacagaaaaattaagactctttgtgggaacagtaaagttacatcattcacccaaaggtacaccaggggttggaaaaaccacactaggcaaagaacttgcgtcaaaatcaggactgaaatacattaatgtgggtgatttagctcgagaagtctgatcatcggatatcatggagtctggcaagacggcttctcccaagagcatgccgaaagatgcacagatgatggcacaaatcctgaaggatatggggattacagaatatgagccaagagttataaatcagatgttggagtttgccttccgatatgtgaccacaattctagatgatgcaaaaatttattcaagccatgctaagaaagctactgttgatgcagatgatgtgcgattggcaatccagtgccgcgctgatcagtcttttacctctcctcccccaagagattttttattagatattgcaaggcaaagaaatcaaacccctttgccattgatcaagccatattcaggtcctaggttgccacctgatagatactgcttaacagctccaaactataggctgaaatctttacagaaaaaggcatcaacttctgcgggaagaataacagtcccgcggttaagtgttggttcagttactagcagaccaagtactcccacactaggcacaccaaccccacagaccatgtctgtttcaactaaagtagggactcccatgtccctcacaggtcaaaggtttacagtacagatgcctacttctcagtctccagctgtaaaagcttcaattcctgcaacctcagcagttcagaatgttctgattaatccatcattaatcgggtccaaaaacattcttattaccactaatatgatgtcatcacaaaatactgccaatgaatcatcaaatgcattgaaaagaaaacgtgaagatgatgatgatgacgatgatgatgatgatgactatgataatctgtaatctagccttgctgaatgtaacatgtatacttggtcttgaattcattgtactgatattaaacatgcatgctggatgttttcaagttgtgttttagaaaactaataataatgagtaaacacagttaccatacttttcaattgaaatgaaggtttttcatcagccttaaaagtgtaagaaaaataaagttgtcattcattcga

SEQ ID NO: 281910 - DNA, 1764 bp, Homo sapiens
gcggctgggccgccggggcaggctaggggcgccgcggtgggcttcggggcctttggggccgtgggcttttgctgccgcccgccccttccggctcctccctgtagagcaaagggcacgtgagcgaggcgcccgaagccgtcgcggcggggaccatgttgcttccgaacatcctgctcaccggtacaccaggggttggaaaaaccacactaggcaaagaacttgcgtcaaaatcaggactgaaatacattaatgtgggtgatttagctcgagaagtctgatcatcggatatcatggagtctggcaagacggcttctcccaagagcatgccgaaagatgcacagatgatggcacaaatcctgaaggatatggggattacagaatatgagccaagagttataaatcagatgttggagtttgccttccgatatgtgaccacaattctagatgatgcaaaaatttattcaagccatgctaagaaagctactgttgatgcagatgatgtgcgattggcaatccagtgccgcgctgatcagtcttttacctctcctcccccaagagattttttattagatattgcaaggcaaagaaatcaaacccctttgccattgatcaagccatattcaggtcctaggttgccacctgatagatactgcttaacagctccaaactataggctgaaatctttacagaaaaaggcatcaacttctgcgggaagaataacagtcccgcggttaagtgttggttcagttactagcagaccaagtactcccacactaggcacaccaaccccacagaccatgtctgtttcaactaaagtagggactcccatgtccctcacaggtcaaaggtttacagtacagatgcctacttctcagtctccagctgtaaaagcttcaattcctgcaacctcagcagttcagaatgttctgattaatccatcattaatcgggtccaaaaacattcttattaccactaatatgatgtcatcacaaaatactgccaatgaatcatcaaatgcattgaaaagaaaacgtgaagatgatgatgatgacgatgatgatgatgatgactatgataatctgtaatctagccttgctgaatgtaacatgtatacttggtcttgaattcattgtactgatattaaacatgcatgctggatgttttcaagttgtgttttagaaaactaataataatgagtaaacacagttaccatacttttcaattgaaatgaaggtttttcatcagccttaaaagtgtaagaaaaataaagttgtcattcattcgaaaaaaatacaaacacccctaaccaccacctcaacacacaaggacacaccacagaacgaaacgagcacgccacacagacccacacccacagaagagcactgacggaggcgcgaaggagcgcagcgcaagaggagaagacaagaggaagcagaggagacacaaacaccaacgacatgacagcgcgacttcggacgcggggagagagatagatagacgaggagcggcgtgcaggtccacgcgagacggagagacaaacaagcagagaaaacgacagagcaggagaaacggtagaatggacgagacatcacgacgaacagccatggcagtgaggcacaggcaagacatatgacgactgcataaggcaggcaacacaatcgaggtcagcaagaagagaacggtcggtgcccccgcgcgtcactgtgctggcgctaaccagacggcgcgagcggacacggcgagcaaagtcgaggacaaagacca

SEQ ID NO: 281911 - DNA, 1035 bp, Homo sapiens
  misc_feature (984)..(984): n is a, c, g, or t
gcggctgggccgccggggcaggctaggggcgccgcggtgggcttcggggcctttggggccgtgggcttttgctgccgcccgccccttccggctcctccctgtagagcaaagggcacgtgagcgaggcgcccgaagccgtcgcggcggggaccatgttgcttccgaacatcctgctcaccggtacaccaggggttggaaaaaccacactaggcaaagaacttgcgtcaaaatcaggactgaaatacattaatgtgggtgatttagctcgagaagtctgatcatcggatatcatggagtctggcaagacggcttctcccaagagcatgccgaaagatgcacagatgatggcacaaatcctgaaggatatggggattacagaatatgagccaagagttataaatcagatgttggagtttgccttccgatatgtgaccacaattctagatgatgcaaaaatttattcaagccatgctaagaaagctactgttgatgcagatgatgtgcgattggcaatccagtgccgcgctgatcagtcttttacctctcctcccccaagagattttttattagatattgcaaggcaaagaaatcaaacccctttgccattgatcaagccatattcaggtcctaggttgccacctgatagatactgcttaacagctccaaactataggctgaaatctttacagaaaaaggcatcaacttctgcgggaagaataacagtcccgcggttaagtgttggttcagttactagcagaccaagtactcccacactaggcacaccaaccccacagaccatgtctgtttcaactaaagtagggactcccatgtccctcacaggtcaaaggtttacagtacagatgcctacttctcagtctccagctgtaaaagcttcaattcctgcaacctcagcagttcagaatgttctgattaatccatcattaatcgggtccaaaaacattctctttttttcctatttgtgtnttcaaaaggcggggttccaggtgagaaccgggtgtttgtaggtaaaaatgc

SEQ ID NO: 281912 - DNA, 1158 bp, Homo sapiens
aattcgcggccgcgtacgaccgcgagaagacgacaaagggcacgtgagcgaggcgcccgaagccgtcgcggcggggaccatgttgcttccgaacatcctgctcaccggtacaccaggggttggaaaaaccacactaggcaaagaacttgcgtcaaaatcaggactgaaatacattaatgtgggtgatttagctcgagaagtctgatcatcggatatcatggagtctggcaagacggcttctcccaagagcatgccgaaagatgcacagatgatggcacaaatcctgaaggatatggggattacagaatatgagccaagagttataaatcagatgttggagtttgccttccgatatgtgaccacaattctagatgatgcaaaaatttattcaagccatgctaagaaagctactgttgatgcagatgatgtgcgattggcaatccagtgccgcgctgatcagtcttttacctctcctcccccaagagattttttattagatattgcaaggcaaagaaatcaaacccctttgccattgatcaagccatattcaggtcctaggttgccacctgatagatactgcttaacagctccaaactataggctgaaatctttacagacagttactagcagaccaagtactcccacactaggcacaccaaccccacagaccatgtctgtttcaactaaagtagggactcccatgtccctcacaggtcaaaggtttacagtacagatgcctacttctcagtctccagctgtaaaagcttcaattcctgcaacctcagcagttcagaatgttctgattaatccatcattaatcgggtccaaaaacattcttattaccactaatatgatgtcatcacaaaatactgccaatgaatcatcaaatgcattgaaaagaaaacgtgaagatgatgatgatgacgatgatgatgatgatgactatgataatctgtaatctagccttgctgaatgtaacatgtatacttggtcttgaattcattgtactgatattaaacatgcatgctggatgttttcaagttgtgttttagaaaactaataataatgagtaaacacagttaccatacttttcaattgaaatgaaggtttttcatcagccttaaaagtgtaagaaaaataaagttgtcattcattcga

SEQ ID NO: 281913 - DNA, 1478 bp, Homo sapiens
  misc_feature (1336)..(1336): n is a, c, g, or t
  misc_feature (1339)..(1339): n is a, c, g, or t
cccacacagtgaacagggaatactaagctcaaatattcgtccaacgtaatcctgtaatcagtggggtgccgggttgagctcgctaatccccgctgcaggacagggctctgcaccctcaatcttctcatccccagatgggatgggcgggtcgggaggaggagcgacgagagcccaggaaagcttgaaggcagagatagactcgcgtctctaagacatatacataatatagccgcaaccgcggcggccttactttcccggagctgcatccccttttgggcgaagagcggaggcgaccagggactaccctaggtgaaagggcagccacctggccctacccgggctcaacgccgagcctctcggaggtacggcctcccggggaccttccagactggtcggcgcaagcgaagggcggggaccaccgaaggagtgtgtgacttaggcatccagcgcactgcctgacccgaagtaccgacccgagttatgcccaccctccaactttgcgacggaaatgtgtcatcgaaagccaggtacaccaggggttggaaaaaccacactaggcaaagaacttgcgtcaaaatcaggactgaaatacattaatgtgggtgatttagctcgagaagtctgatcatcggatatcatggagtctggcaagacggcttctcccaagagcatgccgaaagatgcacagatgatggcacaaatcctgaaggatatggggattacagaatatgagccaagagttataaatcagatgttggagtttgccttccgatatgtgaccacaattctagatgatgcaaaaatttattcaagccatgctaagaaagctactgttgatgcagatgatgtgcgattggcaatccagtgccgcgctgatcagtcttttacctctcctcccccaagagattttttattagatattgcaaggcaaagaaatcaaacccctttgccattgatcaagccatattcaggtcctaggttgccacctgatagatactgcttaacagctccaaactataggctgaaatctttacagaaaaaggcatcaacttctgcgggaagaataacagtcccgcggttaagtgttggttcagttactagcagaccaagtactcccacactaggcacaccaaccccacagaccatgtctgtttcaactaaagtagggactcccatgtccctcacaggtcaaaggtttacagtacagatgcctacttctcagtctccagctgtaaaagcttcaattcctgcaacctcagcagttcagaatgttctgattaatccatcattaatcgggtccaaaaacattcttatttgggtgttcaaattgggtganccnatggtggagaacgcgggagtaattggcattggaggagagaaaattggtagcggggagagagaatggggacggggaaaaagggggggaggggcgaaaaaaagagaggaaagagggggaaaaaaaaaaagagggggtagaa

SEQ ID NO: 281914 - DNA, 956 bp, Homo sapiens
aattcgcggccgcgtacgaccgcgagaagacgacaaagggcacgtgagcgaggcgcccgaagccgtcgcggcggggaccatgttgcttccgaacatcctgctcaccggtacaccaggggttggaaaaaccacactaggcaaagaacttgcgtcaaaatcaggactgaaatacattaatgtgggtgatttagctcgagaagagcaattgtatgatggctatgatgaagagtatgactgtcccattttagatgaagacagagtagttgatgagttagataaccaaatgagagaaggtggagttattgttgattaccatggttgtgatttcttccctgaacgctggtttcatatagtttttgtgctgagaacagataccaatgtattgtacgaaagacttgaaacaaggggttataatgagaagaaactaacagacaatattcagtgtgagatttttcaagttctttatgaagaagccacagcatcctacaaggaagaaatcgtgcatcagctgcccagtaataaaccagaagagctagaaaataatgtagatcagatcttgaaatggattgagcagtggatcaaagatcataactcttgacttataaggctagctacttaataatcactcttgttgatatctctgccgacatcatagaaattgttcaagtgtcagtaacactttattaaaatcatgttgcagaaccagcaggtggatagtatataggtttatgcctgtgtttctttttctccatgagaaagctaaacatgaaatataatgaatatagtattattaaggattgagacaaaaactgtgattttaatacttaaattgctaaagaataaataaatctgacaaaatgggtggatatcttttaagtttattacagaaaaaaatgcagatgatctcttaaaataaaactaaagataaagcaaaaaaaaaaaattccaggtggatc

SEQ ID NO: 281915 - DNA, 789 bp, Homo sapiens
cccacacagtgaacagggaatactaagctcaaatattcgtccaacgtaatcctgtaatcagtggggtgccgggttgagctcgctaatccccgctgcaggacagggctctgcaccctcaatcttctcatccccagatgggatgggcgggtcgggaggaggagcgacgagagcccaggaaagcttgaaggcagagatagactcgcgtctctaagacatatacataatatagccgcaaccgcggcggccttactttcccggagctgcatccccttttgggcgaagagcggaggcgaccagggactaccctaggtgaaagggcagccacctggccctacccgggctcaacgccgagcctctcggaggtacggcctcccggggaccttccagactggtcggcgcaagcgaagggcggggaccaccgaaggagtgtgtgacttaggcatccagcgcactgcctgacccgaagtaccgacccgagttatgcccaccctccaactttgcgacggaaatgtgtcatcgaaagccaggtacaccaggggttggaaaaaccacactaggcaaagaacttgcgtcaaaatcaggactgaaatacattaatgtgggtgatttagctcgagaagagcaattgtatgatggctatgatgaagagtatgactgtcccattttagatgaagacagagtagttgatgagttagataacctgatgggagcaagatggccatcttcgtcccatcagcggatttctatacattgacctcttgttggttataactgatgggagcaagagcg

SEQ ID NO: 281916 - DNA, 1390 bp, Homo sapiens
cccacacagtgaacagggaatactaagctcaaatattcgtccaacgtaatcctgtaatcagtggggtgccgggttgagctcgctaatccccgctgcaggacagggctctgcaccctcaatcttctcatccccagatgggatgggcgggtcgggaggaggagcgacgagagcccaggaaagcttgaaggcagagatagactcgcgtctctaagacatatacataatatagccgcaaccgcggcggccttactttcccggagctgcatccccttttgggcgaagagcggaggcgaccagggactaccctaggtgaaagggcagccacctggccctacccgggctcaacgccgagcctctcggaggtacggcctcccggggaccttccagactggtcggcgcaagcgaagggcggggaccaccgaaggagtgtgtgacttaggcatccagcgcactgcctgacccgaagtaccgacccgagttatgcccaccctccaacttttcgcggcggggaccatgttgcttccgaacatcctgctcaccggtacaccaggggttggaaaaaccacactaggcaaagaacttgcgtcaaaatcaggactgaaatacattaatgtgggtgatttagctcgagaagagcaattgtatgatggctatgatgaagagtatgactgtcccattttagatgaagacagagtagttgatgagttagataaccaaatgagagaaggtggagttattgttgattaccatggttgtgatttcttccctgaacgctggtttcatatagtttttgtgctgagaacagataccaatgtattgtacgaaagacttgaaacaaggggttataatgagaagaaactaacagacaatattcagtgtgagatttttcaagttctttatgaagaagccacagcatcctacaaggaagaaatcgtgcatcagctgcccagtaataaaccagaagagctagaaaataatgtagatcagatcttgaaatggattgagcagtggatcaaagatcataactcttgacttataaggctagctacttaataatcactcttgttgatatctctgccgacatcatagaaattgttcaagtgtcagtaacactttattaaaatcatgttgcagaaccagcaggtggatagtatataggtttatgcctgtgtttctttttctccatgagaaagctaaacatgaaatataatgaatatagtattattaaggattgagacaaaaactgtgattttaatacttaaattgctaaagaataaataaatctgacaaaatgggtggatatcttttaagtttattacagaaaaaaatgcagatgatctcttaaaataaaactaaagataaagcaaaaaaaaaaaattccaggtggatc

SEQ ID NO: 281917 - DNA, 1646 bp, Homo sapiens
cccacacagtgaacagggaatactaagctcaaatattcgtccaacgtaatcctgtaatcagtggggtgccgggttgagctcgctaatccccgctgcaggacagggctctgcaccctcaatcttctcatccccagatgggatgggcgggtcgggaggaggagcgacgagagcccaggaaagcttgaaggcagagatagactcgcgtctctaagacatatacataatatagccgcaaccgcggcggccttactttcccggagctgcatccccttttgggcgaagagcggaggcgaccagggactaccctaggtgaaagggcagccacctggccctacccgggctcaacgccgagcctctcggaggtacggcctcccggggaccttccagactggtcggcgcaagcgaagggcggggaccaccgaaggagtgtgtgacttaggcatccagcgcactgcctgacccgaagtaccgacccgagttatgcccaccctccaacttttcgcggcggggaccatgttgcttccgaacatcctgctcaccggtacaccaggggttggaaaaaccacactaggcaaagaacttgcgtcaaaatcaggactgaaatacattaatgtgggtgatttagctcgagaagtctgatcatcggatatcatggagtctggcaagacggcttctcccaagagcatgccgaaagatgcacagatgatggcacaaatcctgaaggatatggggattacagaatatgagccaagagttataaatcagatgttggagtttgccttccgatatgtgaccacaattctagatgatgcaaaaatttattcaagccatgctaagaaagctactgttgatgcagatgatgtgcgattggcaatccagtgccgcgctgatcagtcttttacctctcctcccccaagagattttttattagatattgcaaggcaaagaaatcaaacccctttgccattgatcaagccatattcaggtcctaggttgccacctgatagatactgcttaacagctccaaactataggctgaaatctttacagaaaaaggcatcaacttctgcgggaagaataacagtcccgcggttaagtgttggttcagttactagcagaccaagtactcccacactaggcacaccaaccccacagaccatgtctgtttcaactaaagtagggactcccatgtccctcacaggtcaaaggtttacagtacagatgcctacttctcagtctccagctgtaaaagcttcaattcctgcaacctcagcagttcagaatgttctgattaatccatcattaatcgggtccaaaaacattcttattaccactaatatgatgtcatcacaaaatactgccaatgaatcatcaaatgcattgaaaagaaaacgtgaagatgatgatgatgacgatgatgatgatgatgactatgataatctgtaatctagccttgctgaatgtaacatgtatacttggtcttgaattcattgtactgatattaaacatgcatgctggatgttttcaagttgtgttttagaaaactaataataatgagtaaacacagttaccatacttttcaattgaaatgaaggtttttcatcagccttaaaagtgtaagaaaaataaagttgtcattcattcga

SEQ ID NO: 281918 - DNA, 2282 bp, Homo sapiens
cccacacagtgaacagggaatactaagctcaaatattcgtccaacgtaatcctgtaatcagtggggtgccgggttgagctcgctaatccccgctgcaggacagggctctgcaccctcaatcttctcatccccagatgggatgggcgggtcgggaggaggagcgacgagagcccaggaaagcttgaaggcagagatagactcgcgtctctaagacatatacataatatagccgcaaccgcggcggccttactttcccggagctgcatccccttttgggcgaagagcggaggcgaccagggactaccctaggtgaaagggcagccacctggccctacccgggctcaacgccgagcctctcggaggtacggcctcccggggaccttccagactggtcggcgcaagcgaagggcggggaccaccgaaggagtgtgtgacttaggcatccagcgcactgcctgacccgaagtaccgacccgagttatgcccaccctccaacttttcgcggcggggaccatgttgcttccgaacatcctgctcaccggtcagggcgcgcggccgggagggactgggctggggcaggctgggggcgcagagtgctctgggcatcgggcgcccaggtgggggcccctcactgccctcttcagaggccggccgagggccacgaggcggttgtcagcgccccgggagccgaccctcgcgggcgttgcgggaggcgagggaggggacgcggaacgttaattccgttggcctgaggctccggggggggcggggggggtggagagaggtcggcagatccagctctccagcttggcaacctgcttagtctttctgaatctggtatttcgtttgtaaaatgggttgttgattctttggcagggttggccttgggatttttagcgaaataacgtaaggccatatctgcttcccggtagagtcattaatggtggatgcctcactccttaggcctccgtgggccgtattttattttttctttgcttctgataaacgcctcagattagatttcggtaaacgagttcagatgtttgtgacgtgacgaaattgctgtatgcttttgttgagttacatcaaaggatccccccgccccttaaaaggaaggcatatagagcatttcgggtcgtttctcgcgtaggagtgggtctttgaagccatactcagggtacaccaggggttggaaaaaccacactaggcaaagaacttgcgtcaaaatcaggactgaaatacattaatgtgggtgatttagctcgagaagtctgatcatcggatatcatggagtctggcaagacggcttctcccaagagcatgccgaaagatgcacagatgatggcacaaatcctgaaggatatggggattacagaatatgagccaagagttataaatcagatgttggagtttgccttccgatatgtgaccacaattctagatgatgcaaaaatttattcaagccatgctaagaaagctactgttgatgcagatgatgtgcgattggcaatccagtgccgcgctgatcagtcttttacctctcctcccccaagagattttttattagatattgcaaggcaaagaaatcaaacccctttgccattgatcaagccatattcaggtcctaggttgccacctgatagatactgcttaacagctccaaactataggctgaaatctttacagaaaaaggcatcaacttctgcgggaagaataacagtcccgcggttaagtgttggttcagttactagcagaccaagtactcccacactaggcacaccaaccccacagaccatgtctgtttcaactaaagtagggactcccatgtccctcacaggtcaaaggtttacagtacagatgcctacttctcagtctccagctgtaaaagcttcaattcctgcaacctcagcagttcagaatgttctgattaatccatcattaatcgggtccaaaaacattcttattaccactaatatgatgtcatcacaaaatactgccaatgaatcatcaaatgcattgaaaagaaaacgtgaagatgatgatgatgacgatgatgatgatgatgactatgataatctgtaatctagccttgctgaatgtaacatgtatacttggtcttgaattcattgtactgatattaaacatgcatgctggatgttttcaagttgtgttttagaaaactaataataatgagtaaacacagttaccatacttttcaattgaaatgaaggtttttcatcagccttaaaagtgtaagaaaaataaagttgtcattcattcga

SEQ ID NO: 281919 - DNA, 1134 bp, Homo sapiens
cttgcaatatctaataaaaaaatctctcggtacaccaggggttggaaaaaccacactaggcaaagaacttgcgtcaaaatcaggactgaaatacattaatgtgggtgatttagctcgagaagtctgatcatcggatatcatggagtctggcaagacggcttctcccaagagcatgccgaaagatgcacagatgatggcacaaatcctgaaggatatggggattacagaatatgagccaagagttataaatcagatgttggagtttgccttccgatatgtgaccacaattctagatgatgcaaaaatttattcaagccatgctaagaaagctactgttgatgcagatgatgtgcgattggcaatccagtgccgcgctgatcagtcttttacctctcctcccccaagagattttttattagatattgcaaggcaaagaaatcaaacccctttgccattgatcaagccatattcaggtcctaggttgccacctgatagatactgcttaacagctccaaactataggctgaaatctttacagaaaaaggcatcaacttctgcgggaagaataacagtcccgcggttaagtgttggttcagttactagcagaccaagtactcccacactaggcacaccaaccccacagaccatgtctgtttcaactaaagtagggactcccatgtccctcacaggtcaaaggtttacagtacagatgcctacttctcagtctccagctgtaaaagcttcaattcctgcaacctcagcagttcagaatgttctgattaatccatcattaatcgggtccaaaaacattcttattaccactaatatgatgtcatcacaaaatactgccaatgaatcatcaaatgcattgaaaagaaaacgtgaagatgatgatgatgacgatgatgatgatgatgactatgataatctgtaatctagccttgctgaatgtaacatgtatacttggtcttgaattcattgtactgatattaaacatgcatgctggatgttttcaagttgtgttttagaaaactaataataatgagtaaacacagttaccatacttttcaattgaaatgaaggtttttcatcagccttaaaagtgtaagaaaaataaagttgtcattcattcga

SEQ ID NO: 281920 - DNA, 1158 bp, Homo sapiens
  misc_feature (163)..(163): n is a, c, g, or t
ggaaacacactaggcaaagaatgcgtcaaaatcaggagaatcattaatgtgggtgatttagctcgagaagtctgatcatcggatatcaggagtcgaaagctctccaaggagggcacaatgattgccggggtggggttagcgccgggtgcgtggtggggggggnggggggggggggggggggggggggggggggggggggggggggggggggggggggtgggcacaaatcctgaaggatatggggattacagaatatgagccaagagttataaatcagatgttggagtttgccttccgatatgtgaccacaattctagatgatgcaaaaatttattcaagccatgctaagaaagctactgttgatgcagatgatgtgcgattggcaatccagtgccgcgctgatcagtcttttacctctcctcccccaagagattttttattagatattgcaaggcaaagaaatcaaacccctttgccattgatcaagccatattcaggtcctaggttgccacctgatagatactgcttaacagctccaaactataggctgaaatctttacagaaaaaggcatcaacttctgcgggaagaataacagtcccgcggttaagtgttggttcagttactagcagaccaagtactcccacactaggcacaccaaccccacagaccatgtctgtttcaactaaagtagggactcccatgtccctcacaggtcaaaggtttacagtacagatgcctacttctcagtctccagctgtaaaagcttcaattcctgcaacctcagcagttcagaatgttctgattaatccatcattaatcgggtccaaaaacattcttattaccactaatatgatgtcatcacaaaatactgccaatgaatcatcaaatgcattgaaaagaaaacgtgaagatgatgatgatgacgatgatgatgatgatgactatgataatctgtaatctagccttgctgaatgtaacatgtatacttggtcttgaattcattgtactgatattaaacatgcatgctggatgttttcaagttgtgttttagaaaactaataataatgagtaaacacagttaccatacttttcaattgaaatgaaggtttttcatcagccttaaaagtgtaagaaaaataaagttgtcattcattcga

SEQ ID NO: 281921 - DNA, 1131 bp, Homo sapiens
  misc_feature (989)..(989): n is a, c, g, or t
  misc_feature (992)..(992): n is a, c, g, or t
gcggctgggccgccggggcaggctaggggcgccgcggtgggcttcggggcctttggggccgtgggcttttgctgccgcccgccccttccggctcctccctgtagagcaaagggcacgtgagcgaggcgcccgaagccgtcgcggcggggaccatgttgcttccgaacatcctgctcaccggtacaccaggggttggaaaaaccacactaggcaaagaacttgcgtcaaaatcaggactgaaatacattaatgtgggtgatttagctcgagaagtctgatcatcggatatcatggagtctggcaagacggcttctcccaagagcatgccgaaagatgcacagatgatggcacaaatcctgaaggatatggggattacagaatatgagccaagagttataaatcagatgttggagtttgccttccgatatgtgaccacaattctagatgatgcaaaaatttattcaagccatgctaagaaagctactgttgatgcagatgatgtgcgattggcaatccagtgccgcgctgatcagtcttttacctctcctcccccaagagattttttattagatattgcaaggcaaagaaatcaaacccctttgccattgatcaagccatattcaggtcctaggttgccacctgatagatactgcttaacagctccaaactataggctgaaatctttacagaaaaaggcatcaacttctgcgggaagaataacagtcccgcggttaagtgttggttcagttactagcagaccaagtactcccacactaggcacaccaaccccacagaccatgtctgtttcaactaaagtagggactcccatgtccctcacaggtcaaaggtttacagtacagatgcctacttctcagtctccagctgtaaaagcttcaattcctgcaacctcagcagttcagaatgttctgattaatccatcattaatcgggtccaaaaacattcttatttgggtgttcaaattgggtganccnatggtggagaacgcgggagtaattggcattggaggagagaaaattggtagcggggagagagaatggggacggggaaaaagggggggaggggcgaaaaaaagagaggaaagagggggaaaaaaaaaaagagggggtagaa

SEQ ID NO: 281922 - DNA, 2228 bp, Homo sapiens
cccacacagtgaacagggaatactaagctcaaatattcgtccaacgtaatcctgtaatcagtggggtgccgggttgagctcgctaatccccgctgcaggacagggctctgcaccctcaatcttctcatccccagatgggatgggcgggtcgggaggaggagcgacgagagcccaggaaagcttgaaggcagagatagactcgcgtctctaagacatatacataatatagccgcaaccgcggcggccttactttcccggagctgcatccccttttgggcgaagagcggaggcgaccagggactaccctaggtgaaagggcagccacctggccctacccgggctcaacgccgagcctctcggaggtacggcctcccggggaccttccagactggtcggcgcaagcgaagggcggggaccaccgaaggagtgtgtgacttaggcatccagcgcactgcctgacccgaagtaccgacccgagttatgcccaccctccaacttttcgcggcggggaccatgttgcttccgaacatcctgctcaccggtcagggcgcgcggccgggagggactgggctggggcaggctgggggcgcagagtgctctgggcatcgggcgcccaggtgggggcccctcactgccctcttcagaggccggccgagggccacgaggcggttgtcagcgccccgggagccgaccctcgcgggcgttgcgggaggcgagggaggggacgcggaacgttaattccgttggcctgaggctccggggggggcggggggggtggagagaggtcggcagatccagctctccagcttggcaacctgcttagtctttctgaatctggtatttcgtttgtaaaatgggttgttgattctttggcagggttggccttgggatttttagcgaaataacgtaaggccatatctgcttcccggtagagtcattaatggtggatgcctcactccttaggcctccgtgggccgtattttattttttctttgcttctgataaacgcctcagattagatttcggtaaacgagttcagatgtttgtgacgtgacgaaattgctgtatgcttttgttgagttacatcaaaggatccccccgccccttaaaaggaaggcatatagagcatttcgggtcgtttctcgcgtaggagtgggtctttgaagccatactcagggtacaccaggggttggaaaaaccacactaggcaaagaacttgcgtcaaaatcaggactgaaatacattaatgtgggtgatttagctcgagaagtctgatcatcggatatcatggagtctggcaagacggcttctcccaagagcatgccgaaagatgcacagatgatggcacaaatcctgaaggatatggggattacagaatatgagccaagagttataaatcagatgttggagtttgccttccgatatgtgaccacaattctagatgatgcaaaaatttattcaagccatgctaagaaagctactgttgatgcagatgatgtgcgattggcaatccagtgccgcgctgatcagtcttttacctctcctcccccaagagattttttattagatattgcaaggcaaagaaatcaaacccctttgccattgatcaagccatattcaggtcctaggttgccacctgatagatactgcttaacagctccaaactataggctgaaatctttacagacagttactagcagaccaagtactcccacactaggcacaccaaccccacagaccatgtctgtttcaactaaagtagggactcccatgtccctcacaggtcaaaggtttacagtacagatgcctacttctcagtctccagctgtaaaagcttcaattcctgcaacctcagcagttcagaatgttctgattaatccatcattaatcgggtccaaaaacattcttattaccactaatatgatgtcatcacaaaatactgccaatgaatcatcaaatgcattgaaaagaaaacgtgaagatgatgatgatgacgatgatgatgatgatgactatgataatctgtaatctagccttgctgaatgtaacatgtatacttggtcttgaattcattgtactgatattaaacatgcatgctggatgttttcaagttgtgttttagaaaactaataataatgagtaaacacagttaccatacttttcaattgaaatgaaggtttttcatcagccttaaaagtgtaagaaaaataaagttgtcattcattcga

SEQ ID NO: 281923 - DNA, 477 bp, Homo sapiens
aattcgcggccgcgtacgaccgcgagaagacgacaaagggcacgtgagcgaggcgcccgaagccgtcgcggcggggaccatgttgcttccgaacatcctgctcaccggtacaccaggggttggaaaaaccacactaggcaaagaacttgcgtcaaaatcaggactgaaatacattaatgtgggtgatttagctcgagaagagcaattgtatgatggctatgatgaagagtatgactgtcccattttagatgaagacagagtagttgatgagttagataaccaaatgagagaaggtggagttattgttgattaccatggttgtgatttcttccctgaacgctggtttcatatagtttttgtgctgagaacagataccaatgtattgtacgaaagacttgaaacaaggggttataatgagaagaaactaacagacaatattcagtgtggagattcggcgtgtgcagggtaccgagctcg

SEQ ID NO: 281924 - DNA, 795 bp, Homo sapiens
agggggaggtggggcgggccccactggatgtgccagggaccaggaccaggccacgctgggccagagctgtcatggttcaggccttgcacacagaaccacagaacatgctcaacaagccccctaagcttaggggcactgacctaccctggggactagtaatcttcaagatgagaaagcggaggcacagcggtgccctgatacggccaagagaagcactgtgggtaagcaggagagctaggaacagaccccagctgccctcgctggcgaatgcacagaaccattacatcatcctaccccgagacccaaccaagaggtacccacaccccgtggcagccggggctgaaggcctggagataggagaggaggccccacatactccagcacccaaggcaatgagagaaactgaggcccaggaaggtgctaggtccgtgaagaggaaggtgggaagggctgggcagtgagcttcttcagagctgaggttcttctctgccaccccctcctgtcttgcaggtctcaaaccgcgtcaggcccctcgagagctcctatggatcaacagtgtctggggagagccagagccccgggacagatgcagggctgcctaagaccctcagatggcccacctgatgcagagtcaaccattcaatctagtccaagcctgaactcttgggttctgggtctgtggggtgtccagaatcctggagtgggatgactgaggcttaggggtgcccctgcctgggctgctcagccagcaggtgtgaacaagggttcctgcctcccaagtcacagagggagaga

SEQ ID NO: 281925 - DNA, 2037 bp, Homo sapiens
agggggaggtggggcgggccccactggatgtgccagggaccaggaccaggccacgctgggccagagctgtcatggttcaggccttgcacacagaaccacagaacatgctcaacaagccccctaagcttaggggcactgacctaccctggggactagtaatcttcaagatgagaaagcggaggcacagcggtgccctgatacggccaagagaagcactgtgggtaagcaggagagctaggaacagaccccagctgccctcgctggcgaatgcacagaaccattacatcatcctaccccgagacccaaccaagaggtacccacaccccgtggcagccggggctgaaggcctggagataggagaggaggccccacatactccagcacccaaggcaatgagagaaactgaggcccaggaaggtgctaggtccgtgaagaggaaggtgggaagggctgggcagtgagcttcttcagagctgaggttcttctctgccaccccctcctgtcttgcagactcccttaagacaattgttattctccaccctgcccctcctccacccggggtcaggcctgcctgcggacaaagtagacacccgcctacaccacgcgattctgagaaacggatttacattacgagtcgcctgggaccagccacagaaccagcttctctacaagcctccacatacccacggatctttcctccgtatcccacatactgcataactgaccatcatctaagttctcaccaccatccgttgagctacacattgtccctgtcctggtcagcaagggctggaggtagaagggaagactcgtactttgtccctaacgccccaactccattgcattataatcaattaagagtatagattattcaatctctagggtagccttgaagttggaaggggtggaatggagcctcctgttaaccctgtagcagctgacctggctaagggagctcaggccctgccatctcccctgttacactaggtcactgagcaaaggagcaactgtccccagggattttcatctctggactggaggaaagaggtggctgaaatgtcccagactcaagggctcagccaagagttgaggctgccatctgccaactccataatgaagttgggtcccaagcagcgctggggcagaggctggggcaggaaggtggctgggccggtgaaagtagcccaggggacttgcatacaaggacctaggggggcccatcaatggagatgagtcctcatctgtgcccctggcttctctaccgagccacagtgagtgaggggctgagatttcagccctagcccagcagacatggctgtcccctgtagccagctccacctagtccccaaggcctgccctctgtcctcagaggcctcatctataaagcacactcagtatccctgccttacagtggaggtaaagtgccaggtcagtgatcagtaaatggtgccctctccagttccaatcagctctcagcacccatcactgtcccttgagtgggagcagggccaggaggaggtggtagaccgaaggcagcactggggagagggatgctggcacctgagggttaatgggtaatgggcgtagaggccagcccaggagaaggtacagccctgtcctccccaccgtgggactctcctggcctcctgtggacccacacagcactggcatcaggccatttcgcagaggaagaggagggctcaaagtggggcaggactccgcaagtggctgccctcattcacagggggcttcaagggtcttctactccctccctgcaactcaaagtgtggccccgggccagggcactagccgagcaggagcaggctttctgttccatccagggaacagtggcagaggcccccccggcccccggccccatgccaaccccctgctctgctgcaacctcgacatcaaatttctacccagtccccacctgatgcaaagacattcgaggcagccagcgtgcttctacatccagtttatacacagctctatacaatatacagaaacctttatatacagatatatttatagaat

SEQ ID NO: 281926 - DNA, 940 bp, Homo sapiens
gttctgtgggcttctcctgaggagatggacgattttcagagcttgcagaaagaatttgagaccaccttcaaccagagaagcctctgtggaaatgtgccgtcactggccagttgttctgtctgtctgctgtggaacccaggcccgtgagaagagcaggggaggtatagtcatttcccttgttttacggcagaggaaactgaagataaagctatgaagtgaagctggctagtggctgcctcagggttactactgatatcactggaccccttcagaaccaagcatgaatgaagcaatcctttttcccacctgcaagtgaggctctgagggattcttcagaaatcaagactttgacccactccatattatgaatgcctcagcctacaaagagcttgcctaacccaacatcaaggggtggacacgtgatgctggacttccagagcaaaaatgggtgtttgaagaacttactcccatgatgcggcagtcaaggagatgcacagtagaggatcaaaaagctgacaacttggcctcccctgggtcgcttccaggggagcgcggcttcaccgctcgaaccagctggccaagttccgtatgctcttgggccggtccccagccctctgtacagcctggcacacccggcaccaaggctcgtcccagaaggaggtgatgtggacagcgtagctccggcgccagtggaagtagcggcgatagaccgcggggttgcggtcgaggaaaagcaggtacgaggccagggaggaggcacttgggaagtcgtccacgtggatgaaggcgccgcggggcacaaagcgctcgtagttggcacggtctgggcccagcaccaccggcaccgccccagcgagcaacgcgttgcgccagagcttctcggtgatataatccaggtgctgcgagttctcgaaagccaggtagaacttgtagcgggcca

SEQ ID NO: 281927 - DNA, 879 bp, Homo sapiens
aggcggagggagccgcgggcgccaggcgcgggtgaggcagcgactccccctccagccgcgggccccgagcgtcgcccccgccccccacgtggccgccgccgtcccagcccctccgaggaagcggcgcggcttcctgcagcttgggctggggatataggcgcccccacacccgggcccggctcagcgccgccgccgctcctcgcctccttgctgcacgatggcctcgctccgggtggagcgcgccggcggcccgcgtctccctaggacccgagtcgggcggccggcagcgctccgcctcctccttctgctgggcgctgtcctgaatccccacgaggccctggctcagcctcttcccaccacaggcacaccagggtcagaaggccttatagcaccctgcgagattgcctggagcactttgcagagttgtttgacctgggcttccccaatcccttggcagagaggatcatctttgagactcaccagatccactttgccaactgctccctggtgcagcccaccttctctgaccccccagaggatgtactcctggccatgatcatagcccccatctgcctcatccccttcctcatcactcttgtagtatggaggagtaaagacagtgaggcccaggcctagggggccacgagcttctcaacaaccatgttactccacttccccacccccaccaggcctccctcctcccctcctactcccttttctcactctcatccccaccacagatccctggattgctgggaatggaagccaggtggggtcatggcacaagttctgtaatcttcaaaataaaacttttttttttttttttttttttttttttttggtattggttaattgggggtttttgggctttgggcccca

SEQ ID NO: 281928 - DNA, 674 bp, Homo sapiens
gaatgagtagtggtgttgagaagctcgtggccctaggcctgggctcactgtctttactcctccatagggggacggtgaagaactatgagacagctgtccaattttgctggaatcattataaggatcaaatggatcctatcgaaaaggattggtgcgactgggccatgattagcaggccttatagcaccctgcgagattgcctggagcactttgcagagttgtttgacctgggcttccccaatcccttggcagagaggatcatctttgagactcaccagatccactttgccaactgctccctggtgcagcccaccttctctgaccccccagaggatgtactcctggccatgatcatagcccccatctgcctcatccccttcctcatcactcttgtagtatggaggagtaaagacagtgaggcccaggcctagggggccacgagcttctcaacaaccatgttactccacttccccacccccaccaggcctccctcctcccctcctactcccttttctcactctcatccccaccacagatccctggattgctgggaatggaagccaggtggggtcatggcacaagttctgtaatcttcaaaataaaacttttttttttttttttttttttttttttttggtattggttaattgggggtttttgggctttgggcccca

SEQ ID NO: 281929 - DNA, 934 bp, Homo sapiens
aggcggagggagccgcgggcgccaggcgcgggtgaggcagcgactccccctccagccgcgggccccgagcgtcgcccccgccccccacgtggccgccgccgtcccagcccctccgaggaagcggcgcggcttcctgcagcttgggctggggatataggcgcccccacacccgggcccggctcagcgccgccgccgctcctcgcctccttgctgcacgatggcctcgctccgggtggagcgcgccggcggcccgcgtctccctaggacccgagtcgggcggccggcagcgctccgcctcctccttctgctgggcgctgtcctgaatccccacgaggccctggctcagcctcttcccaccacaggcacaccagggtcagaaggggggacggtgaagaactatgagacagctgtccaattttgctggaatcattataaggatcaaatggatcctatcgattgcctggagcactttgcagagttgtttgacctgggcttccccaatcccttggcagagaggatcatctttgagactcaccagatccactttgccaactgctccctggtgcagcccaccttctctgaccccccagaggatgtactcctggccatgatcatagcccccatctgcctcatccccttcctcatcactcttgtagtatggaggagtaaagacagtgaggcccaggcctagggggccacgagcttctcaacaaccatgttactccacttccccacccccaccaggcctccctcctcccctcctactcccttttctcactctcatccccaccacagatccctggattgctgggaatggaagccaggtggggtcatggcacaagttctgtaatcttcaaaataaaacttttttttttttttttttttttttttttttggtattggttaattgggggtttttgggctttgggcccca

SEQ ID NO: 281930 - DNA, 988 bp, Homo sapiens
aggcggagggagccgcgggcgccaggcgcgggtgaggcagcgactccccctccagccgcgggccccgagcgtcgcccccgccccccacgtggccgccgccgtcccagcccctccgaggaagcggcgcggcttcctgcagcttgggctggggatataggcgcccccacacccgggcccggctcagcgccgccgccgctcctcgcctccttgctgcacgatggcctcgctccgggtggagcgcgccggcggcccgcgtctccctaggacccgagtcgggcggccggcagcgctccgcctcctccttctgctgggcgctgtcctgaatccccacgaggccctggctcagcctcttcccaccacaggcacaccagggtcagaaggggggacggtgaagaactatgagacagctgtccaattttgctggaatcattataaggatcaaatggatcctatcgaaaaggattggtgcgactgggccatgattagcaggccttatagcaccctgcgagattgcctggagcactttgcagagttgtttgacctgggcttccccaatcccttggcagagaggatcatctttgagactcaccagatccactttgccaactgctccctggtgcagcccaccttctctgaccccccagaggatgtactcctggccatgatcatagcccccatctgcctcatccccttcctcatcactcttgtagtatggaggagtaaagacagtgaggcccaggcctagggggccacgagcttctcaacaaccatgttactccacttccccacccccaccaggcctccctcctcccctcctactcccttttctcactctcatccccaccacagatccctggattgctgggaatggaagccaggtggggtcatggcacaagttctgtaatcttcaaaataaaacttttttttttttttttttttttttttttttggtattggttaattgggggtttttgggctttgggcccca

SEQ ID NO: 281931 - DNA, 1127 bp, Homo sapiens
cgggcgggaggcgcgagaggccccggaggggagaggggagaggggagaggggctggatggccgaggccggaacgggccctggggtgcgggttaggaccgacgtacctagcagcactggccctcggacggtccctgaccccacctcggggcgggcgcagcatgagctgcttcccacccagggaaagctggggtgctggccccggcccctcgaagagggcttaggaggacggaagctggccagagatgagggggctttgggcctgggtgtgagtgacaaggagctggtgccagcccctccctccccggcactgaggcgtccgtgggggctagattattcctccttttcttccaaggtagcctattttcggagggtctcagtcccccaacccccctcgcaggctccactgccggggtccccgctatgttaccctcctctcccgtttcttcccacagctgtcctgaatccccacgaggccctggctcagcctcttcccaccacaggcacaccagggtcagaaggggggacggtgaagaactatgagacagctgtccaattttgctggaatcattataaggatcaaatggatcctatcgaaaaggattggtgcgactgggccatgattagcaggccttatagcaccctgcgagattgcctggagcactttgcagagttgtttgacctgggcttccccaatcccttggcagagaggatcatctttgagactcaccagatccactttgccaactgctccctggtgcagcccaccttctctgaccccccagaggatgtactcctggccatgatcatagcccccatctgcctcatccccttcctcatcactcttgtagtatggaggagtaaagacagtgaggcccaggcctagggggccacgagcttctcaacaaccatgttactccacttccccacccccaccaggcctccctcctcccctcctactcccttttctcactctcatccccaccacagatccctggattgctgggaatggaagccaggtggggtcatggcacaagttctgtaatcttcaaaataaaacttttttttttttttttttttttttttttttggtattggttaattgggggtttttgggctttgggcccca

SEQ ID NO: 281932 - DNA, 801 bp, Homo sapiens
aggcggagggagccgcgggcgccaggcgcgggtgaggcagcgactccccctccagccgcgggccccgagcgtcgcccccgccccccacgtggccgccgccgtcccagcccctccgaggaagcggcgcggcttcctgcagcttgggctggggatataggcgcccccacacccgggcccggctcagcgccgccgccgctcctcgcctccttgctgcacgatggcctcgctccgggtggagcgcgccggcggcccgcgtctccctaggacccgagtcgggcggccggcagcgctccgcctcctccttctgctgggcgctgtcctgaatccccacgaggccctggctcagcctcttcccaccacaggcacaccagggtcagaaggccttatagcaccctgcgagattgcctggagcactttgcagagttgtttgacctgggcttccccaatcccttggcagagaggatcatctttgagactcaccagatccactttgccaactgctccctggtgcagcccaccttctctgaccccccagaggatgtactcctggccatgatcatagcccccatctgcctcatccccttcctcatcactcttgtagtatggaggagtaaagacagtgaggcccaggcctagggggccacgagcttctcaacaaccatgttatactcccttttctcactctcatccccaccacagatccctggattgctgggaatggaagccaggtggggtcatggcacaagttctgtaatcttcaaaataaaactttttttttttttttttttttttttttttttt

SEQ ID NO: 281933 - DNA, 484 bp, Homo sapiens
ttcggcagaggccgcatatttataaggtggacccaatgcctctggagccacggtaagggcaaaggagagccatgatctgacttatgttttaagatactctggcttctgggttcagaaaagactgaaggggcaagagaggaagcaggtggagaccagagcggcagtgattgccatcatccagactcagactaggacaatagctgtgagagtgatgggaagtggttggatcctgactgtattttaatagcagaattgacaggatttgctgatagactgcacgtggggtgggagagggtcaagatgacttcaaggttctcatctgagtcaagattccagcccaggcagcctagacctgagagcacgctcctaaccactgcacatcactgtcttagcacctcctcagcacaaactggcccttgaggaatgaaataccgccgccggacacacgctcctgagttaagcctttgtcaatgaaatgaacacc

SEQ ID NO: 281934 - DNA, 357 bp, Homo sapiens
gtctcactctgtcacccaggctgatatgcagtggtgaaatctcggctcactgcaacctccaactccgaggttcaagcaattctcctgcctcagcttcccgaatagatgggattacaggcacgtgccatcacacctggctaattattttgtattcttagtacagggtttcaccatgttggctaggctggtctcaaactcctggcctcaagaaatcggcccacctcagcctcccaaagtgctaggattacaggcgtgagccactgcacccagcctctagcaccatttattaaaaagaatattcttttcctcattgaatcgacttggcactcttgtcaaaataaattgactatacagtaa

SEQ ID NO: 281935 - DNA, 385 bp, Homo sapiens
ggtcaaggaaaaccaaaagcagccaggggtgggcccacgccacaggccaggccccatgccaagtgtgctggccaccattccctcccgtctcctcactgtggaccagcatggaatagcgtcaccctggtcagcagcagaggctcagaaaggaaaagggatctgcctgaagctactcagccaaacagagccagggtttcaccatgttggctaggctggtctcaaactcctggcctcaagaaatcggcccacctcagcctcccaaagtgctaggattacaggcgtgagccactgcacccagcctctagcaccatttattaaaaagaatattcttttcctcattgaatcgacttggcactcttgtcaaaataaattgactatacagtaa

SEQ ID NO: 281936 - DNA, 2219 bp, Homo sapiens
gggccgggcggcttttttgcgagtggcgggccgactgtgtagtccgctccggcagcgcgctctgcccggcttcctcagtctcctcgccgggagcgtccgggagcagctccgaggccgcggcgaaaccaggtggagccttgtcatttcagcattctggccttccctatgaggaggaagatcaacgaagtcacagggcccttctagcccaatccagagctgtaccatggcagagacaagagaagaggagacagtgtcagcagaagcctcagggttctcagacttgagtgactcagagttcctggagtttctggacctagaagatgcccaagagtcaaaggctttagttaacatgcctggcccatcttctgaatcccttgggaaggatgacaaacccataagcttacaaaactggaaaagaggattggatatattatcacccatggagagattccaccttaaatatttatatgtcactgacctggctactcagaactggtgtgaactgcaaacagcatatgggaaggagcttcctggtttcttggcacctgagaaggcagctgtgttggacactggtgccagcatacacctagctagagaactagaacttcatgatcttgtgactgtcccagtcaccactaaagaagatgcttgggcaattaagtttctgaacatacttttgctgattcctaccctgcagtcagaagggcacatcagagagtttccagtgtttggggaaggggagggtgtacttcttgttggagtgattgatgagctgcactatacagccaagggggaactggagctggcggaactcaagacacgcaggcgccctatgctccctctggaagctcagaagaagaaagactgttttcaagtcagcctatacaaatatatctttgatgccatggtacaaggaaaagtgacccctgctagcctaatccaccacacaaagttgtgtctagaaaagccactggggccatcagtgctgaggcatgcccagcagggaggcttctctgtgaagtctttgggtgacctcatggaacttgtcttcttgtctctaacactgtcagacctcccagttattgatatcttgaagattgagtatatccaccaagagactgccactgtgctgggtactgagattgtagccttcaaagagaaggaggtgagagccaaggtgcagcattatatggcctactggatgggccaccgagagccccagggagttgacgtggaggaggcttggaagtgccggacgtgtacctatgcagacatttgtgagtggagaaagggcagtggagtgctcagctctacactggcgccccaagtcaaaaaagccaaatgaatagaaggtatgctttcaagaatgttgatccttcctgctcctgttgtacctaagcaaaagaggaccagtctctgagcttggcttttatggagagtgttcttattttggttcttttttttatttccacaacctctaaccacattcagtccaggaccaaggctcagggatgagtgggagagatgggttatactgtccctggagcttcatcatgattgcctgagaagacagatgctcatcatggctggaatgaaggtatccttcagtaaactttgctttcctaagaaaattcttcagtttctgataagtcatccctatttttatcttgatcaaggctttctacagttacataataaaatgaaatgctgtccaggacagttgaactgatggttttttcataactgcagtccttcaaagatgaccaccatatatagttgtgtacgtgttattccaagcctttaaatatatacataaacatattttggaatcagaatgagcagaccaaaacataaacaataaatattctcaaagagacaagggaagatgaagtagaaacaggaagtcataaatattagatacgaaaaacataatacatggctgggtgcggtggcacatgcctgtaatcccagcactttgggaagctgagatgggtggatcacctgagctcaggagttcaagagcaacctgaccaatacggtgaaagcccgtctctactaaaaatacaaaaattagcctggggtggtggcgtgcgcctgtagtcccagctacttgggaggctgagagaggagaatagcttgaacctgagaggcagaggttacagtgagctgagatcatgccactgcactccagcctgggcaacagagtgagactctgtctt

SEQ ID NO: 281937 - DNA, 1725 bp, Homo sapiens
gggccgggcggcttttttgcgagtggcgggccgactgtgtagtccgctccggcagcgcgctctgcccggcttcctcagtctcctcgccgggagcgtccgggagcagctccgaggccgcggcgaaaccaggtggagtccgaggttcggaggagtatcagaggttaggggaaggccggagaatgggctgggaggctgcgtttcggagcttagggttctgtccctgcgatcgccgcgtctccctcccttggtgggcgcggctcccgggaagcggctcgtctcgtctcccctcacaggccgggttcccgttctggaccttcgccctcggaacacagtgctgttggccgggactccttcccgaggtggacggctccctgttcttattcctggctctgccagaactgtaggaagtgctcagtacactttagggcatgcatggcactccctgggagacagtgctttagggccagaggaaagatcttccctgaaggcaaacgcccgcggagcccacaagtccgggccgcactgaacaagtcaggatgttgccatcggcaattctgcagaaggcagtaacccatctgagagaaagagccgctgtcataaggtctcttgcttgagctgctgggttgagaatggagctggaagagggaactgatctcggagctccttggggatcttggttatgtttgacccttttactttcagggtggatgggccaccgagagccccagggagttgacgtggaggaggcttggaagtgccggacgtgtacctatgcagacatttgtgagtggagaaagggcagtggagtgctcagctctacactggcgccccaagtcaaaaaagccaaatgaatagaaggtatgctttcaagaatgttgatccttcctgctcctgttgtacctaagcaaaagaggaccagtctctgagcttggcttttatggagagtgttcttattttggttcttttttttatttccacaacctctaaccacattcagtccaggaccaaggctcagggatgagtgggagagatgggttatactgtccctggagcttcatcatgattgcctgagaagacagatgctcatcatggctggaatgaaggtatccttcagtaaactttgctttcctaagaaaattcttcagtttctgataagtcatccctatttttatcttgatcaaggctttctacagttacataataaaatgaaatgctgtccaggacagttgaactgatggttttttcataactgcagtccttcaaagatgaccaccatatatagttgtgtacgtgttattccaagcctttaaatatatacataaacatattttggaatcagaatgagcagaccaaaacataaacaataaatattctcaaagagacaagggaagatgaagtagaaacaggaagtcataaatattagatacgaaaaacataatacatggctgggtgcggtggcacatgcctgtaatcccagcactttgggaagctgagatgggtggatcacctgagctcaggagttcaagagcaacctgaccaatacggtgaaagcccgtctctactaaaaatacaaaaattagcctggggtggtggcgtgcgcctgtagtcccagctacttgggaggctgagagaggagaatagcttgaacctgagaggcagaggttacagtgagctgagatcatgccactgcactccagcctgggcaacagagtgagactctgtctt

SEQ ID NO: 281938 - DNA, 2107 bp, Homo sapiens
gggccgggcggcttttttgcgagtggcgggccgactgtgtagtccgctccggcagcgcgctctgcccggcttcctcagtctcctcgccgggagcgtccgggagcagctccgaggccgcggcgaaaccaggtggagggcccttctagcccaatccagagctgtaccatggcagagacaagagaagaggagacagtgtcagcagaagcctcagggttctcagacttgagtgactcagagttcctggagtttctggacctagaagatgcccaagagtcaaaggctttagttaacatgcctggcccatcttctgaatcccttgggaaggatgacaaacccataagcttacaaaactggaaaagaggattggatatattatcacccatggagagattccaccttaaatatttatatgtcactgacctggctactcagaactggtgtgaactgcaaacagcatatgggaaggagcttcctggtttcttggcacctgagaaggcagctgtgttggacactggtgccagcatacacctagctagagaactagaacttcatgatcttgtgactgtcccagtcaccactaaagaagatgcttgggcaattaagtttctgaacatacttttgctgattcctaccctgcagtcagaagggcacatcagagagtttccagtgtttggggaaggggagggtgtacttcttgttggagtgattgatgagctgcactatacagccaagggggaactggagctggcggaactcaagacacgcaggcgccctatgctccctctggaagctcagaagaagaaagactgttttcaagtcagcctatacaaatatatctttgatgccatggtacaaggaaaagtgacccctgctagcctaatccaccacacaaagttgtgtcttgtgaagtctttgggtgacctcatggaacttgtcttcttgtctctaacactgtcagacctcccagttattgatatcttgaagattgagtatatccaccaagagactgccactgtgctgggtactgagattgtagccttcaaagagaaggaggtgagagccaaggtgcagcattatatggcctactggatgggccaccgagagccccagggagttgacgtggaggaggcttggaagtgccggacgtgtacctatgcagacatttgtgagtggagaaagggcagtggagtgctcagctctacactggcgccccaagtcaaaaaagccaaatgaatagaaggtatgctttcaagaatgttgatccttcctgctcctgttgtacctaagcaaaagaggaccagtctctgagcttggcttttatggagagtgttcttattttggttcttttttttatttccacaacctctaaccacattcagtccaggaccaaggctcagggatgagtgggagagatgggttatactgtccctggagcttcatcatgattgcctgagaagacagatgctcatcatggctggaatgaaggtatccttcagtaaactttgctttcctaagaaaattcttcagtttctgataagtcatccctatttttatcttgatcaaggctttctacagttacataataaaatgaaatgctgtccaggacagttgaactgatggttttttcataactgcagtccttcaaagatgaccaccatatatagttgtgtacgtgttattccaagcctttaaatatatacataaacatattttggaatcagaatgagcagaccaaaacataaacaataaatattctcaaagagacaagggaagatgaagtagaaacaggaagtcataaatattagatacgaaaaacataatacatggctgggtgcggtggcacatgcctgtaatcccagcactttgggaagctgagatgggtggatcacctgagctcaggagttcaagagcaacctgaccaatacggtgaaagcccgtctctactaaaaatacaaaaattagcctggggtggtggcgtgcgcctgtagtcccagctacttgggaggctgagagaggagaatagcttgaacctgagaggcagaggttacagtgagctgagatcatgccactgcactccagcctgggcaacagagtgagactctgtctt

SEQ ID NO: 281939 - DNA, 2132 bp, Homo sapiens
gggccgggcggcttttttgcgagtggcgggccgactgtgtagtccgctccggcagcgcgctctgcccggcttcctcagtctcctcgccgggagcgtccgggagcagctccgaggccgcggcgaaaccaggtggagtccgaggttcggaggagtatcagagggcccttctagcccaatccagagctgtaccatggcagagacaagagaagaggagacagtgtcagcagaagcctcagggttctcagacttgagtgactcagagttcctggagtttctggacctagaagatgcccaagagtcaaaggctttagttaacatgcctggcccatcttctgaatcccttgggaaggatgacaaacccataagcttacaaaactggaaaagaggattggatatattatcacccatggagagattccaccttaaatatttatatgtcactgacctggctactcagaactggtgtgaactgcaaacagcatatgggaaggagcttcctggtttcttggcacctgagaaggcagctgtgttggacactggtgccagcatacacctagctagagaactagaacttcatgatcttgtgactgtcccagtcaccactaaagaagatgcttgggcaattaagtttctgaacatacttttgctgattcctaccctgcagtcagaagggcacatcagagagtttccagtgtttggggaaggggagggtgtacttcttgttggagtgattgatgagctgcactatacagccaagggggaactggagctggcggaactcaagacacgcaggcgccctatgctccctctggaagctcagaagaagaaagactgttttcaagtcagcctatacaaatatatctttgatgccatggtacaaggaaaagtgacccctgctagcctaatccaccacacaaagttgtgtcttgtgaagtctttgggtgacctcatggaacttgtcttcttgtctctaacactgtcagacctcccagttattgatatcttgaagattgagtatatccaccaagagactgccactgtgctgggtactgagattgtagccttcaaagagaaggaggtgagagccaaggtgcagcattatatggcctactggatgggccaccgagagccccagggagttgacgtggaggaggcttggaagtgccggacgtgtacctatgcagacatttgtgagtggagaaagggcagtggagtgctcagctctacactggcgccccaagtcaaaaaagccaaatgaatagaaggtatgctttcaagaatgttgatccttcctgctcctgttgtacctaagcaaaagaggaccagtctctgagcttggcttttatggagagtgttcttattttggttcttttttttatttccacaacctctaaccacattcagtccaggaccaaggctcagggatgagtgggagagatgggttatactgtccctggagcttcatcatgattgcctgagaagacagatgctcatcatggctggaatgaaggtatccttcagtaaactttgctttcctaagaaaattcttcagtttctgataagtcatccctatttttatcttgatcaaggctttctacagttacataataaaatgaaatgctgtccaggacagttgaactgatggttttttcataactgcagtccttcaaagatgaccaccatatatagttgtgtacgtgttattccaagcctttaaatatatacataaacatattttggaatcagaatgagcagaccaaaacataaacaataaatattctcaaagagacaagggaagatgaagtagaaacaggaagtcataaatattagatacgaaaaacataatacatggctgggtgcggtggcacatgcctgtaatcccagcactttgggaagctgagatgggtggatcacctgagctcaggagttcaagagcaacctgaccaatacggtgaaagcccgtctctactaaaaatacaaaaattagcctggggtggtggcgtgcgcctgtagtcccagctacttgggaggctgagagaggagaatagcttgaacctgagaggcagaggttacagtgagctgagatcatgccactgcactccagcctgggcaacagagtgagactctgtctt

SEQ ID NO: 281940 - DNA, 2573 bp, Homo sapiens
gggccgggcggcttttttgcgagtggcgggccgactgtgtagtccgctccggcagcgcgctctgcccggcttcctcagtctcctcgccgggagcgtccgggagcagctccgaggccgcggcgaaaccaggtggagtccgaggttcggaggagtatcagaggttaggggaaggccggagaatgggctgggaggctgcgtttcggagcttagggttctgtccctgcgatcgccgcgtctccctcccttggtgggcgcggctcccgggaagcggctcgtctcgtctcccctcacaggccgggttcccgttctggaccttcgccctcggaacacagtgctgttggccgggactccttcccgaggtggacggctccctgttcttattcctggctctgccagaactgtaggaagtgctcagtacactttagggcatgcatggcactccctgggagacagtgctttagggccagaggaaagatcttccctgaaggcaaacgcccgcggagcccacaagtccgggccgcactgaacaagtcaggatgttgccatcggcaattctgcagaaggcagtaacccatctgagagaaagagccgctgtcataagggcccttctagcccaatccagagctgtaccatggcagagacaagagaagaggagacagtgtcagcagaagcctcagggttctcagacttgagtgactcagagttcctggagtttctggacctagaagatgcccaagagtcaaaggctttagttaacatgcctggcccatcttctgaatcccttgggaaggatgacaaacccataagcttacaaaactggaaaagaggattggatatattatcacccatggagagattccaccttaaatatttatatgtcactgacctggctactcagaactggtgtgaactgcaaacagcatatgggaaggagcttcctggtttcttggcacctgagaaggcagctgtgttggacactggtgccagcatacacctagctagagaactagaacttcatgatcttgtgactgtcccagtcaccactaaagaagatgcttgggcaattaagtttctgaacatacttttgctgattcctaccctgcagtcagaagggcacatcagagagtttccagtgtttggggaaggggagggtgtacttcttgttggagtgattgatgagctgcactatacagccaagggggaactggagctggcggaactcaagacacgcaggcgccctatgctccctctggaagctcagaagaagaaagactgttttcaagtcagcctatacaaatatatctttgatgccatggtacaaggaaaagtgacccctgctagcctaatccaccacacaaagttgtgtcttgtgaagtctttgggtgacctcatggaacttgtcttcttgtctctaacactgtcagacctcccagttattgatatcttgaagattgagtatatccaccaagagactgccactgtgctgggtactgagattgtagccttcaaagagaaggaggtgagagccaaggtgcagcattatatggcctactggatgggccaccgagagccccagggagttgacgtggaggaggcttggaagtgccggacgtgtacctatgcagacatttgtgagtggagaaagggcagtggagtgctcagctctacactggcgccccaagtcaaaaaagccaaatgaatagaaggtatgctttcaagaatgttgatccttcctgctcctgttgtacctaagcaaaagaggaccagtctctgagcttggcttttatggagagtgttcttattttggttcttttttttatttccacaacctctaaccacattcagtccaggaccaaggctcagggatgagtgggagagatgggttatactgtccctggagcttcatcatgattgcctgagaagacagatgctcatcatggctggaatgaaggtatccttcagtaaactttgctttcctaagaaaattcttcagtttctgataagtcatccctatttttatcttgatcaaggctttctacagttacataataaaatgaaatgctgtccaggacagttgaactgatggttttttcataactgcagtccttcaaagatgaccaccatatatagttgtgtacgtgttattccaagcctttaaatatatacataaacatattttggaatcagaatgagcagaccaaaacataaacaataaatattctcaaagagacaagggaagatgaagtagaaacaggaagtcataaatattagatacgaaaaacataatacatggctgggtgcggtggcacatgcctgtaatcccagcactttgggaagctgagatgggtggatcacctgagctcaggagttcaagagcaacctgaccaatacggtgaaagcccgtctctactaaaaatacaaaaattagcctggggtggtggcgtgcgcctgtagtcccagctacttgggaggctgagagaggagaatagcttgaacctgagaggcagaggttacagtgagctgagatcatgccactgcactccagcctgggcaacagagtgagactctgtctt

SEQ ID NO: 281941 - DNA, 3070 bp, Homo sapiens
gggccgggcggcttttttgcgagtggcgggccgactgtgtagtccgctccggcagcgcgctctgcccggcttcctcagtctcctcgccgggagcgtccgggagcagctccgaggccgcggcgaaaccaggtggagtccgaggttcggaggagtatcagaggttaggggaaggccggagaatgggctgggaggctgcgtttcggagcttagggttctgtccctgcgatcgccgcgtctccctcccttggtgggcgcggctcccgggaagcggctcgtctcgtctcccctcacaggccgggttcccgttctggaccttcgccctcggaacacagtgctgttggccgggactccttcccgaggtggacggctccctgttcttattcctggctctgccagaactgtaggaagtgctcagtacactttagggcatgcatggcactccctgggagacagtgctttagggccagaggaaagatcttccctgaaggcaaacgcccgcggagcccacaagtccgggccgcactgaacaagtcaggatgttgccatcggcaattctgcagaaggcagtaacccatctgagagaaagagccgctgtcataaggtctcttgcttgagctgctgggttgagaatggagctggaagagggaactgatctcggagctccttggggatcttggttatgtttgacccttttactttcagggggagcagggattggatcaagtcattgcatctagagtacgggggaacgaagaaatcatggagagagtttgccccaggagagaggcgagcgttatgtaacctaggatctggggtgggtaacagtctgtgcagtgtcaatgtgagaggagaaaacacccaacgtgagggaatggtcaggtaagaaaggaccagaagttccggttctaccatagcaaggacctaagttgctaatttaggttctttaatgcagacctggtctttcagaacttctttctcttccctagccttgtcatttcagcattctggccttccctatgaggaggaagatcaacgaagtcacagggcccttctagcccaatccagagctgtaccatggcagagacaagagaagaggagacagtgtcagcagaagcctcagggttctcagacttgagtgactcagagttcctggagtttctggacctagaagatgcccaagagtcaaaggctttagttaacatgcctggcccatcttctgaatcccttgggaaggatgacaaacccataagcttacaaaactggaaaagaggattggatatattatcacccatggagagattccaccttaaatatttatatgtcactgacctggctactcagaactggtgtgaactgcaaacagcatatgggaaggagcttcctggtttcttggcacctgagaaggcagctgtgttggacactggtgccagcatacacctagctagagaactagaacttcatgatcttgtgactgtcccagtcaccactaaagaagatgcttgggcaattaagtttctgaacatacttttgctgattcctaccctgcagtcagaagggcacatcagagagtttccagtgtttggggaaggggagggtgtacttcttgttggagtgattgatgagctgcactatacagccaagggggaactggagctggcggaactcaagacacgcaggcgccctatgctccctctggaagctcagaagaagaaagactgttttcaagtcagcctatacaaatatatctttgatgccatggtacaaggaaaagtgacccctgctagcctaatccaccacacaaagttgtgtctagaaaagccactggggccatcagtgctgaggcatgcccagcagggaggcttctctgtgaagtctttgggtgacctcatggaacttgtcttcttgtctctaacactgtcagacctcccagttattgatatcttgaagattgagtatatccaccaagagactgccactgtgctgggtactgagattgtagccttcaaagagaaggaggtgagagccaaggtgcagcattatatggcctactggatgggccaccgagagccccagggagttgacgtggaggaggcttggaagtgccggacgtgtacctatgcagacatttgtgagtggagaaagggcagtggagtgctcagctctacactggcgccccaagtcaaaaaagccaaatgaatagaaggtatgctttcaagaatgttgatccttcctgctcctgttgtacctaagcaaaagaggaccagtctctgagcttggcttttatggagagtgttcttattttggttcttttttttatttccacaacctctaaccacattcagtccaggaccaaggctcagggatgagtgggagagatgggttatactgtccctggagcttcatcatgattgcctgagaagacagatgctcatcatggctggaatgaaggtatccttcagtaaactttgctttcctaagaaaattcttcagtttctgataagtcatccctatttttatcttgatcaaggctttctacagttacataataaaatgaaatgctgtccaggacagttgaactgatggttttttcataactgcagtccttcaaagatgaccaccatatatagttgtgtacgtgttattccaagcctttaaatatatacataaacatattttggaatcagaatgagcagaccaaaacataaacaataaatattctcaaagagacaagggaagatgaagtagaaacaggaagtcataaatattagatacgaaaaacataatacatggctgggtgcggtggcacatgcctgtaatcccagcactttgggaagctgagatgggtggatcacctgagctcaggagttcaagagcaacctgaccaatacggtgaaagcccgtctctactaaaaatacaaaaattagcctggggtggtggcgtgcgcctgtagtcccagctacttgggaggctgagagaggagaatagcttgaacctgagaggcagaggttacagtgagctgagatcatgccactgcactccagcctgggcaacagagtgagactctgtctt

SEQ ID NO: 281942 - DNA, 2340 bp, Homo sapiens
gggccgggcggcttttttgcgagtggcgggccgactgtgtagtccgctccggcagcgcgctctgcccggcttcctcagtctcctcgccgggagcgtccgggagcagctccgaggccgcggcgaaaccaggtggagggagcagggattggatcaagtcattgcatctagagtacgggggaacgaagaaatcatggagagagtttgccccaggagagaggcgagcgttatgtaacctaggatctggggtgggtaacagtctgtgcagtgtcaatgtgagaggagaaaacacccaacgtgagggaatggtcagccttgtcatttcagcattctggccttccctatgaggaggaagatcaacgaagtcacagggcccttctagcccaatccagagctgtaccatggcagagacaagagaagaggagacagtgtcagcagaagcctcagggttctcagacttgagtgactcagagttcctggagtttctggacctagaagatgcccaagagtcaaaggctttagttaacatgcctggcccatcttctgaatcccttgggaaggatgacaaacccataagcttacaaaactggaaaagaggattggatatattatcacccatggagagattccaccttaaatatttatatgtcactgacctggctactcagaactggtgtgaactgcaaacagcatatgggaaggagcttcctggtttcttggcacctgagaaggcagctgtgttggacactggtgccagcatacacctagctagagaactagaacttcatgatcttgtgactgtcccagtcaccactaaagaagatgcttgggcaattaagtttctgaacatacttttgctgattcctaccctgcagtcagaagggcacatcagagagtttccagtgtttggggaaggggagggtgtacttcttgttggagtgattgatgagctgcactatacagccaagggggaactggagctggcggaactcaagacacgcaggcgccctatgctccctctggaagctcagaagaagaaagactgttttcaagtcagcctatacaaatatatctttgatgccatggtacaaggaaaagtgacccctgctagcctaatccaccacacaaagttgtgtcttgtgaagtctttgggtgacctcatggaacttgtcttcttgtctctaacactgtcagacctcccagttattgatatcttgaagattgagtatatccaccaagagactgccactgtgctgggtactgagattgtagccttcaaagagaaggaggtgagagccaaggtgcagcattatatggcctactggatgggccaccgagagccccagggagttgacgtggaggaggcttggaagtgccggacgtgtacctatgcagacatttgtgagtggagaaagggcagtggagtgctcagctctacactggcgccccaagtcaaaaaagccaaatgaatagaaggtatgctttcaagaatgttgatccttcctgctcctgttgtacctaagcaaaagaggaccagtctctgagcttggcttttatggagagtgttcttattttggttcttttttttatttccacaacctctaaccacattcagtccaggaccaaggctcagggatgagtgggagagatgggttatactgtccctggagcttcatcatgattgcctgagaagacagatgctcatcatggctggaatgaaggtatccttcagtaaactttgctttcctaagaaaattcttcagtttctgataagtcatccctatttttatcttgatcaaggctttctacagttacataataaaatgaaatgctgtccaggacagttgaactgatggttttttcataactgcagtccttcaaagatgaccaccatatatagttgtgtacgtgttattccaagcctttaaatatatacataaacatattttggaatcagaatgagcagaccaaaacataaacaataaatattctcaaagagacaagggaagatgaagtagaaacaggaagtcataaatattagatacgaaaaacataatacatggctgggtgcggtggcacatgcctgtaatcccagcactttgggaagctgagatgggtggatcacctgagctcaggagttcaagagcaacctgaccaatacggtgaaagcccgtctctactaaaaatacaaaaattagcctggggtggtggcgtgcgcctgtagtcccagctacttgggaggctgagagaggagaatagcttgaacctgagaggcagaggttacagtgagctgagatcatgccactgcactccagcctgggcaacagagtgagactctgtctt

SEQ ID NO: 281943 - DNA, 2365 bp, Homo sapiens
gggccgggcggcttttttgcgagtggcgggccgactgtgtagtccgctccggcagcgcgctctgcccggcttcctcagtctcctcgccgggagcgtccgggagcagctccgaggccgcggcgaaaccaggtggagtccgaggttcggaggagtatcagagggagcagggattggatcaagtcattgcatctagagtacgggggaacgaagaaatcatggagagagtttgccccaggagagaggcgagcgttatgtaacctaggatctggggtgggtaacagtctgtgcagtgtcaatgtgagaggagaaaacacccaacgtgagggaatggtcagccttgtcatttcagcattctggccttccctatgaggaggaagatcaacgaagtcacagggcccttctagcccaatccagagctgtaccatggcagagacaagagaagaggagacagtgtcagcagaagcctcagggttctcagacttgagtgactcagagttcctggagtttctggacctagaagatgcccaagagtcaaaggctttagttaacatgcctggcccatcttctgaatcccttgggaaggatgacaaacccataagcttacaaaactggaaaagaggattggatatattatcacccatggagagattccaccttaaatatttatatgtcactgacctggctactcagaactggtgtgaactgcaaacagcatatgggaaggagcttcctggtttcttggcacctgagaaggcagctgtgttggacactggtgccagcatacacctagctagagaactagaacttcatgatcttgtgactgtcccagtcaccactaaagaagatgcttgggcaattaagtttctgaacatacttttgctgattcctaccctgcagtcagaagggcacatcagagagtttccagtgtttggggaaggggagggtgtacttcttgttggagtgattgatgagctgcactatacagccaagggggaactggagctggcggaactcaagacacgcaggcgccctatgctccctctggaagctcagaagaagaaagactgttttcaagtcagcctatacaaatatatctttgatgccatggtacaaggaaaagtgacccctgctagcctaatccaccacacaaagttgtgtcttgtgaagtctttgggtgacctcatggaacttgtcttcttgtctctaacactgtcagacctcccagttattgatatcttgaagattgagtatatccaccaagagactgccactgtgctgggtactgagattgtagccttcaaagagaaggaggtgagagccaaggtgcagcattatatggcctactggatgggccaccgagagccccagggagttgacgtggaggaggcttggaagtgccggacgtgtacctatgcagacatttgtgagtggagaaagggcagtggagtgctcagctctacactggcgccccaagtcaaaaaagccaaatgaatagaaggtatgctttcaagaatgttgatccttcctgctcctgttgtacctaagcaaaagaggaccagtctctgagcttggcttttatggagagtgttcttattttggttcttttttttatttccacaacctctaaccacattcagtccaggaccaaggctcagggatgagtgggagagatgggttatactgtccctggagcttcatcatgattgcctgagaagacagatgctcatcatggctggaatgaaggtatccttcagtaaactttgctttcctaagaaaattcttcagtttctgataagtcatccctatttttatcttgatcaaggctttctacagttacataataaaatgaaatgctgtccaggacagttgaactgatggttttttcataactgcagtccttcaaagatgaccaccatatatagttgtgtacgtgttattccaagcctttaaatatatacataaacatattttggaatcagaatgagcagaccaaaacataaacaataaatattctcaaagagacaagggaagatgaagtagaaacaggaagtcataaatattagatacgaaaaacataatacatggctgggtgcggtggcacatgcctgtaatcccagcactttgggaagctgagatgggtggatcacctgagctcaggagttcaagagcaacctgaccaatacggtgaaagcccgtctctactaaaaatacaaaaattagcctggggtggtggcgtgcgcctgtagtcccagctacttgggaggctgagagaggagaatagcttgaacctgagaggcagaggttacagtgagctgagatcatgccactgcactccagcctgggcaacagagtgagactctgtctt

SEQ ID NO: 281944 - DNA, 2726 bp, Homo sapiens
gggcccgcgcgggggattcggggctccgcgggttcaggcccgggggcggggcccgggggccatcttggctatgggcggaagttttcttcagagaccgagggacgggaatccgttgccgcccccggccgggcggcacgaccccgatttgggtataggagagacgagcgtgggaactggcggacccccatacaagtaaaggcgggcggcacggggcacggcccacccggggaccccctggatgcggcacggcccccgcaactcggccgcccgcctgccgcctcccgtaaccccgggcgcccgccagcggcgcagctcgcgccaattctcgtacggtttcacgccgggtgcggcgctggactgcggagccagccgggccgctgcgcaatttgcgtagcgaacggcgcccgcgcaggcgcggagggggaggggggcggagcagcgggagccggggagccggagccccgggtccccacgacctgagccggctctcccatcagcggcctgaggacctggcgtccgcctcctccctccccttgaggctggagcgtggacgcggtgggggagggtggggcgggggcagctttcgagaattacgaggacaggaggcagaggccctccccatccgcattattggaggagagagagcctcccccagcttggggagggggagagcggggcattgggcgcccctcgcagcggccgctgccctgacccgacgggtatcagccggctctccccctccacccaggacgacatgaacgaccgaggccagggagtcctctccttgggcctctgcatccccccatccttggctctggggtaggcccagggaggagacacccccaacccctatccggtctgtcctggagaaaagagactgcccttccatgcccctgagtgaggggcctggggcccaggctgcctgtgttccccaagggcaagggtctctctgttgaggaggaggggcctgtcagccacaacttctttcctcctgagcgccccatctccctctctgcaccctgcaattcccacccctccgtatttatttccctggtcccgccgacagtccctccttgtctgtctccgggattcaggcctccctccctgacatggagagtaacctgtctggcctggtgcctgctgccgggctggtgcctgcgctgccacctgctgtgaccctggggctgacagctgcctacaccaccctgtatgccctgctcttcttctccgtctatgcccagctctggctggtgcttctgtatgggcacaagcgtctcagctatcagacggtgttcctggccctctgtctgctctgggccgccttgcgtaccaccctcttctccttctacttccgagatactccccgcgccaaccgcctggggcccttgcccttctggcttctctactgctgccccgtctgcctgcagttcttcaccttgacgcttatgaacctctactttgcccaggtggtgttcaaggccaaggtgaagcgtcggccggagatgagccgaggcttgctcgctgtccgaggggcctttgtgggggcctcgctgctctttctgctggtgaacgtgctgtgtgctgtgctctcccatcggcgccgggcacagccctgggccctgctgcttgtccgcgtcctggtgagcgactccctgttcgtcatctgcgcgctgtctcttgctgcctgcctctgcctcgtcgccaggcgggcgccctccactagcatctacctggaggccaaggggaccagtgtgtgccaggcggccgcgatgggtggcgccatggtcctgctctatgccagccgggcctgctacaacctgacagcactggccttggccccccagagccggctggacaccttcgattacgactggtacaatgtgtctgaccaggtgggcatacgcatgtctgccacctccttagtagccgtggcaccttggccccagctggcctgggccctgtcccactacccctttggcgtgactgcagactggcaccagcccctgccttcccacaggcggacctggtgaatgacctggggaacaaaggctacctggtatttggcctcatcctcttcgtgtgggagctactgcccaccaccctgctggtgggcttcttccgggtgcaccggcccccacaggacctgagcaccagccacatcctcaatgggcaggtctttgcctctcggtcctacttctttgaccgggctgggcactgtgaagatgagggctgctcctgggagcacagccggggtgagagcaccagtatgtcgggcagtctaggctctgggagctggtatggtgccatcgggcgtgagccgggctggtatgggggcagccagacgaagaccactcctctgctcttctcccaggtgccaggaccaggcggccaccaccacagtctctactccaccccacagacgtgatccccctccctcccccacagaatacccaggccccagtccccctcaccctaggcccctgtgccaagtttgtctgccgcttcttgcccaggatcctgggggtcgtggctaccccctcctctggccggctccttgctgctcctgtcatagtgagcttgtgccgtccccctaggatggggggcatggccctggctgccagatgcccacagcaccctggcatgacctgccacctctgcttccacaccggagccagctacctctcctgtgcctgccactcaataaacagtgtctgcgccccacaaaa

SEQ ID NO: 281945 - DNA, 2640 bp, Homo sapiens
gggcccgcgcgggggattcggggctccgcgggttcaggcccgggggcggggcccgggggccatcttggctatgggcggaagttttcttcagagaccgagggacgggaatccgttgccgcccccggccgggcggcacgaccccgatttgggtataggagagacgagcgtgggaactggcggacccccatacaagtaaaggcgggcggcacggggcacggcccacccggggaccccctggatgcggcacggcccccgcaactcggccgcccgcctgccgcctcccgtaaccccgggcgcccgccagcggcgcagctcgcgccaattctcgtacggtttcacgccgggtgcggcgctggactgcggagccagccgggccgctgcgcaatttgcgtagcgaacggcgcccgcgcaggcgcggagggggaggggggcggagcagcgggagccggggagccggagccccgggtccccacgacctgagccggctctcccatcagcggcctgaggacctggcgtccgcctcctccctccccttgaggctggagcgtggacgcggtgggggagggtggggcgggggcagctttcgagaattacgaggacaggaggcagaggccctccccatccgcattattggaggagagagagcctccccctccacccaggacgacatgaacgaccgaggccagggagtcctctccttgggcctctgcatccccccatccttggctctggggtaggcccagggaggagacacccccaacccctatccggtctgtcctggagaaaagagactgcccttccatgcccctgagtgaggggcctggggcccaggctgcctgtgttccccaagggcaagggtctctctgttgaggaggaggggcctgtcagccacaacttctttcctcctgagcgccccatctccctctctgcaccctgcaattcccacccctccgtatttatttccctggtcccgccgacagtccctccttgtctgtctccgggattcaggcctccctccctgacatggagagtaacctgtctggcctggtgcctgctgccgggctggtgcctgcgctgccacctgctgtgaccctggggctgacagctgcctacaccaccctgtatgccctgctcttcttctccgtctatgcccagctctggctggtgcttctgtatgggcacaagcgtctcagctatcagacggtgttcctggccctctgtctgctctgggccgccttgcgtaccaccctcttctccttctacttccgagatactccccgcgccaaccgcctggggcccttgcccttctggcttctctactgctgccccgtctgcctgcagttcttcaccttgacgcttatgaacctctactttgcccaggtggtgttcaaggccaaggtgaagcgtcggccggagatgagccgaggcttgctcgctgtccgaggggcctttgtgggggcctcgctgctctttctgctggtgaacgtgctgtgtgctgtgctctcccatcggcgccgggcacagccctgggccctgctgcttgtccgcgtcctggtgagcgactccctgttcgtcatctgcgcgctgtctcttgctgcctgcctctgcctcgtcgccaggcgggcgccctccactagcatctacctggaggccaaggggaccagtgtgtgccaggcggccgcgatgggtggcgccatggtcctgctctatgccagccgggcctgctacaacctgacagcactggccttggccccccagagccggctggacaccttcgattacgactggtacaatgtgtctgaccaggtgggcatacgcatgtctgccacctccttagtagccgtggcaccttggccccagctggcctgggccctgtcccactacccctttggcgtgactgcagactggcaccagcccctgccttcccacaggcggacctggtgaatgacctggggaacaaaggctacctggtatttggcctcatcctcttcgtgtgggagctactgcccaccaccctgctggtgggcttcttccgggtgcaccggcccccacaggacctgagcaccagccacatcctcaatgggcaggtctttgcctctcggtcctacttctttgaccgggctgggcactgtgaagatgagggctgctcctgggagcacagccggggtgagagcaccagtatgtcgggcagtctaggctctgggagctggtatggtgccatcgggcgtgagccgggctggtatgggggcagccagacgaagaccactcctctgctcttctcccaggtgccaggaccaggcggccaccaccacagtctctactccaccccacagacgtgatccccctccctcccccacagaatacccaggccccagtccccctcaccctaggcccctgtgccaagtttgtctgccgcttcttgcccaggatcctgggggtcgtggctaccccctcctctggccggctccttgctgctcctgtcatagtgagcttgtgccgtccccctaggatggggggcatggccctggctgccagatgcccacagcaccctggcatgacctgccacctctgcttccacaccggagccagctacctctcctgtgcctgccactcaataaacagtgtctgcgccccacaaaa

SEQ ID NO: 281946 - DNA, 2602 bp, Homo sapiens
gggcccgcgcgggggattcggggctccgcgggttcaggcccgggggcggggcccgggggccatcttggctatgggcggaagttttcttcagagaccgagggacgggaatccgttgccgcccccggccgggcggcacgaccccgatttgggtataggagagacgagcgtgggaactggcggacccccatacaagtaaaggcgggcggcacggggcacggcccacccggggaccccctggatgcggcacggcccccgcaactcggccgcccgcctgccgcctcccgtaaccccgggcgcccgccagcggcgcagctcgcgccaattctcgtacggtttcacgccgggtgcggcgctggactgcggagccagccgggccgctgcgcaatttgcgtagcgaacggcgcccgcgcaggcgcggagggggaggggggcggagcagcgggagccggggagccggagccccgggtccccacgacctgagccggctctcccatcagcggcctgaggacctggcgtccgcctcctccctccccttgaggctggagcgtggacgcggtgggggagggtggggcgggggcagctttcgagaattacgaggacaggaggcagaggccctccccatccgcattattggaggagagagagcctcccccagcttggggagggggagagcggggcattgggcgcccctcgcagcggccgctgccctgacccgacgggtatcagccggctctccccctccacccaggacgacatgaacgaccgaggccagggagtcctctccttgggcctctgcatccccccatccttggctctggggtaggcccagggaggagacacccccaacccctatccggtctgtcctggagaaaagagactgcccttccatgcccctgagtgaggggcctggggcccaggctgcctgtgttccccaagggcaagggtctctctgttgaggaggaggggcctgtcagccacaacttctttcctcctgagcgccccatctccctctctgcaccctgcaattcccacccctccgtatttatttccctggtcccgccgacagtccctccttgtctgtctccgggattcaggcctccctccctgacatggagagtaacctgtctggcctggtgcctgctgccgggctggtgcctgcgctgccacctgctgtgaccctggggctgacagctgcctacaccaccctgtatgccctgctcttcttctccgtctatgcccagctctggctggtgcttctgtatgggcacaagcgtctcagctatcagacggtgttcctggccctctgtctgctctgggccgccttgcgtaccaccctcttctccttctacttccgagatactccccgcgccaaccgcctggggcccttgcccttctggcttctctactgctgccccgtctgcctgcagttcttcaccttgacgcttatgaacctctactttgcccaggtggtgttcaaggccaaggtgaagcgtcggccggagatgagccgaggcttgctcgctgtccgaggggcctttgtgggggcctcgctgctctttctgctggtgaacgtgctgtgtgctgtgctctcccatcggcgccgggcacagccctgggccctgctgcttgtccgcgtcctggtgagcgactccctgttcgtcatctgcgcgctgtctcttgctgcctgcctctgcctcgtcgccaggcgggcgccctccactagcatctacctggaggccaaggggaccagtgtgtgccaggcggccgcgatgggtggcgccatggtcctgctctatgccagccgggcctgctacaacctgacagcactggccttggccccccagagccggctggacaccttcgattacgactggtacaatgtgtctgaccagggcggacctggtgaatgacctggggaacaaaggctacctggtatttggcctcatcctcttcgtgtgggagctactgcccaccaccctgctggtgggcttcttccgggtgcaccggcccccacaggacctgagcaccagccacatcctcaatgggcaggtctttgcctctcggtcctacttctttgaccgggctgggcactgtgaagatgagggctgctcctgggagcacagccggggtgagagcaccagtatgtcgggcagtctaggctctgggagctggtatggtgccatcgggcgtgagccgggctggtatgggggcagccagacgaagaccactcctctgctcttctcccaggtgccaggaccaggcggccaccaccacagtctctactccaccccacagacgtgatccccctccctcccccacagaatacccaggccccagtccccctcaccctaggcccctgtgccaagtttgtctgccgcttcttgcccaggatcctgggggtcgtggctaccccctcctctggccggctccttgctgctcctgtcatagtgagcttgtgccgtccccctaggatggggggcatggccctggctgccagatgcccacagcaccctggcatgacctgccacctctgcttccacaccggagccagctacctctcctgtgcctgccactcaataaacagtgtctgcgccccacaaaa

SEQ ID NO: 281947 - DNA, 2200 bp, Homo sapiens
atccaaggctcctcgtccgcagcctttttcctccctccttcggccccggggctcacatcctcgctgcctcacaccttgggcgtgtgtgggagcaggagagggattctctggggtccccatttggaacctggagacccacttctgccaacaagtccttcagcccctctgggccttagtttccccccagtgaagtggggatagtgacagctcccccgggagccagtgaaaactttgtgaagggagtgattactgcgggcgaaggcgcttggcacagccacaactgaagctcagccgtcggatgtgattattgttgctattgttaccgctccgcctggactgggtgcccggtcggaaagtcccgctccccgctcctcctcccaggcgcggaagcttcgcgccgcccgcctcgggggacacctcccgcgccatctcgggggcactggagataaggaaaggaacctcctccctggctgggatggctgcccgggcgcgggaggagggccggggacccggtgagggaggaccgtagggcccgtgggggcttcacgcctggcaggcggccggccaggcctccctccctgacatggagagtaacctgtctggcctggtgcctgctgccgggctggtgcctgcgctgccacctgctgtgaccctggggctgacagctgcctacaccaccctgtatgccctgctcttcttctccgtctatgcccagctctggctggtgcttctgtatgggcacaagcgtctcagctatcagacggtgttcctggccctctgtctgctctgggccgccttgcgtaccaccctcttctccttctacttccgagatactccccgcgccaaccgcctggggcccttgcccttctggcttctctactgctgccccgtctgcctgcagttcttcaccttgacgcttatgaacctctactttgcccaggtggtgttcaaggccaaggtgaagcgtcggccggagatgagccgaggcttgctcgctgtccgaggggcctttgtgggggcctcgctgctctttctgctggtgaacgtgctgtgtgctgtgctctcccatcggcgccgggcacagccctgggccctgctgcttgtccgcgtcctggtgagcgactccctgttcgtcatctgcgcgctgtctcttgctgcctgcctctgcctcgtcgccaggcgggcgccctccactagcatctacctggaggccaaggggaccagtgtgtgccaggcggccgcgatgggtggcgccatggtcctgctctatgccagccgggcctgctacaacctgacagcactggccttggccccccagagccggctggacaccttcgattacgactggtacaatgtgtctgaccaggtgggcatacgcatgtctgccacctccttagtagccgtggcaccttggccccagctggcctgggccctgtcccactacccctttggcgtgactgcagactggcaccagcccctgccttcccacaggcggacctggtgaatgacctggggaacaaaggctacctggtatttggcctcatcctcttcgtgtgggagctactgcccaccaccctgctggtgggcttcttccgggtgcaccggcccccacaggacctgagcaccagccacatcctcaatgggcaggtctttgcctctcggtcctacttctttgaccgggctgggcactgtgaagatgagggctgctcctgggagcacagccggggtgagagcaccagtatgtcgggcagtctaggctctgggagctggtatggtgccatcgggcgtgagccgggctggtatgggggcagccagacgaagaccactcctctgctcttctcccaggtgccaggaccaggcggccaccaccacagtctctactccaccccacagacgtgatccccctccctcccccacagaatacccaggccccagtccccctcaccctaggcccctgtgccaagtttgtctgccgcttcttgcccaggatcctgggggtcgtggctaccccctcctctggccggctccttgctgctcctgtcatagtgagcttgtgccgtccccctaggatggggggcatggccctggctgccagatgcccacagcaccctggcatgacctgccacctctgcttccacaccggagccagctacctctcctgtgcctgccactcaataaacagtgtctgcgccccacaaaa

SEQ ID NO: 281948 - DNA, 1824 bp, Homo sapiens
gggcccgcgcgggggattcggggctccgcgggttcaggcccgggggcggggcccgggggccatcttggctatgggcggaagttttcttcagagaccgagggacgggaatccgttgccgcccccggccgggcggcacgaccccgatttgggtataggagagacgagcgtgggaactggcggacccccatacaagcctccctccctgacatggagagtaacctgtctggcctggtgcctgctgccgggctggtgcctgcgctgccacctgctgtgaccctggggctgacagctgcctacaccaccctgtatgccctgctcttcttctccgtctatgcccagctctggctggtgcttctgtatgggcacaagcgtctcagctatcagacggtgttcctggccctctgtctgctctgggccgccttgcgtaccaccctcttctccttctacttccgagatactccccgcgccaaccgcctggggcccttgcccttctggcttctctactgctgccccgtctgcctgcagttcttcaccttgacgcttatgaacctctactttgcccaggtggtgttcaaggccaaggtgaagcgtcggccggagatgagccgaggcttgctcgctgtccgaggggcctttgtgggggcctcgctgctctttctgctggtgaacgtgctgtgtgctgtgctctcccatcggcgccgggcacagccctgggccctgctgcttgtccgcgtcctggtgagcgactccctgttcgtcatctgcgcgctgtctcttgctgcctgcctctgcctcgtcgccaggcgggcgccctccactagcatctacctggaggccaaggggaccagtgtgtgccaggcggccgcgatgggtggcgccatggtcctgctctatgccagccgggcctgctacaacctgacagcactggccttggccccccagagccggctggacaccttcgattacgactggtacaatgtgtctgaccaggtgggcatacgcatgtctgccacctccttagtagccgtggcaccttggccccagctggcctgggccctgtcccactacccctttggcgtgactgcagactggcaccagcccctgccttcccacaggcggacctggtgaatgacctggggaacaaaggctacctggtatttggcctcatcctcttcgtgtgggagctactgcccaccaccctgctggtgggcttcttccgggtgcaccggcccccacaggacctgagcaccagccacatcctcaatgggcaggtctttgcctctcggtcctacttctttgaccgggctgggcactgtgaagatgagggctgctcctgggagcacagccggggtgagagcaccagtatgtcgggcagtctaggctctgggagctggtatggtgccatcgggcgtgagccgggctggtatgggggcagccagacgaagaccactcctctgctcttctcccaggtgccaggaccaggcggccaccaccacagtctctactccaccccacagacgtgatccccctccctcccccacagaatacccaggccccagtccccctcaccctaggcccctgtgccaagtttgtctgccgcttcttgcccaggatcctgggggtcgtggctaccccctcctctggccggctccttgctgctcctgtcatagtgagcttgtgccgtccccctaggatggggggcatggccctggctgccagatgcccacagcaccctggcatgacctgccacctctgcttccacaccggagccagctacctctcctgtgcctgccactcaataaacagtgtctgcgccccacaaaa

SEQ ID NO: 281949 - DNA, 2537 bp, Homo sapiens
gggcccgcgcgggggattcggggctccgcgggttcaggcccgggggcggggcccgggggccatcttggctatgggcggaagttttcttcagagaccgagggacgggaatccgttgccgcccccggccgggcggcacgaccccgatttgggtataggagagacgagcgtgggaactggcggacccccatacaagtaaaggcgggcggcacggggcacggcccacccggggaccccctggatgcggcacggcccccgcaactcggccgcccgcctgccgcctcccgtaaccccgggcgcccgccagcggcgcagctcgcgccaattctcgtacggtttcacgccgggtgcggcgctggactgcggagccagccgggccgctgcgcaatttgcgtagcgaacggcgcccgcgcaggcgcggagggggaggggggcggagcagcgggagccggggagccggagccccgggtccccacgacctgagccggctctcccatcagcggcctgaggacctggcgtccgcctcctccctccccttgaggctggagcgtggacgcggtgggggagggtggggcgggggcagctttcgagaattacgaggacaggaggcagaggccctccccatccgcattattggaggagagagagcctcccccagcttggggagggggagagcggggcattgggcgcccctcgcagcggccgctgccctgacccgacgggtatcagccggctctccccctccacccaggacgacatgaacgaccgaggccagggagtcctctccttgggcctctgcatccccccatccttggctctggggtaggcccagggaggagacacccccaacccctatccggtctgtcctggagaaaagagactgcccttccatgcccctgagtgaggggcctggggcccaggctgcctgtgttccccaagggcaagggtctctctgttgaggaggaggggcctgtcagccacaacttctttcctcctgagcgccccatctccctctctgcaccctgcaattcccacccctccgtatttatttccctggtcccgccgacagtccctccttgtctgtctccgggattcaggcctccctccctgacatggagagtaacctgtctggcctggtgcctgctgccgggctggtgcctgcgctgccacctgctgtgaccctggggctgacagctgcctacaccaccctgtatgccctgctcttcttctccgtctatgcccagctctggctggtgcttctgtatgggcacaagcgtctcagctatcagacggtgttcctggccctctgtctgctctgggccgccttgcgtaccaccctcttctccttctacttccgagatactccccgcgccaaccgcctggggcccttgcccttctggcttctctactgctgccccgtctgcctgcagttcttcaccttgacgcttatgaacctctactttgcccaggtggtgttcaaggccaaggtgaagcgtcggccggagatgagccgaggcttgcgggcgccctccactagcatctacctggaggccaaggggaccagtgtgtgccaggcggccgcgatgggtggcgccatggtcctgctctatgccagccgggcctgctacaacctgacagcactggccttggccccccagagccggctggacaccttcgattacgactggtacaatgtgtctgaccaggtgggcatacgcatgtctgccacctccttagtagccgtggcaccttggccccagctggcctgggccctgtcccactacccctttggcgtgactgcagactggcaccagcccctgccttcccacaggcggacctggtgaatgacctggggaacaaaggctacctggtatttggcctcatcctcttcgtgtgggagctactgcccaccaccctgctggtgggcttcttccgggtgcaccggcccccacaggacctgagcaccagccacatcctcaatgggcaggtctttgcctctcggtcctacttctttgaccgggctgggcactgtgaagatgagggctgctcctgggagcacagccggggtgagagcaccagtatgtcgggcagtctaggctctgggagctggtatggtgccatcgggcgtgagccgggctggtatgggggcagccagacgaagaccactcctctgctcttctcccaggtgccaggaccaggcggccaccaccacagtctctactccaccccacagacgtgatccccctccctcccccacagaatacccaggccccagtccccctcaccctaggcccctgtgccaagtttgtctgccgcttcttgcccaggatcctgggggtcgtggctaccccctcctctggccggctccttgctgctcctgtcatagtgagcttgtgccgtccccctaggatggggggcatggccctggctgccagatgcccacagcaccctggcatgacctgccacctctgcttccacaccggagccagctacctctcctgtgcctgccactcaataaacagtgtctgcgccccacaaaa

SEQ ID NO: 281950 - DNA, 1897 bp, Homo sapiens
gcagatggctcagcagaggccttgcagatctgcaaggcacaggaataggaatgcttgtggtagtgtgagggagagggccccagtgtcatccaccatggagggcgagctggaggctccagcccatggaagcaccaaagccatatgcactcctgggtgacctggggccgcaatgccctcgtcatttgtacagtgtcttacggtttataaagagctttcccagccatcttttatttgtacaatttccctgagaggctactatcctcccttgagagatgaagaaactgaggcccagccaggtaagacagcaggatcaaggtcgcagagctggggctcagacagagacttctgactccagttggtgcaccttccgaagtaccatggctgtcagtcaccttctgacctttttgggcctcagtttctccatctgtaagagtggaggaacagggctcagactggatgccctgagttttgtcgacattggggtttcctgcaggaggtggggcaggtggtgagtgctgagggctgttgagggcccgcgctgactgtgctgtggctgcaggctcgctgtccgaggggcctttgtgggggcctcgctgctctttctgctggtgaacgtgctgtgtgctgtgctctcccatcggcgccgggcacagccctgggccctgctgcttgtccgcgtcctggtgagcgactccctgttcgtcatctgcgcgctgtctcttgctgcctgcctctgcctcgtcgccaggcgggcgccctccactagcatctacctggaggccaaggtagggctgcagcactgatgcccaggtgtcttttgggtctctcggcagcggttctcagggtgtagaggaagctgggagccttctctccctgagggtcctctgttgttacctgtgccagggaccgttgtgggaccagtgtgtgccaggcggccgcgatgggtggcgccatggtcctgctctatgccagccgggcctgctacaacctgacagcactggccttggccccccagagccggctggacaccttcgattacgactggtacaatgtgtctgaccaggtgggcatacgcatgtctgccacctccttagtagccgtggcaccttggccccagctggcctgggccctgtcccactacccctttggcgtgactgcagactggcaccagcccctgccttcccacaggcggacctggtgaatgacctggggaacaaaggctacctggtatttggcctcatcctcttcgtgtgggagctactgcccaccaccctgctggtgggcttcttccgggtgcaccggcccccacaggacctgagcaccagccacatcctcaatgggcaggtctttgcctctcggtcctacttctttgaccgggctgggcactgtgaagatgagggctgctcctgggagcacagccggggtgagagcaccagtatgtcgggcagtctaggctctgggagctggtatggtgccatcgggcgtgagccgggctggtatgggggcagccagacgaagaccactcctctgctcttctcccaggtgccaggaccaggcggccaccaccacagtctctactccaccccacagacgtgatccccctccctcccccacagaatacccaggccccagtccccctcaccctaggcccctgtgccaagtttgtctgccgcttcttgcccaggatcctgggggtcgtggctaccccctcctctggccggctccttgctgctcctgtcatagtgagcttgtgccgtccccctaggatggggggcatggccctggctgccagatgcccacagcaccctggcatgacctgccacctctgcttccacaccggagccagctacctctcctgtgcctgccactcaataaacagtgtctgcgccccacaaaa

SEQ ID NO: 281951 - DNA, 1700 bp, Homo sapiens
atccaaggctcctcgtccgcagcctttttcctccctccttcggccccggggctcacatcctcgctgcctcacaccttgggcgtgtgtgggagcaggagagggattctctggggtccccatttggaacctggagacccacttctgccaacaagtccttcagcccctctgggccttagtttccccccagtgaagtggggatagtgacagctcccccgggagccagtgaaaactttgtgaagggagtgattactgcgggcgaaggcgcttggcacagccacaactgaagctcagccgtcggatgtgattattgttgctattgttaccgctccgcctggactgggtgcccggtcggaaagtcccgctccccgctcctcctcccaggcgcggaagcttcgcgccgcccgcctcgggggacacctcccgcgccatctcgggggcactggagataaggaaaggaacctcctccctggctgggatggctgcccgggcgcgggaggagggccggggacccggtgagggaggaccgtagggcccgtgggggcttcacgcctggcaggcggccggccaggcctccctccctgacatggagagtaacctgtctggcctggtgcctgctgccgggctggtgcctgcgctgccacctgctgtgaccctggggctgacagctgcctacaccaccctgtatgccctgctcttcttctccgtctatgcccagctctggctggtgcttctgtatgggcacaagcgtctcagctatcagacggtgttcctggccctctgtctgctctgggccgccttgcgtaccaccctcttctccttctacttccgagatactccccgcgccaaccgcctggggcccttgcccttctggcttctctactgctgccccgtctgcctgcagttcttcaccttgacgcttatgaacctctactttgcccaggtggtgttcaaggccaaggtgaagcgtcggccggagatgagccgaggcttggcggacctggtgaatgacctggggaacaaaggctacctggtatttggcctcatcctcttcgtgtgggagctactgcccaccaccctgctggtgggcttcttccgggtgcaccggcccccacaggacctgagcaccagccacatcctcaatgggcaggtctttgcctctcggtcctacttctttgaccgggctgggcactgtgaagatgagggctgctcctgggagcacagccggggtgagagcaccagtatgtcgggcagtctaggctctgggagctggtatggtgccatcgggcgtgagccgggctggtatgggggcagccagacgaagaccactcctctgctcttctcccaggtgccaggaccaggcggccaccaccacagtctctactccaccccacagacgtgatccccctccctcccccacagaatacccaggccccagtccccctcaccctaggcccctgtgccaagtttgtctgccgcttcttgcccaggatcctgggggtcgtggctaccccctcctctggccggctccttgctgctcctgtcatagtgagcttgtgccgtccccctaggatggggggcatggccctggctgccagatgcccacagcaccctggcatgacctgccacctctgcttccacaccggagccagctacctctcctgtgcctgccactcaataaacagtgtctgcgccccacaaaa

SEQ ID NO: 281952 - DNA, 642 bp, Homo sapiens
ataagtcggtacctcgctattcatctggcacctgtaccggcggacctggtgaatgacctggggaacaaaggctacctggtatttggcctcatcctcttcgtgtgggagctactgcccaccaccctgctggtgggcttcttccgggtgcaccggcccccacaggacctgagcaccagccacatcctcaatgggcaggtctttgcctctcggtcctacttctttgaccgggctgggcactgtgaagatgagggctgctcctgggagcacagccggggtgagagcaccaggtgccaggaccaggcggccaccaccacagtctctactccaccccacagacgtgatccccctccctcccccacagaatacccaggccccagtccccctcaccctaggcccctgtgccaagtttgtctgccgcttcttgcccaggatcctgggggtcgtggctaccccctcctctggccggctccttgctgctcctgtcatagtgagcttgtgccgtccccctaggatggggggcatggccctggctgccagatgcccacagcaccctggcatgacctgccacctctgcttccacaccggagccagctacctctcctgtgcctgccactcaataaacagtgtctgcgccccacaaaa

SEQ ID NO: 281953 - DNA, 372 bp, Homo sapiens
gagccggctggacaccttcgattacgactggtacaatgtgtctgaccaggtgggcatacgcatgtctgccacctccttagtagccgtggcaccttggccccagctggcctgggccctgtcccactacccctttggcgtgactgcagactggcaccagcccctgccttcccacaggcggacctggtgaatgacctggggaacaaaggctacctggtatttggcctcatcctcttcgtgtgggagctactgcccaccaccctgctggtgggcttcttccgggtgcaccggcccccacaggacctggtaagggtctgctccctcttctgtggggccagtggagggggcggatgttgcaaatcctgggttggagtc

SEQ ID NO: 281954 - DNA, 2854 bp, Homo sapiens
gggcccgcgcgggggattcggggctccgcgggttcaggcccgggggcggggcccgggggccatcttggctatgggcggaagttttcttcagagaccgagggacgggaatccgttgccgcccccggccgggcggcacgaccccgatttgggtataggagagacgagcgtgggaactggcggacccccatacaagtaaaggcgggcggcacggggcacggcccacccggggaccccctggatgcggcacggcccccgcaactcggccgcccgcctgccgcctcccgtaaccccgggcgcccgccagcggcgcagctcgcgccaattctcgtacggtttcacgccgggtgcggcgctggactgcggagccagccgggccgctgcgcaatttgcgtagcgaacggcgcccgcgcaggcgcggagggggaggggggcggagcagcgggagccggggagccggagccccgggtccccacgacctgagccggctctcccatcagcggcctgaggacctggcgtccgcctcctccctccccttgaggctggagcgtggacgcggtgggggagggtggggcgggggcagctttcgagaattacgaggacaggaggcagaggccctccccatccgcattattggaggagagagagcctcccccagcttggggagggggagagcggggcattgggcgcccctcgcagcggccgctgccctgacccgacgggtatcagccggctctccccctccacccaggacgacatgaacgaccgaggccagggagtcctctccttgggcctctgcatccccccatccttggctctggggtaggcccagggaggagacacccccaacccctatccggtctgtcctggagaaaagagactgcccttccatgcccctgagtgaggggcctggggcccaggctgcctgtgttccccaagggcaagggtctctctgttgaggaggaggggcctgtcagccacaacttctttcctcctgagcgccccatctccctctctgcaccctgcaattcccacccctccgtatttatttccctggtcccgccgacagtccctccttgtctgtctccgggattcaggcctccctccctgacatggagagtaacctgtctggcctggtgcctgctgccgggctggtgcctgcgctgccacctgctgtgaccctggggctgacagctgcctacaccaccctgtatgccctgctcttcttctccgtctatgcccagctctggctggtgcttctgtatgggcacaagcgtctcagctatcagacggtgttcctggccctctgtctgctctgggccgccttgcgtaccaccctcttctccttctacttccgagatactccccgcgccaaccgcctggggcccttgcccttctggcttctctactgctgccccgtctgcctgcagttcttcaccttgacgcttatgaacctctactttgcccaggtggtgttcaaggccaaggtgaagcgtcggccggagatgagccgaggcttgctcgctgtccgaggggcctttgtgggggcctcgctgctctttctgctggtgaacgtgctgtgtgctgtgctctcccatcggcgccgggcacagccctgggccctgctgcttgtccgcgtcctggtgagcgactccctgttcgtcatctgcgcgctgtctcttgctgcctgcctctgcctcgtcgccaggcgggcgccctccactagcatctacctggaggccaaggtagggctgcagcactgatgcccaggtgtcttttgggtctctcggcagcggttctcagggtgtagaggaagctgggagccttctctccctgagggtcctctgttgttacctgtgccagggaccgttgtgggaccagtgtgtgccaggcggccgcgatgggtggcgccatggtcctgctctatgccagccgggcctgctacaacctgacagcactggccttggccccccagagccggctggacaccttcgattacgactggtacaatgtgtctgaccaggtgggcatacgcatgtctgccacctccttagtagccgtggcaccttggccccagctggcctgggccctgtcccactacccctttggcgtgactgcagactggcaccagcccctgccttcccacaggcggacctggtgaatgacctggggaacaaaggctacctggtatttggcctcatcctcttcgtgtgggagctactgcccaccaccctgctggtgggcttcttccgggtgcaccggcccccacaggacctgagcaccagccacatcctcaatgggcaggtctttgcctctcggtcctacttctttgaccgggctgggcactgtgaagatgagggctgctcctgggagcacagccggggtgagagcaccagtatgtcgggcagtctaggctctgggagctggtatggtgccatcgggcgtgagccgggctggtatgggggcagccagacgaagaccactcctctgctcttctcccaggtgccaggaccaggcggccaccaccacagtctctactccaccccacagacgtgatccccctccctcccccacagaatacccaggccccagtccccctcaccctaggcccctgtgccaagtttgtctgccgcttcttgcccaggatcctgggggtcgtggctaccccctcctctggccggctccttgctgctcctgtcatagtgagcttgtgccgtccccctaggatggggggcatggccctggctgccagatgcccacagcaccctggcatgacctgccacctctgcttccacaccggagccagctacctctcctgtgcctgccactcaataaacagtgtctgcgccccacaaaa

SEQ ID NO: 281955 - DNA, 2730 bp, Homo sapiens
gggcccgcgcgggggattcggggctccgcgggttcaggcccgggggcggggcccgggggccatcttggctatgggcggaagttttcttcagagaccgagggacgggaatccgttgccgcccccggccgggcggcacgaccccgatttgggtataggagagacgagcgtgggaactggcggacccccatacaagtaaaggcgggcggcacggggcacggcccacccggggaccccctggatgcggcacggcccccgcaactcggccgcccgcctgccgcctcccgtaaccccgggcgcccgccagcggcgcagctcgcgccaattctcgtacggtttcacgccgggtgcggcgctggactgcggagccagccgggccgctgcgcaatttgcgtagcgaacggcgcccgcgcaggcgcggagggggaggggggcggagcagcgggagccggggagccggagccccgggtccccacgacctgagccggctctcccatcagcggcctgaggacctggcgtccgcctcctccctccccttgaggctggagcgtggacgcggtgggggagggtggggcgggggcagctttcgagaattacgaggacaggaggcagaggccctccccatccgcattattggaggagagagagcctcccccagcttggggagggggagagcggggcattgggcgcccctcgcagcggccgctgccctgacccgacgggtatcagccggctctccccctccacccaggacgacatgaacgaccgaggccagggagtcctctccttgggcctctgcatccccccatccttggctctggggtaggcccagggaggagacacccccaacccctatccggtctgtcctggagaaaagagactgcccttccatgcccctgagtgaggggcctggggcccaggctgcctgtgttccccaagggcaagggtctctctgttgaggaggaggggcctgtcagccacaacttctttcctcctgagcgccccatctccctctctgcaccctgcaattcccacccctccgtatttatttccctggtcccgccgacagtccctccttgtctgtctccgggattcaggcctccctccctgacatggagagtaacctgtctggcctggtgcctgctgccgggctggtgcctgcgctgccacctgctgtgaccctggggctgacagctgcctacaccaccctgtatgccctgctcttcttctccgtctatgcccagctctggctggtgcttctgtatgggcacaagcgtctcagctatcagacggtgttcctggccctctgtctgctctgggccgccttgcgtaccaccctcttctccttctacttccgagatactccccgcgccaaccgcctggggcccttgcccttctggcttctctactgctgccccgtctgcctgcagttcttcaccttgacgcttatgaacctctactttgcccaggtggtgttcaaggccaaggtgaagcgtcggccggagatgagccgaggcttgctcgctgtccgaggggcctttgtgggggcctcgctgctctttctgctggtgaacgtgctgtgtgctgtgctctcccatcggcgccgggcacagccctgggccctgctgcttgtccgcgtcctggtgagcgactccctgttcgtcatctgcgcgctgtctcttgctgcctgcctctgcctcgtcgccaggcgggcgccctccactagcatctacctggaggccaaggtagggctgcagcactgatgcccaggtgtcttttgggtctctcggcagcggttctcagggtgtagaggaagctgggagccttctctccctgagggtcctctgttgttacctgtgccagggaccgttgtgggaccagtgtgtgccaggcggccgcgatgggtggcgccatggtcctgctctatgccagccgggcctgctacaacctgacagcactggccttggccccccagagccggctggacaccttcgattacgactggtacaatgtgtctgaccagggcggacctggtgaatgacctggggaacaaaggctacctggtatttggcctcatcctcttcgtgtgggagctactgcccaccaccctgctggtgggcttcttccgggtgcaccggcccccacaggacctgagcaccagccacatcctcaatgggcaggtctttgcctctcggtcctacttctttgaccgggctgggcactgtgaagatgagggctgctcctgggagcacagccggggtgagagcaccagtatgtcgggcagtctaggctctgggagctggtatggtgccatcgggcgtgagccgggctggtatgggggcagccagacgaagaccactcctctgctcttctcccaggtgccaggaccaggcggccaccaccacagtctctactccaccccacagacgtgatccccctccctcccccacagaatacccaggccccagtccccctcaccctaggcccctgtgccaagtttgtctgccgcttcttgcccaggatcctgggggtcgtggctaccccctcctctggccggctccttgctgctcctgtcatagtgagcttgtgccgtccccctaggatggggggcatggccctggctgccagatgcccacagcaccctggcatgacctgccacctctgcttccacaccggagccagctacctctcctgtgcctgccactcaataaacagtgtctgcgccccacaaaa

SEQ ID NO: 281956 - DNA, 2735 bp, Homo sapiens
gggcccgcgcgggggattcggggctccgcgggttcaggcccgggggcggggcccgggggccatcttggctatgggcggaagttttcttcagagaccgagggacgggaatccgttgccgcccccggccgggcggcacgaccccgatttgggtataggagagacgagcgtgggaactggcggacccccatacaagtaaaggcgggcggcacggggcacggcccacccggggaccccctggatgcggcacggcccccgcaactcggccgcccgcctgccgcctcccgtaaccccgggcgcccgccagcggcgcagctcgcgccaattctcgtacggtttcacgccgggtgcggcgctggactgcggagccagccgggccgctgcgcaatttgcgtagcgaacggcgcccgcgcaggcgcggagggggaggggggcggagcagcgggagccggggagccggagccccgggtccccacgacctgagccggctctcccatcagcggcctgaggacctggcgtccgcctcctccctccccttgaggctggagcgtggacgcggtgggggagggtggggcgggggcagctttcgagaattacgaggacaggaggcagaggccctccccatccgcattattggaggagagagagcctcccccagcttggggagggggagagcggggcattgggcgcccctcgcagcggccgctgccctgacccgacgggtatcagccggctctccccctccacccaggacgacatgaacgaccgaggccagggagtcctctccttgggcctctgcatccccccatccttggctctggggtaggcccagggaggagacacccccaacccctatccggtctgtcctggagaaaagagactgcccttccatgcccctgagtgaggggcctggggcccaggctgcctgtgttccccaagggcaagggtctctctgttgaggaggaggggcctgtcagccacaacttctttcctcctgagcgccccatctccctctctgcaccctgcaattcccacccctccgtatttatttccctggtcccgccgacagtccctccttgtctgtctccgggattcaggcctccctccctgacatggagagtaacctgtctggcctggtgcctgctgccgggctggtgcctgcgctgccacctgctgtgaccctggggctgacagctgcctacaccaccctgtatgccctgctcttcttctccgtctatgcccagctctggctggtgcttctgtatgggcacaagcgtctcagctatcagacggtgttcctggccctctgtctgctctgggccgccttgcgtaccaccctcttctccttctacttccgagatactccccgcgccaaccgcctggggcccttgcccttctggcttctctactgctgccccgtctgcctgcagttcttcaccttgacgcttatgaacctctactttgcccaggtggtgttcaaggccaaggtgaagcgtcggccggagatgagccgaggcttgctcgctgtccgaggggcctttgtgggggcctcgctgctctttctgctggtgaacgtgctgtgtgctgtgctctcccatcggcgccgggcacagccctgggccctgctgcttgtccgcgtcctggtgagcgactccctgttcgtcatctgcgcgctgtctcttgctgcctgcctctgcctcgtcgccaggcgggcgccctccactagcatctacctggaggccaaggtagggctgcagcactgatgcccaggtgtcttttgggtctctcggcagcggttctcagggtgtagaggaagctgggagccttctctccctgagggtcctctgttgttacctgtgccagggaccgttgtgggaccagtgtgtgccaggcggccgcgatgggtggcgccatggtcctgctctatgccagccgggcctgctacaacctgacagcactggccttggccccccagagccggctggacaccttcgattacgactggtacaatgtgtctgaccaggtgggcatacgcatgtctgccacctccttagtagccgtggcaccttggccccagctggcctgggccctgtcccactacccctttggcgtgactgcagactggcaccagcccctgccttcccacaggcggacctggtgaatgacctggggaacaaaggctacctggtatttggcctcatcctcttcgtgtgggagctactgcccaccaccctgctggtgggcttcttccgggtgcaccggcccccacaggacctgtatgtcgggcagtctaggctctgggagctggtatggtgccatcgggcgtgagccgggctggtatgggggcagccagacgaagaccactcctctgctcttctcccaggtgccaggaccaggcggccaccaccacagtctctactccaccccacagacgtgatccccctccctcccccacagaatacccaggccccagtccccctcaccctaggcccctgtgccaagtttgtctgccgcttcttgcccaggatcctgggggtcgtggctaccccctcctctggccggctccttgctgctcctgtcatagtgagcttgtgccgtccccctaggatggggggcatggccctggctgccagatgcccacagcaccctggcatgacctgccacctctgcttccacaccggagccagctacctctcctgtgcctgccactcaataaacagtgtctgcgccccacaaaa

SEQ ID NO: 281957 - DNA, 2016 bp, Homo sapiens
gggcccgcgcgggggattcggggctccgcgggttcaggcccgggggcggggcccgggggccatcttggctatgggcggaagttttcttcagagaccgagggacgggaatccgttgccgcccccggccgggcggcacgaccccgatttgggtataggagagacgagcgtgggaactggcggacccccatacaagtaaaggcgggcggcacggggcacggcccacccggggaccccctggatgcggcacggcccccgcaactcggccgcccgcctgccgcctcccgtaaccccgggcgcccgccagcggcgcagctcgcgccaattctcgtacggtttcacgccgggtgcggcgctggactgcggagccagccgggccgctgcgcaatttgcgtagcgaacggcgcccgcgcaggcgcggagggggaggggggcggagcagcgggagccggggagccggagccccgggtccccacgacctgagccggctctcccatcagcggcctgaggacctggcgtccgcctcctccctccccttgaggctggagcgtggacgcggtgggggagggtggggcgggggcagctttcgagaattacgaggacaggaggcagaggccctccccatccgcattattggaggagagagagcctcccccagcttggggagggggagagcggggcattgggcgcccctcgcagcggccgctgccctgacccgacgggtatcagccggctctccccctccacccaggacgacatgaacgaccgaggccagggagtcctctccttgggcctctgcatccccccatccttggctctggggtaggcccagggaggagacacccccaacccctatccggtctgtcctggagaaaagagactgcccttccatgcccctgagtgaggggcctggggcccaggctgcctgtgttccccaagggcaagggtctctctgttgaggaggaggggcctgtcagccacaacttctttcctcctgagcgccccatctccctctctgcaccctgcaattcccacccctccgtatttatttccctggtcccgccgacagtccctccttgtctgtctccgggattcaggcctccctccctgacatggagagtaacctgtctggcctggtgcctgctgccgggctggtgcctgcgctgccacctgctgtgaccctggggctgacagctgcctacaccaccctgtatgccctgctcttcttctccgtctatgcccagctctggctggtgcttctgtatgggcacaagcgtctcagctatcagacggtgttcctggccctctgtctgctctgggccgccttgcgtaccaccctcttctccttctacttccgagatactccccgcgccaaccgcctggggcccttgcccttctggcttctctactgctgccccgtctgcctgcagttcttcaccttgacgcttatgaacctctactttgcccaggtggtgttcaaggccaaggtgaagcgtcggccggagatgagccgaggcttgctcgctgtccgaggggcctttgtgggggcctcgctgctctttctgctggtgaacgtgctgtgtgctgtgctctcccatcggcgccgggcacagccctgggccctgctgcttgtccgcgtcctggtgagcgactccctgttcgtcatctgcgcgctgtctcttgctgcctgcctctgcctcgtcgccaggcgggcgccctccactagcatctacctggaggccaaggggaccagtgtgtgccaggcggccgcgatgggtggcgccatggtcctgctctatgccagccgggcctgctacaacctgacagcactggccttggccccccagagccggctggacaccttcgattacgactggtacaatgtgtctgaccagcggacctggtgaatgactggggaacaaggctaccaggataggcaaatcctctacggaggagcagtggcaacaccagaatgtgggcacaaccggagaacggcccaagacagaacagaaaaccaag

SEQ ID NO: 281958 - DNA, 2053 bp, Homo sapiens
atccaaggctcctcgtccgcagcctttttcctccctccttcggccccggggctcacatcctcgctgcctcacaccttgggcgtgtgtgggagcaggagagggattctctggggtccccatttggaacctggagacccacttctgccaacaagtccttcagcccctctgggccttagtttccccccagtgaagtggggatagtgacagctcccccgggagccagtgaaaactttgtgaagggagtgattactgcgggcgaaggcgcttggcacagccacaactgaagctcagccgtcggatgtgattattgttgctattgttaccgctccgcctggactgggtgcccggtcggaaagtcccgctccccgctcctcctcccaggcgcggaagcttcgcgccgcccgcctcgggggacacctcccgcgccatctcgggggcactggagataaggaaaggaacctcctccctggctgggatggctgcccgggcgcgggaggagggccggggacccggtgagggaggaccgtagggcccgtgggggcttcacgcctggcaggcggccggccagctctggctggtgcttctgtatgggcacaagcgtctcagctatcagacggtgttcctggccctctgtctgctctgggccgccttgcgtaccaccctcttctccttctacttccgagatactccccgcgccaaccgcctggggcccttgcccttctggcttctctactgctgccccgtctgcctgcagttcttcaccttgacgcttatgaacctctactttgcccaggtggtgttcaaggccaaggtgaagcgtcggccggagatgagccgaggcttgctcgctgtccgaggggcctttgtgggggcctcgctgctctttctgctggtgaacgtgctgtgtgctgtgctctcccatcggcgccgggcacagccctgggccctgctgcttgtccgcgtcctggtgagcgactccctgttcgtcatctgcgcgctgtctcttgctgcctgcctctgcctcgtcgccaggcgggcgccctccactagcatctacctggaggccaaggggaccagtgtgtgccaggcggccgcgatgggtggcgccatggtcctgctctatgccagccgggcctgctacaacctgacagcactggccttggccccccagagccggctggacaccttcgattacgactggtacaatgtgtctgaccaggtgggcatacgcatgtctgccacctccttagtagccgtggcaccttggccccagctggcctgggccctgtcccactacccctttggcgtgactgcagactggcaccagcccctgccttcccacaggcggacctggtgaatgacctggggaacaaaggctacctggtatttggcctcatcctcttcgtgtgggagctactgcccaccaccctgctggtgggcttcttccgggtgcaccggcccccacaggacctgagcaccagccacatcctcaatgggcaggtctttgcctctcggtcctacttctttgaccgggctgggcactgtgaagatgagggctgctcctgggagcacagccggggtgagagcaccagtatgtcgggcagtctaggctctgggagctggtatggtgccatcgggcgtgagccgggctggtatgggggcagccagacgaagaccactcctctgctcttctcccaggtgccaggaccaggcggccaccaccacagtctctactccaccccacagacgtgatccccctccctcccccacagaatacccaggccccagtccccctcaccctaggcccctgtgccaagtttgtctgccgcttcttgcccaggatcctgggggtcgtggctaccccctcctctggccggctccttgctgctcctgtcatagtgagcttgtgccgtccccctaggatggggggcatggccctggctgccagatgcccacagcaccctggcatgacctgccacctctgcttccacaccggagccagctacctctcctgtgcctgccactcaataaacagtgtctgcgccccacaaaa

SEQ ID NO: 281959 - DNA, 2580 bp, Homo sapiens
gggcccgcgcgggggattcggggctccgcgggttcaggcccgggggcggggcccgggggccatcttggctatgggcggaagttttcttcagagaccgagggacgggaatccgttgccgcccccggccgggcggcacgaccccgatttgggtataggagagacgagcgtgggaactggcggacccccatacaagtaaaggcgggcggcacggggcacggcccacccggggaccccctggatgcggcacggcccccgcaactcggccgcccgcctgccgcctcccgtaaccccgggcgcccgccagcggcgcagctcgcgccaattctcgtacggtttcacgccgggtgcggcgctggactgcggagccagccgggccgctgcgcaatttgcgtagcgaacggcgcccgcgcaggcgcggagggggaggggggcggagcagcgggagccggggagccggagccccgggtccccacgacctgagccggctctcccatcagcggcctgaggacctggcgtccgcctcctccctccccttgaggctggagcgtggacgcggtgggggagggtggggcgggggcagctttcgagaattacgaggacaggaggcagaggccctccccatccgcattattggaggagagagagcctcccccagcttggggagggggagagcggggcattgggcgcccctcgcagcggccgctgccctgacccgacgggtatcagccggctctccccctccacccaggacgacatgaacgaccgaggccagggagtcctctccttgggcctctgcatccccccatccttggctctggggtaggcccagggaggagacacccccaacccctatccggtctgtcctggagaaaagagactgcccttccatgcccctgagtgaggggcctggggcccaggctgcctgtgttccccaagggcaagggtctctctgttgaggaggaggggcctgtcagccacaacttctttcctcctgagcgccccatctccctctctgcaccctgcaattcccacccctccgtatttatttccctggtcccgccgacagtccctccttgtctgtctccgggattcaggcctccctccctgacatggagagtaacctgtctggcctggtgcctgctgccgggctggtgcctgcgctgccacctgctgtgaccctggggctgacagctgcctacaccaccctgtatgccctgctcttcttctccgtctatgcccagctctggctggtgcttctgtatgggcacaagcgtctcagctatcagacggtgttcctggccctctgtctgctctgggccgccttgcgtaccaccctcttctccttctacttccgagatactccccgcgccaaccgcctggggcccttgcccttctggcttctctactgctgccccgtctgcctgcagttcttcaccttgacgcttatgaacctctactttgcccaggtggtgttcaaggccaaggtgaagcgtcggccggagatgagccgaggcttcggttctcagggtgtagaggaagctgggagccttctctccctgagggtcctctgttgttacctgtgccagggaccgttgtgggaccagtgtgtgccaggcggccgcgatgggtggcgccatggtcctgctctatgccagccgggcctgctacaacctgacagcactggccttggccccccagagccggctggacaccttcgattacgactggtacaatgtgtctgaccaggtgggcatacgcatgtctgccacctccttagtagccgtggcaccttggccccagctggcctgggccctgtcccactacccctttggcgtgactgcagactggcaccagcccctgccttcccacaggcggacctggtgaatgacctggggaacaaaggctacctggtatttggcctcatcctcttcgtgtgggagctactgcccaccaccctgctggtgggcttcttccgggtgcaccggcccccacaggacctgagcaccagccacatcctcaatgggcaggtctttgcctctcggtcctacttctttgaccgggctgggcactgtgaagatgagggctgctcctgggagcacagccggggtgagagcaccagtatgtcgggcagtctaggctctgggagctggtatggtgccatcgggcgtgagccgggctggtatgggggcagccagacgaagaccactcctctgctcttctcccaggtgccaggaccaggcggccaccaccacagtctctactccaccccacagacgtgatccccctccctcccccacagaatacccaggccccagtccccctcaccctaggcccctgtgccaagtttgtctgccgcttcttgcccaggatcctgggggtcgtggctaccccctcctctggccggctccttgctgctcctgtcatagtgagcttgtgccgtccccctaggatggggggcatggccctggctgccagatgcccacagcaccctggcatgacctgccacctctgcttccacaccggagccagctacctctcctgtgcctgccactcaataaacagtgtctgcgccccacaaaa

SEQ ID NO: 281960 - DNA, 2226 bp, Homo sapiens
gggcccgcgcgggggattcggggctccgcgggttcaggcccgggggcggggcccgggggccatcttggctatgggcggaagttttcttcagagaccgagggacgggaatccgttgccgcccccggccgggcggcacgaccccgatttgggtataggagagacgagcgtgggaactggcggacccccatacaagtaaaggcgggcggcacggggcacggcccacccggggaccccctggatgcggcacggcccccgcaactcggccgcccgcctgccgcctcccgtaaccccgggcgcccgccagcggcgcagctcgcgccaattctcgtacggtttcacgccgggtgcggcgctggactgcggagccagccgggccgctgcgcaatttgcgtagcgaacggcgcccgcgcaggcgcggagggggaggggggcggagcagcgggagccggggagccggagccccgggtccccacgacctgagccggctctcccatcagcggcctgaggacctggcgtccgcctcctccctccccttgaggctggagcgtggacgcggtgggggagggtggggcgggggcagctttcgagaattacgaggacaggaggcagaggccctccccatccgcattattggaggagagagagcctcccccagcttggggagggggagagcggggcattgggcgcccctcgcagcggccgctgccctgacccgacgggtatcagccggctctccccctccacccaggacgacatgaacgaccgaggccagggagtcctctccttgggcctctgcatccccccatccttggctctggggtaggcccagggaggagacacccccaacccctatccggtctgtcctggagaaaagagactgcccttccatgcccctgagtgaggggcctggggcccaggctgcctgtgttccccaagggcaagggtctctctgttgaggaggaggggcctgtcagccacaacttctttcctcctgagcgccccatctccctctctgcaccctgcaattcccacccctccgtatttatttccctggtcccgccgacagtccctccttgtctgtctccgggattcaggcctccctccctgacatggagagtaacctgtctggcctggtgcctgctgccgggctggtgcctgcgctgccacctgctgtgaccctggggctgacagctgcctacaccaccctgtatgccctgctcttcttctccgtctatgcccagctctggctggtgcttctgtatgggcacaagcgtctcagctatcagacggtgttcctggccctctgtctgctctgggccgccttgcgtaccaccctcttctccttctacttccgagatactccccgcgccaaccgcctggggcccttgcccttctggcttctctactgctgccccgtctgcctgcagttcttcaccttgacgcttatgaacctctactttgcccaggtggtgttcaaggccaaggtgaagcgtcggccggagatgagccgaggcttggcggacctggtgaatgacctggggaacaaaggctacctggtatttggcctcatcctcttcgtgtgggagctactgcccaccaccctgctggtgggcttcttccgggtgcaccggcccccacaggacctgagcaccagccacatcctcaatgggcaggtctttgcctctcggtcctacttctttgaccgggctgggcactgtgaagatgagggctgctcctgggagcacagccggggtgagagcaccagtatgtcgggcagtctaggctctgggagctggtatggtgccatcgggcgtgagccgggctggtatgggggcagccagacgaagaccactcctctgctcttctcccaggtgccaggaccaggcggccaccaccacagtctctactccaccccacagacgtgatccccctccctcccccacagaatacccaggccccagtccccctcaccctaggcccctgtgccaagtttgtctgccgcttcttgcccaggatcctgggggtcgtggctaccccctcctctggccggctccttgctgctcctgtcatagtgagcttgtgccgtccccctaggatggggggcatggccctggctgccagatgcccacagcaccctggcatgacctgccacctctgcttccacaccggagccagctacctctcctgtgcctgccactcaataaacagtgtctgcgccccacaaaa

SEQ ID NO: 281961 - DNA, 748 bp, Homo sapiens
ataagtcggtacctcgctattcatctggcacctgtaccggcggacctggtgaatgacctggggaacaaaggctacctggtatttggcctcatcctcttcgtgtgggagctactgcccaccaccctgctggtgggcttcttccgggtgcaccggcccccacaggacctgagcaccagccacatcctcaatgggcaggtctttgcctctcggtcctacttctttgaccgggctgggcactgtgaagatgagggctgctcctgggagcacagccggggtgagagcaccagtatgtcgggcagtctaggctctgggagctggtatggtgccatcgggcgtgagccgggctggtatgggggcagccagacgaagaccactcctctgctcttctcccaggtgccaggaccaggcggccaccaccacagtctctactccaccccacagacgtgatccccctccctcccccacagaatacccaggccccagtccccctcaccctaggcccctgtgccaagtttgtctgccgcttcttgcccaggatcctgggggtcgtggctaccccctcctctggccggctccttgctgctcctgtcatagtgagcttgtgccgtccccctaggatggggggcatggccctggctgccagatgcccacagcaccctggcatgacctgccacctctgcttccacaccggagccagctacctctcctgtgcctgccactcaataaacagtgtctgcgccccacaaaa

SEQ ID NO: 281962 - DNA, 1532 bp, Homo sapiens
  misc_feature (1)..(1): n is a, c, g, or t
  misc_feature (1124)..(1124): n is a, c, g, or t
  misc_feature (1277)..(1277): n is a, c, g, or t
  misc_feature (1289)..(1290): n is a, c, g, or t
  misc_feature (1337)..(1337): n is a, c, g, or t
  misc_feature (1342)..(1342): n is a, c, g, or t
  misc_feature (1368)..(1368): n is a, c, g, or t
  misc_feature (1371)..(1371): n is a, c, g, or t
  misc_feature (1377)..(1377): n is a, c, g, or t
  misc_feature (1432)..(1432): n is a, c, g, or t
  misc_feature (1445)..(1445): n is a, c, g, or t
  misc_feature (1519)..(1519): n is a, c, g, or t
ngaccaatgaaagcgcagatttattgaggggaaagtacactccacagaagtggaatgtaggtgtgggagcaggcgaccaagcggctcaagaaccccgattacaatgttttttagggttttattaggttggtgcaaaagtaattgcggtttttgccatgaataagctagaattttataataccccaagagttctttaaaggcctccaatcctatgaaggactggtgcacaaccaatcagaggctgaagtggagacttctgtcttgttaccacaggagtgaggacgtggcctgtgtgctgcctcatcttgcctagaactagctgcacctgctgttcttttgcttatgccttcattcttggttaccctaattccctattctcctgcctcactctgaggcattagagttggtttttcagtctgccagggacaaaagagaactaatccagataggaccatgccaaggaagatagaggagaggctaaagaaagagtacaaaggtcaatcagtcgttcccatggaaaaacaactctcctgcttatatagtcaattattgtgtccaattcattcagcaaaacatttattcatgtaatatcccttacttggtattctaacttatattttcaactcattttaggaacttgaagtcagtctcaggtaaagaacaatgaaagagaaatctcagcttggtattggtaatggtggtgataatctccacctggagacactaggcgtatgttaaattatcgagcttgttatctttcctgggaagtgattatcatttgtttctcttgtgacagcggggagtgttctgcatgaggaactaatatgataccagaaaaacaggtgaaatgccagttacagaaacttattaccaacgactatctaataactgcgatgacagaaataggtcaattgaaacatgagtggatggtgaaaaaaatttacacttcacagaagtttttctttctttttttttttttttttttttgagacaaagtctcgttctgtcccagactggacactattcacaatagccaaaatatggaatcaacctagatgtccaacaacagataaatggataaagaaaatgtggtttatacacacaaaggaatactattcaaagancagaatgaaatcctatcacctgaggcaacatggatggaaatggaggacattatttaagtgaaataagccaggaacataaacatgcacattcccactcatatgtggaagctttaaaaaaaaaaaaaaaagctgggtgcggtggctcacgcctgnaatcccagcacnntgggaggctgaggcgggtggatcacctgaggtcgggagttcaagacnagccngaccaacatggagaaaccctgtctcnacnaaaaanacaaaattagccggggtggtggtgcatgcctgtaatcccagctactcaggaggcngaggcaggagaancgcttgaacccaggaggcagaggctgcggtgagccaagatcatgccactgcactccagcctgggcaaaaagagngaaactccatctc

SEQ ID NO: 281963 - DNA, 331 bp, Homo sapiens
tgacagcggggagtgttctgcatgaggaactaatatgataccagaaaaacaggtgaaatgccagttacagaaacttattaccaacgactatctaataactgcgatgacagaaataggtcaattgaaacatgagtggatggtgaaaaaaatttacacttcacagaagtttttctttctttttttttttttttttttttgagacaaagtctcgttctgtcccagactggagtgcagtggcgccatcttggctcactgcaacctccacctcccgggttcaagcgattctcctgcctcagtctcccaagtagctgggataacagatgcctgccac

SEQ ID NO: 281964 - DNA, 464 bp, Homo sapiens
agacagggtctcactgcatcacccaggctggagtgcaatggtgcaatgacagatcactgcagccccaacctgttgggctcaagtgatcctcccacttcagcctctcgagtagatgggactacgggcagccaccaccattcccacctaatatttctattttatttttgtagagatggggtctatgttgctgaggctggtcttgaacttctggactcaagagatcctcctgcctctatctcccgaagtgttggtattacaggtgtgagccaccacgccatttttcttttttttgagacagggtctggctctgtcaccaaggctggatgatttagcctagataatagtcaagtactgatgcattcattacaaaaagacacaagtatctgacagaatacccaagcttggagtagtattatgtatgaatacttaatacttaaggatatggttccacactctaccaagag

SEQ ID NO: 281965 - DNA, 436 bp, Homo sapiens
ttgtagagacagggtcttgttatgttgcccaggctagtctcaaacacctggcctcaactgatcctcccacctcagcttctgaaggtgctgggattacaggcatgagccaccacaagaacaacacatttctataaggttatggggttttacttttttccagtgttaattagtttcacatatctagaatttgtaatttcttattggatactagaattactgtatttatttacctgaacaaattaatgtttccctctacaaactactttagaaagattttcaataaaggtaaatgggatgtaataatctattaagaaaaaatgactcagagtggaacctgtagccaaaatataaatttgctgtatttaagagtaattgaaagcaaaagattcccaaaagcttgaaaaaaatggagatgccctaaataaacttaccattg

SEQ ID NO: 281966 - DNA, 359 bp, Homo sapiens
ggctcgtcccttcccccacccccagccgccgccgccgcccgcgcttcgcaacaaagccggctgcggagccatggtccacgccgcccgcccgcgaccccgccgccccgcatggtagccggaacgtctctcccttaccagccttcgcttcctggtgcccagctcttaggaccgtgtgtgactctggccttctaccgagacaacagagaaacgcacagcaactcgcatggaggaatcggcgaaatggctccgaccgcggcgctagggggcggggccagcgagcgtacgcatgcgcagagcgcgtgccagggcgggggatggcgagggcgcgccaatggagggggcggggctcagcaacctcg

SEQ ID NO: 281967 - DNA, 1542 bp, Homo sapiens
ggctcgtcccttcccccacccccagccgccgccgccgcccgcgcttcgcaacaaagccggctgcggagccatggtccacgccgcccgcccgcgaccccgccgccccgcatggtagccggaacgtctctcccttaccagccttcgcttcctggtgcccagctcttaggaccgtgtgtgactctggccttctaccgagacaacagagaaacgcacagcaactcgcatggaggaatcggcgaaatggctccgaccgcggcgctagggggcggggccagcgagcggtgttgaaagcagcaggggcctagaagacattaaaccgataccacagaaatacaaaggatcattagagactattatgaacaactatatgccaacaaattggaaaccaaatggaaatggataaattcctgaacagatacaacttaccaaaattggaccaagaagaaatagaaaacctgaaaagaccaactatgagtaatgagattaaatcagtaatatagagtctcccatcaaagaaaagtccaggccctgatggcttcactgctgaattctactgaacagttaaagaagaactcataccagttctcaaactcatcctgtgagggcagcattaccctgataccaaaactagatatggacacaagaaaaaaaatctataggccagtatccctgatgaacatagatgcaagaatcctcaacaagaccaggtgtggtggttcatgcctgtaatcccagcactttgggaggccaaggcaggtggatcacctgaggtcaggaatttgagaccagcctggccaacatggcaaaaccctgtctgtactaaaaatacaaaaattagccgggcaaggtggcgtgtgcctgtaatcctagctacttgggaggctgaggcaggagaattgcttgaacctggagggaggaggggcagaagttgcagcgagctcagatcgtcccactgcactccagcctgggtgacagagtgagactccatctcaaaataagtaaataaataaagagactcaactagcataaatgaattgcaagtgttttatagtatataatgagcacaacaaaagtatcaatatattacatggaaatacatttttcaaagctggatctttagcttccaaggattaaggagaattttgttactgagttggttcttaatttaggctctgcacctgagacctagagtcccctgggatttgggtccgaggactggcattacctttgtaggtggctcttggcaactagcactgtctaagatcttaacatttgcaaatgaagccttaaaacatgtcccaaaagtatggaaagtgggccgatttcaacacaaccattacctgttcctggtagctgaccaactaggagatttcagaggtcaagtgggacagagcagggtagggaatttttttttaagctttattataaaacaggtaactttgtccctatcttaagaatttggaactgaggctataggtcactcaatgatcaaataatgaaaggtctgcttcaactggactacttaatatttcacatttacct

SEQ ID NO: 281968 - DNA, 1452 bp, Homo sapiens
agacagggtctcactgcatcacccaggctggagtgcaatggtgcaatgacagatcactgcagccccaacctgttgggctcaagtgatcctcccacttcagcctctcgagtagatgggactacgggcagccaccaccattcccacctaatatttctattttatttttgtagagatggggtctatgttgctgaggctggtcttgaacttctggactcaagagatcctcctgcctctatctcccgaagtgttggtattacagggtgttgaaagcagcaggggcctagaagacattaaaccgataccacagaaatacaaaggatcattagagactattatgaacaactatatgccaacaaattggaaaccaaatggaaatggataaattcctgaacagatacaacttaccaaaattggaccaagaagaaatagaaaacctgaaaagaccaactatgagtaatgagattaaatcagtaatatagagtctcccatcaaagaaaagtccaggccctgatggcttcactgctgaattctactgaacagttaaagaagaactcataccagttctcaaactcatcctgtgagggcagcattaccctgataccaaaactagatatggacacaagaaaaaaaatctataggccagtatccctgatgaacatagatgcaagaatcctcaacaagaccaggtgtggtggttcatgcctgtaatcccagcactttgggaggccaaggcaggtggatcacctgaggtcaggaatttgagaccagcctggccaacatggcaaaaccctgtctgtactaaaaatacaaaaattagccgggcaaggtggcgtgtgcctgtaatcctagctacttgggaggctgaggcaggagaattgcttgaacctggagggaggaggggcagaagttgcagcgagctcagatcgtcccactgcactccagcctgggtgacagagtgagactccatctcaaaataagtaaataaataaagagactcaactagcataaatgaattgcaagtgttttatagtatataatgagcacaacaaaagtatcaatatattacatggaaatacatttttcaaagctggatctttagcttccaaggattaaaggcatgagccaccacaagaacaacacatttctataaggttatggggttttacttttttccagtgttaattagtttcacatatctagaatttgtaatttcttattggatactagaattactgtatttatttacctgaacaaattaatgtttccctctacaaactactttagaaagattttcaataaaggtaaatgggatgtaataatctattaagaaaaaatgactcagagtggaacctgtagccaaaatataaatttgctgtatttaagagtaattgaaagcaaaagattcccaaaagcttgaaaaaaatggagatgccctaaataaacttaccattg

SEQ ID NO: 281969 - DNA, 1215 bp, Homo sapiens
tttttttttttgtacccttcagggtgttgaaagcagcaggggcctagaagacattaaaccgataccacagaaatacaaaggatcattagagactattatgaacaactatatgccaacaaattggaaaccaaatggaaatggataaattcctgaacagatacaacttaccaaaattggaccaagaagaaatagaaaacctgaaaagaccaactatgagtaatgagattaaatcagtaatatagagtctcccatcaaagaaaagtccaggccctgatggcttcactgctgaattctactgaacagttaaagaagaactcataccagttctcaaactcatcctgtgagggcagcattaccctgataccaaaactagatatggacacaagaaaaaaaatctataggccagtatccctgatgaacatagatgcaagaatcctcaacaagaccaggtgtggtggttcatgcctgtaatcccagcactttgggaggccaaggcaggtggatcacctgaggtcaggaatttgagaccagcctggccaacatggcaaaaccctgtctgtactaaaaatacaaaaattagccgggcaaggtggcgtgtgcctgtaatcctagctacttgggaggctgaggcaggagaattgcttgaacctggagggaggaggggcagaagttgcagcgagctcagatcgtcccactgcactccagcctgggtgacagagtgagactccatctcaaaataagtaaataaataaagagactcaactagcataaatgaattgcaagtgttttatagtatataatgagcacaacaaaagtatcaatatattacatggaaatacatttttcaaagctggatctttagcttccaaggattaaaggcatgagccaccacaagaacaacacatttctataaggttatggggttttacttttttccagtgttaattagtttcacatatctagaatttgtaatttcttattggatactagaattactgtatttatttacctgaacaaattaatgtttccctctacaaactactttagaaagattttcaataaaggtaaatgggatgtaataatctattaagaaaaaatgactcagagtggaacctgtagccaaaatataaatttgctgtatttaagagtaattgaaagcaaaagattcccaaaagcttgaaaaaaatggagatgccctaaataaacttaccattg

SEQ ID NO: 281970 - DNA, 1473 bp, Homo sapiens
ggctcgtcccttcccccacccccagccgccgccgccgcccgcgcttcgcaacaaagccggctgcggagccatggtccacgccgcccgcccgcgaccccgccgccccgcatggtagccggaacgtctctcccttaccagccttcgcttcctggtgcccagctcttaggaccgtgtgtgactctggccttctaccgagacaacagagaaacgcacagcaactcgcatggaggaatcggcgaaatggctccgaccgcggcgctagggggcggggccagcgagcggtgttgaaagcagcaggggcctagaagacattaaaccgataccacagaaatacaaaggatcattagagactattatgaacaactatatgccaacaaattggaaaccaaatggaaatggataaattcctgaacagatacaacttaccaaaattggaccaagaagaaatagaaaacctgaaaagaccaactatgagtaatgagattaaatcagtaatatagagtctcccatcaaagaaaagtccaggccctgatggcttcactgctgaattctactgaacagttaaagaagaactcataccagttctcaaactcatcctgtgagggcagcattaccctgataccaaaactagatatggacacaagaaaaaaaatctataggccagtatccctgatgaacatagatgcaagaatcctcaacaagaccaggtgtggtggttcatgcctgtaatcccagcactttgggaggccaaggcaggtggatcacctgaggtcaggaatttgagaccagcctggccaacatggcaaaaccctgtctgtactaaaaatacaaaaattagccgggcaaggtggcgtgtgcctgtaatcctagctacttgggaggctgaggcaggagaattgcttgaacctggagggaggaggggcagaagttgcagcgagctcagatcgtcccactgcactccagcctgggtgacagagtgagactccatctcaaaataagtaaataaataaagagactcaactagcataaatgaattgcaagtgttttatagtatataatgagcacaacaaaagtatcaatatattacatggaaatacatttttcaaagctggatctttagcttccaaggattaaaggcatgagccaccacaagaacaacacatttctataaggttatggggttttacttttttccagtgttaattagtttcacatatctagaatttgtaatttcttattggatactagaattactgtatttatttacctgaacaaattaatgtttccctctacaaactactttagaaagattttcaataaaggtaaatgggatgtaataatctattaagaaaaaatgactcagagtggaacctgtagccaaaatataaatttgctgtatttaagagtaattgaaagcaaaagattcccaaaagcttgaaaaaaatggagatgccctaaataaacttaccattg

SEQ ID NO: 281971 - DNA, 344 bp, Homo sapiens
tgccgcctccaccacccaggcgagtaggcagtgggctccgagggcttggggctgcagcatcctggacagactcaccgaaaacactctctcttcactgtctcactataaataccctaggttatgagactggggaaggttcagttagccacattttctttactgagaaactatggccatttacctaaggtgccgcagttgggccagggggaaaaacaaggattaaactctgtgttccttccaccagacctcactaaaaaaggaaaaggaaaacagaggctttctcattgtctcgaaagtgtagccctccccagtctataaagttacatgttccgagtactaaaaag

SEQ ID NO: 281972 - DNA, 587 bp, Homo sapiens
cctgcaatgtgcactggatctggggggcgacagaaagtgacagtcaagatctatgtgagatgggctggacagagacaatgtgcagaggcgccacctaatacgccggcaaagcctgtgccagctagctcatgaagggctgtgatatggtttggcaatgtgtccccatccaaatctcatgttaaattgtgatccccagagttggaggtggggcctggtgggaggtgattggatcattggggtagttttgaatggtttagccccagccccctagtgctgtcttgtgatagagttctcatgagatgtggttgtttgaaagtgtgtagcacctccctcttcacactctctctctcctatcagccatgtgaagatgtacctgcttcccctttgccttccgccatgactgtaggtttcctgaggcctccccagaagcagaagcctgtacagcccacaaaaccatgtgcagattaaacttcttttctttataaattatccggtctcaggtagttctttatagcagtgcgagaacagactaatacaggctatcagaccttgaactggctgacatttgaaagcaaactctgaacttt

SEQ ID NO: 281973 - DNA, 420 bp, Homo sapiens
gggggggggagaaaaagaaagaaaaaaaataggttataatgtcctgtgtttccttttttaatgaatggggagaaggtaaggaacaaaactatcaacttaagtttacaggtaagtatcaaaaattaatcctcatgctaaatgctcacatttatgtcttctgccaggaacagcacattggtaatattctgtactggcctgaggtgactagagtaaaaccgtagtgtgctgccctgctctacaattgcctaagcccacagatgtaactcatcccaactaaacacagagagaccagggagtttgccgattcctcagacacagatcgctgaagagttggaattagctgtttgctgttatccacttctgcttcagcatcctcttctgcagattgttctttgatttctgcttaacagtaaacaagag

SEQ ID NO: 281974 - DNA, 748 bp, Homo sapiens
gagtttgatttctgttattttataatatatcagaaatagtcacattggaggaaatcagaactgtttgggacttcttttaattctttcatgggttgacattgttattttgatttctatgtagacaaaccaagcttaaggcctattaacaatactaagaaggccttgatattagatagagaagaaaagtatatttatgcaaataccagccttggttttggtactaaactgggtaacatgtgggtgtctgttttcccatgagttaggtttgcctagggcttccttccagtttaatgtttcatgattccaatcatttcttccctgtcttcatgcatggttctccaatggtaccttccttccctggaggaatctttgccaagaagacttctgctatagctaccaacatagctgtgccacctgattccatggattggcatctccatcacctaatgaagcagagataacacggaggacctcagtcaatactatctacaaacctcagttgatatcatttgcaaacctccctgattcagtattaacattcacaatatttaattaggcaccattgaatttcatttaccaaatgtcaagcagatgacaaaattctcccaatttgataaaatttgataaattttaatgttgacattaagtcacttttattttagaaaacagcaagacatcttagattttgaaaacggaaaagtcaatatcaccaaagtctgtttgttggtataagataaaaaattgagtt

SEQ ID NO: 281975 - DNA, 727 bp, Homo sapiens
aagcagacctcaggcggtaatgctgactggcccgaagctcacctcctgctgtgttgcccggttcctaacaggccatggacctgcaccagtctgtggcccgaaggctggggacccctgattcctacacgaagaaacctcaaacccaggattcaagccaaaaacaatgattctcaagttcctatgaaatcctggatggatgttgaactgggcaacgtactagctgactcccgtggcagatgcgagcctcaacaaagctccagggctggcacttcaagggagcggaggtgtgtgtttgagtctgagtcacatgcagtaggccatctgctcttatcaacaggatgagaatctttgccaagaagacttctgctatagctaccaacatagctgtgccacctgattccatggattggcatctccatcacctaatgaagcagagataacacggaggacctcagtcaatactatctacaaacctcagttgatatcatttgcaaacctccctgattcagtattaacattcacaatatttaattaggcaccattgaatttcatttaccaaatgtcaagcagatgacaaaattctcccaatttgataaaatttgataaattttaatgttgacattaagtcacttttattttagaaaacagcaagacatcttagattttgaaaacggaaaagtcaatatcaccaaagtctgtttgttggtataagataaaaaattgagtt

SEQ ID NO: 281976 - DNA, 390 bp, Homo sapiens
taccttgggagcctcaatggcagtatatgtggctcctggaggaacttggtagccctcagtatacaacttaaagtgatgaatcagtgactccatggaagtctgaagagaggaaacagggagcatcaataaaccatatccaaactctgtctcctaggcctcccccagcacagaaaataatctctaccctcagggagactaaagccacatgtcagtcagtaagcagagaggatacagaataaaacaggagagctatgggagattaagaatctcttatatggccgggtgcggtgactcacgcttgtaattccagcactttgggaggctgaggaacgagactcgcttgaacctgggaggtggagtttgcagtgagccaagatcacactattgcac

SEQ ID NO: 281977 - DNA, 1384 bp, Homo sapiens
  misc_feature (1147)..(1147): n is a, c, g, or t
cctttgcttttagccctcaccgggggcaggagggaccaaggctgggcccagaacacatagtcctagggtaacagtgaaggggtcgtgaggggacagtgactcccttccaaccccttcttcatagggactgttggcaaacaaagaaaatcaactgggaaaatgaagacctgctggaaaattccagttttcttctttgtgtgcagtttcctggaaccctgggcatctgcagctgtcaagcgtcgccccagattccctgtcaattccaattctaatggtggaaatgaactctgtccaaagatcaggattggccaagatgacttaccagggtttgatctgatctctcagttccaggtagataaagcagcatctagaagagctatccagagagtagtgggatcagctacattgcaggtggcttacaagttgggaaataatgtagacttcaggattccaactaggaatttatatcccagtggactgcctgaagaatactccttcttgacgacgtttcgaatgactggaagcactctcaaaaagaactggaacatttggcagattcaggattcctctgggaaggagcaagttggcataaagattaatggccaaacacaatctgttgtattttcatacaagggactggatggaagtctccaaacagcagccttttcgaatttgtcctccttgtttgattcccagtggcataagatcatgattggcgtggagaggagtagtgctactctttttgttgactgcaacaggattgaatctttacctataaagccaagaggcccaattgacattgatggctttgctgtgctgggaaaacttgcagataatcctcaagtttctgttccatttgaacttcaatggatgctgatccattgtgaccccctgcggcccaggagagaaacttgccatgagctgccagccagaataacgcccagccagaccaccgacgagagaggtcccccgggtgagcagggtcctcccgggcctccgggcccccctggagttccaggcatcgatggcatcgacggtgaccgaggtcctaagggccccccgggccccccgggtcctgcaggtgaaccgggaaagccaggagctccaggcaagcctggcacacctggcgctgataccagtccttgantttgtccctggaatatgaagtgaagtaagaaatggcgtctgttcttagcataccatggtgcatcactcaagttactcttcaagttaccactttatgtgttttccaaaaactaaagacttttctaaatgaaagaaagcactcgaaaacctataattatgatttccaagaatttttgactacagtttaagacatatccttcattttgaaagaaaaataaataactggatttttactgtt

SEQ ID NO: 281978 - DNA, 531 bp, Homo sapiens
gtatttttgtttcataaatgaagtaaaggaggtaaataaacctgagtaaatggcagaaccaagacccaccagtcttagctattacaacattgtaattgctatgttgcatttttttccaaagcagagacaaaaaacactgaattattgaaccctgtgataaacaatgcagttagcaggaagttaggagtatgatacaacttatcaagaagaaataatcacaacaggcagatcttctgttaatctttacttttgagtaagactatagtaaggtatttctttataaatatttgcatcatacttatgtaaccatcctgtagacaattaataaataaaatgaaagttttctacttagtggtttgcctaaggatgttatgatagttctaacatcattgtcttgctctattagggattaacaggacctgatggatcccctggctccattgggtcaaagggacaaaaaggagaacctggtgtgcctggatcgcgtggatttccagtaagtaaatgtaaagctacagaattgaaaatttc

SEQ ID NO: 281979 - DNA, 4761 bp, Homo sapiens
cctttgcttttagccctcaccgggggcaggagggaccaaggctgggcccagaacacatagtcctagggtaacagtgaaggggtcgtgaggggacagtgactcccttccaaccccttcttcatagggactgttggcaaacaaagaaaatcaactgggaaaatgaagacctgctggaaaattccagttttcttctttgtgtgcagtttcctggaaccctgggcatctgcagctgtcaagcgtcgccccagattccctgtcaattccaattctaatggtggaaatgaactctgtccaaagatcaggattggccaagatgacttaccagggtttgatctgatctctcagttccaggtagataaagcagcatctagaagagctatccagagagtagtgggatcagctacattgcaggtggcttacaagttgggaaataatgtagacttcaggattccaactaggaatttatatcccagtggactgcctgaagaatactccttcttgacgacgtttcgaatgactggaagcactctcaaaaagaactggaacatttggcagattcaggattcctctgggaaggagcaagttggcataaagattaatggccaaacacaatctgttgtattttcatacaagggactggatggaagtctccaaacagcagccttttcgaatttgtcctccttgtttgattcccagtggcataagatcatgattggcgtggagaggagtagtgctactctttttgttgactgcaacaggattgaatctttacctataaagccaagaggcccaattgacattgatggctttgctgtgctgggaaaacttgcagataatcctcaagtttctgttccatttgaacttcaatggatgctgatccattgtgaccccctgcggcccaggagagaaacttgccatgagctgccagccagaataacgcccagccagaccaccgacgagagaggtcccccgggtgagcagggtcctcccgggcctccgggcccccctggagttccaggcatcgatggcatcgacggtgaccgaggtcctaagggccccccgggccccccgggtcctgcaggtgaaccgggaaagccaggagctccaggcaagcctggcacacctggcgctgatggattaacaggacctgatggatcccctggctccattgggtcaaagggacaaaaaggagaacctggtgtgcctggatcgcgtggatttccaggccgtggtattcctggaccccctggtcctcctgggacagcaggactccctggagagcttggccgtgtaggacctgttggtgaccctgggagaagaggaccacctggcccccctggccccccaggacccagaggaacaattggctttcatgatggagatccattgtgtcccaatgcctgtccaccaggtcgctcaggatatccaggcctaccaggcatgaggggtcataaaggggctaaaggagaaattggtgaaccaggaagacaaggacacaagggtgaagaaggtgaccagggagaactcggagaagttggagctcaaggacctccaggagcccagggtttgcgaggcatcaccggcatagttggggacaaaggggaaaaaggtgctcggggcttagatggtgaacctgggcctcagggtcttcctggtgcacctggtgatcaaggacagcgaggacctccaggagaagcaggtcccaaaggagatagaggggctgaaggtgctagaggaattcctggtctccctgggcccaaaggagacacgggtttgccaggtgtggatggccgtgatgggatccctggaatgcctggaacaaagggtgaaccaggaaaacctgggcctcctggtgatgcaggattgcaggggttaccaggtgtacctggaattcctggtgcaaagggtgttgctggtgaaaagggtagcacaggtgctccagggaagcctggtcagatgggaaattcaggcaaaccgggccaacaggggcctccaggagaggtgggaccccgaggaccccaggggcttcctggcagtagaggagaattaggaccagtgggatccccaggcctaccaggtaaactgggttctctgggtagccctggcctccctggcttgcctgggccccctggacttcctggaatgaaaggtgacaggggtgtagtcggtgaaccgggtccaaagggtgaacagggtgcctctggtgaagaaggtgaagcaggagaaaggggggaacttggagatataggattacctggcccaaagggatctgcaggtaatcctggggaacctggcttgagagggcctgagggaagtcgggggcttcctggagtggaaggaccaagaggaccacctggaccccggggtgtgcagggagaacagggtgccaccggcctgcctggtgtccagggccctccgggtagagcaccgacagatcagcacattaagcaggtttgcatgagagtcatacaagaacattttgctgagatggctgccagtcttaagcgtccagactcaggtgccactgggcttcctggaaggcctggccctcctggtccccccggccctcctggagagaatggtttcccaggccagatgggaattcgtggccttccgggcattaaggggccccctggtgctcttggtttgaggggacctaaaggtgacttgggagaaaagggggagcgtggccctccaggaagaggtcccaacggtttgcctggagctataggtctcccaggtgacccaggccctgccagctatggcagaaatggccgagacggtgagcgaggccccccaggggtggcaggaattcctggagtgcctggacccccgggacctcctgggcttcccggtttctgtgagccagcctcctgcaccatgcaggctggtcagcgagcatttaacaaagggcctgacccttgaaaggcttactgctgcatggctgtctgcatgaaccacgcctggtgaaggagcctgggtgagaaacaccatccaaagctggggcaaagatgattaccttcagcatgattacaatgtattaccttcagtatgattacagaagtcctacttgacaatcacatatagaagaacggtgctattcagtaagttctctttcctttcccttggagggaagacagcagagtcatcagttaaaaaaaaaaaaagaaaaccaaacacctcccttgaataaatttatactcctgttcccaggatcttgagctttagtgtgctatacctatgtgtcttatcgtgggccactgtgccaataaacaaaaacaactgtttggtttacctcagttgcagtagttattttcatttagaagttgttctcagattattgtttcagttatatagaggattactagactagttatgaagaaaccccactacattcaatggaattggtgcttaaaatctcatcgatgtgctgtctctggagtgataagaaagggctacatctcccgaaatgatttctttacgtcatgtattggtttccttcttcaccttgaacttttgttgaactgtatgtactttaccccaaacctgttaatattttgagcgcttctatgtgaaagcaaagaaataattttaatactctggcattcataaattttattgatgagattatttattttaaaggtttgaggtaacatctctggttgtaccaaagaagaaataaatatggtttcttaatctcttgcatgttttcttataaataatcatgttcaatgaaaagaagttactgagcttatttagatacattaaacattacttaactactggttctataggtgtatgtttataatattagtgttttttctacataaagtaatttaaaaagctgttccacagagggtgttaccctgtgacagatgcgtatgtgtgtgtgtgtgtgtgtgtgtgtgttttagtgtgtatggagagagcttcatggaccttttcgaaatgttaattccctagaaagatgtgcagctgcatgcgcatctatatttttgtatagtatttcagagatttcgtggacttttttaagtctagccttgctttatttctaggttaagaaccactgccttcattccaatggcttgttagctccctcctactcagaactttattgtaaacatgatttatgtttcaccatttcttgtaaattttataaatgcagctcagctaaagcactgtattcttaacaagtatttcctgaccacttaagcactttattattatctgtgtaatcatattggcttgctgtttcattaacatctacttaactatccaacagacttaatatattcattttatatcacagagcctgtgagtaacctgtgctggggcataaaacaatagctcaacatagtatctttagttagtttatggaactaaattctgtcaagtcaaaggagagtgagccctaatataattttttatatatatttttctcgtgtgtacttttatacattttaaattctagtcctagttgtttggttaaatcaatcattatgtaatctgtatttggatttctttaaaactgcttacagcatctagttttatgcttctagcatgaattttgcttaagaagattccaactttgccatatagatcagtgctatttacatagactgaaagaatgttctttcccttttttcaaatatgacttttgaaaataaaggtctctgttatagctccctaaaacaatccttaaaaaaatggcaaactttttcaggagctgtgacacataattaaataaaggcatagaaatta

SEQ ID NO: 281980 - DNA, 4002 bp, Homo sapiens
gcaaccgctactcccgggggtgctttttctgcagggacgaagtgccacctatgctagtggcgggtctggaagcctagaggggaaccaggctgcagagccgggccaagggattagcggcgggcggcgggcatggcctggactgcgcgggaccgcggggccctggggctgctgctgttggggctctgcttgtgcgcggctcaaagaggtcccccgggtgagcagggtcctcccgggcctccgggcccccctggagttccaggcatcgatggcatcgacggtgaccgaggtcctaagggccccccgggccccccgggtcctgcaggtgaaccgggaaagccaggagctccaggcaagcctggcacacctggcgctgatggattaacaggacctgatggatcccctggctccattgggtcaaagggacaaaaaggagaacctggtgtgcctggatcgcgtggatttccaggccgtggtattcctggaccccctggtcctcctgggacagcaggactccctggagagcttggccgtgtaggacctgttggtgaccctgggagaagaggaccacctggcccccctggccccccaggacccagaggaacaattggctttcatgatggagatccattgtgtcccaatgcctgtccaccaggtcgctcaggatatccaggcctaccaggcatgaggggtcataaaggggctaaaggagaaattggtgaaccaggaagacaaggacacaagggtgaagaaggtgaccagggagaactcggagaagttggagctcaaggacctccaggagcccagggtttgcgaggcatcaccggcatagttggggacaaaggggaaaaaggtgctcggggcttagatggtgaacctgggcctcagggtcttcctggtgcacctggtgatcaaggacagcgaggacctccaggagaagcaggtcccaaaggagatagaggggctgaaggtgctagaggaattcctggtctccctgggcccaaaggagacacgggtttgccaggtgtggatggccgtgatgggatccctggaatgcctggaacaaagggtgaaccaggaaaacctgggcctcctggtgatgcaggattgcaggggttaccaggtgtacctggaattcctggtgcaaagggtgttgctggtgaaaagggtagcacaggtgctccagggaagcctggtcagatgggaaattcaggcaaaccgggccaacaggggcctccaggagaggtgggaccccgaggaccccaggggcttcctggcagtagaggagaattaggaccagtgggatccccaggcctaccaggtaaactgggttctctgggtagccctggcctccctggcttgcctgggccccctggacttcctggaatgaaaggtgacaggggtgtagtcggtgaaccgggtccaaagggtgaacagggtgcctctggtgaagaaggtgaagcaggagaaaggggggaacttggagatataggattacctggcccaaagggatctgcaggtaatcctggggaacctggcttgagagggcctgagggaagtcgggggcttcctggagtggaaggaccaagaggaccacctggaccccggggtgtgcagggagaacagggtgccaccggcctgcctggtgtccagggccctccgggtagagcaccgacagatcagcacattaagcaggtttgcatgagagtcatacaagaacattttgctgagatggctgccagtcttaagcgtccagactcaggtgccactgggcttcctggaaggcctggccctcctggtccccccggccctcctggagagaatggtttcccaggccagatgggaattcgtggccttccgggcattaaggggccccctggtgctcttggtttgaggggacctaaaggtgacttgggagaaaagggggagcgtggccctccaggaagaggtcccaacggtttgcctggagctataggtctcccaggtgacccaggccctgccagctatggcagaaatggccgagacggtgagcgaggccccccaggggtggcaggaattcctggagtgcctggacccccgggacctcctgggcttcccggtttctgtgagccagcctcctgcaccatgcaggctggtcagcgagcatttaacaaagggcctgacccttgaaaggcttactgctgcatggctgtctgcatgaaccacgcctggtgaaggagcctgggtgagaaacaccatccaaagctggggcaaagatgattaccttcagcatgattacaatgtattaccttcagtatgattacagaagtcctacttgacaatcacatatagaagaacggtgctattcagtaagttctctttcctttcccttggagggaagacagcagagtcatcagttaaaaaaaaaaaaagaaaaccaaacacctcccttgaataaatttatactcctgttcccaggatcttgagctttagtgtgctatacctatgtgtcttatcgtgggccactgtgccaataaacaaaaacaactgtttggtttacctcagttgcagtagttattttcatttagaagttgttctcagattattgtttcagttatatagaggattactagactagttatgaagaaaccccactacattcaatggaattggtgcttaaaatctcatcgatgtgctgtctctggagtgataagaaagggctacatctcccgaaatgatttctttacgtcatgtattggtttccttcttcaccttgaacttttgttgaactgtatgtactttaccccaaacctgttaatattttgagcgcttctatgtgaaagcaaagaaataattttaatactctggcattcataaattttattgatgagattatttattttaaaggtttgaggtaacatctctggttgtaccaaagaagaaataaatatggtttcttaatctcttgcatgttttcttataaataatcatgttcaatgaaaagaagttactgagcttatttagatacattaaacattacttaactactggttctataggtgtatgtttataatattagtgttttttctacataaagtaatttaaaaagctgttccacagagggtgttaccctgtgacagatgcgtatgtgtgtgtgtgtgtgtgtgtgtgtgttttagtgtgtatggagagagcttcatggaccttttcgaaatgttaattccctagaaagatgtgcagctgcatgcgcatctatatttttgtatagtatttcagagatttcgtggacttttttaagtctagccttgctttatttctaggttaagaaccactgccttcattccaatggcttgttagctccctcctactcagaactttattgtaaacatgatttatgtttcaccatttcttgtaaattttataaatgcagctcagctaaagcactgtattcttaacaagtatttcctgaccacttaagcactttattattatctgtgtaatcatattggcttgctgtttcattaacatctacttaactatccaacagacttaatatattcattttatatcacagagcctgtgagtaacctgtgctggggcataaaacaatagctcaacatagtatctttagttagtttatggaactaaattctgtcaagtcaaaggagagtgagccctaatataattttttatatatatttttctcgtgtgtacttttatacattttaaattctagtcctagttgtttggttaaatcaatcattatgtaatctgtatttggatttctttaaaactgcttacagcatctagttttatgcttctagcatgaattttgcttaagaagattccaactttgccatatagatcagtgctatttacatagactgaaagaatgttctttcccttttttcaaatatgacttttgaaaataaaggtctctgttatagctccctaaaacaatccttaaaaaaatggcaaactttttcaggagctgtgacacataattaaataaaggcatagaaatta

SEQ ID NO: 281981 - DNA, 3496 bp, Homo sapiens
ccctggcccccaggacccagaggggccaggtggtcctcttctcccaggtcaccaacaggtcctacacggccccctggccccccaggacccagaggaacaatggctttcacaatggatctccatgtgtcccaatgcctgtccaccaggtcgctcaggatatccaggcctaccaggcatgaggggtcataaaggggctaaaggagaaattggtgaaccaggaagacaaggacacaagggtgaagaaggtgaccagggagaactcggagaagttggagctcaaggacctccaggagcccagggtttgcgaggcatcaccggcatagttggggacaaaggggaaaaaggtgctcggggcttagatggtgaacctgggcctcagggtcttcctggtgcacctggtgatcaaggacagcgaggacctccaggagaagcaggtcccaaaggagatagaggggctgaaggtgctagaggaattcctggtctccctgggcccaaaggagacacgggtttgccaggtgtggatggccgtgatgggatccctggaatgcctggaacaaagggtgaaccaggaaaacctgggcctcctggtgatgcaggattgcaggggttaccaggtgtacctggaattcctggtgcaaagggtgttgctggtgaaaagggtagcacaggtgctccagggaagcctggtcagatgggaaattcaggcaaaccgggccaacaggggcctccaggagaggtgggaccccgaggaccccaggggcttcctggcagtagaggagaattaggaccagtgggatccccaggcctaccaggtaaactgggttctctgggtagccctggcctccctggcttgcctgggccccctggacttcctggaatgaaaggtgacaggggtgtagtcggtgaaccgggtccaaagggtgaacagggtgcctctggtgaagaaggtgaagcaggagaaaggggggaacttggagatataggattacctggcccaaagggatctgcaggtaatcctggggaacctggcttgagagggcctgagggaagtcgggggcttcctggagtggaaggaccaagaggaccacctggaccccggggtgtgcagggagaacagggtgccaccggcctgcctggtgtccagggccctccgggtagagcaccgacagatcagcacattaagcaggtttgcatgagagtcatacaagaacattttgctgagatggctgccagtcttaagcgtccagactcaggtgccactgggcttcctggaaggcctggccctcctggtccccccggccctcctggagagaatggtttcccaggccagatgggaattcgtggccttccgggcattaaggggccccctggtgctcttggtttgaggggacctaaaggtgacttgggagaaaagggggagcgtggccctccaggaagaggtcccaacggtttgcctggagctataggtctcccaggtgacccaggccctgccagctatggcagaaatggccgagacggtgagcgaggccccccaggggtggcaggaattcctggagtgcctggacccccgggacctcctgggcttcccggtttctgtgagccagcctcctgcaccatgcaggctggtcagcgagcatttaacaaagggcctgacccttgaaaggcttactgctgcatggctgtctgcatgaaccacgcctggtgaaggagcctgggtgagaaacaccatccaaagctggggcaaagatgattaccttcagcatgattacaatgtattaccttcagtatgattacagaagtcctacttgacaatcacatatagaagaacggtgctattcagtaagttctctttcctttcccttggagggaagacagcagagtcatcagttaaaaaaaaaaaaagaaaaccaaacacctcccttgaataaatttatactcctgttcccaggatcttgagctttagtgtgctatacctatgtgtcttatcgtgggccactgtgccaataaacaaaaacaactgtttggtttacctcagttgcagtagttattttcatttagaagttgttctcagattattgtttcagttatatagaggattactagactagttatgaagaaaccccactacattcaatggaattggtgcttaaaatctcatcgatgtgctgtctctggagtgataagaaagggctacatctcccgaaatgatttctttacgtcatgtattggtttccttcttcaccttgaacttttgttgaactgtatgtactttaccccaaacctgttaatattttgagcgcttctatgtgaaagcaaagaaataattttaatactctggcattcataaattttattgatgagattatttattttaaaggtttgaggtaacatctctggttgtaccaaagaagaaataaatatggtttcttaatctcttgcatgttttcttataaataatcatgttcaatgaaaagaagttactgagcttatttagatacattaaacattacttaactactggttctataggtgtatgtttataatattagtgttttttctacataaagtaatttaaaaagctgttccacagagggtgttaccctgtgacagatgcgtatgtgtgtgtgtgtgtgtgtgtgtgtgttttagtgtgtatggagagagcttcatggaccttttcgaaatgttaattccctagaaagatgtgcagctgcatgcgcatctatatttttgtatagtatttcagagatttcgtggacttttttaagtctagccttgctttatttctaggttaagaaccactgccttcattccaatggcttgttagctccctcctactcagaactttattgtaaacatgatttatgtttcaccatttcttgtaaattttataaatgcagctcagctaaagcactgtattcttaacaagtatttcctgaccacttaagcactttattattatctgtgtaatcatattggcttgctgtttcattaacatctacttaactatccaacagacttaatatattcattttatatcacagagcctgtgagtaacctgtgctggggcataaaacaatagctcaacatagtatctttagttagtttatggaactaaattctgtcaagtcaaaggagagtgagccctaatataattttttatatatatttttctcgtgtgtacttttatacattttaaattctagtcctagttgtttggttaaatcaatcattatgtaatctgtatttggatttctttaaaactgcttacagcatctagttttatgcttctagcatgaattttgcttaagaagattccaactttgccatatagatcagtgctatttacatagactgaaagaatgttctttcccttttttcaaatatgacttttgaaaataaaggtctctgttatagctccctaaaacaatccttaaaaaaatggcaaactttttcaggagctgtgacacataattaaataaaggcatagaaatta

SEQ ID NO: 281982 - DNA, 391 bp, Homo sapiens
cgggcctggacgctttggcaaccgctactcccgggggtgctttttctgcagggacgaagtgccacctatgctagtggcgggtctggaagcctagaggggaaccaggctgcagagccgggccaagggattagcggcgggcggcgggcatggcctggactgcgcgggaccgcggggccctggggctgctgctgttggggctctgcttgtgcgcggctcaagtaagttgcgatcgagtttgaggggtgcttttctcactttctccccatcttttcttctccagcccagccagaccaccgacgaggtaagttgggggcagggagtgtttgcatttttcaagcgcacacgaggacaggtcggggcgcagcggtcgagggagctgtgagaaaggcgc

SEQ ID NO: 281983 - DNA, 3695 bp, Homo sapiens
cctttgcttttagccctcaccgggggcaggagggaccaaggctgggcccagaacacatagtcctagggtaacagtgaaggggtcgtgaggggacagtgactcccttccaaccccttcttcatagggactgttggcaaacaaagaaaatcaactgggaaaatgaagacctgctggaaaattccagttttcttctttgtgtgcagtttcctggaaccctgggcatctgcagctgtcaagcgtcgccccagattccctgtcaattccaattctaatggtggaaatgaactctgtccaaagatcaggattggccaagatgacttaccagggtttgatctgatctctcagttccaggtagataaagcagcatctagaagagctatccagagagtagtgggatcagctacattgcaggtggcttacaagttgggaaataatgtagacttcaggattccaactaggaatttatatcccagtggactgcctgaagaatactccttcttgacgacgtttcgaatgactggaagcactctcaaaaagaactggaacatttggcagattcaggattcctctgggaaggagcaagttggcataaagattaatggccaaacacaatctgttgtattttcatacaagggactggatggaagtctccaaacagcagccttttcgaatttgtcctccttgtttgattcccagtggcataagatcatgattggcgtggagaggagtagtgctactctttttgttgactgcaacaggattgaatctttacctataaagccaagaggcccaattgacattgatggctttgctgtgctgggaaaacttgcagataatcctcaagtttctgttccatttgaacttcaatggatgctgatccattgtgaccccctgcggcccaggagagaaacttgccatgagctgccagccagaataacgcccagccagaccaccgacgagagaggtcccccgggtgagcagggtcctcccgggcctccgggcccccctggagttccaggcatcgatggcatcgacggtgaccgaggtcctaagggccccccgggccccccgggtcctgcaggtgaaccgggaaagccaggagctccaggcaagcctggcacacctggcgctgatggattaacaggacctgatggatcccctggctccattgggtcaaagggacaaaaaggagaacctggtgtgcctggatcgcgtggatttccaggccgtggtattcctggaccccctggtcctcctgggacagcaggactccctggagagcttggccgtgtaggacctgttggtgaccctgggagaagaggaccacctggcccccctggccccccaggacccagaggaacaattggctttcatgatggagatccattgtgtcccaatgcctgtccaccaggtcgctcaggatatccaggcctaccaggcatgaggggtcataaaggggctaaaggagaaattggtgaaccaggaagacaaggacacaagggtgaagaaggtgaccagggagaactcggagaagttggagctcaaggacctccaggagcccagggtttgcgaggcatcaccggcatagttggggacaaaggggaaaaaggtgctcggggcttagatggtgaacctgggcctcagggtcttcctggtgcacctggtgatcaaggacagcgaggacctccaggagaagcaggtcccaaaggagatagaggggctgaaggtgctagaggaattcctggtctccctgggcccaaaggagacacgggtttgccaggtgtggatggccgtgatgggatccctggaatgcctggaacaaagggtgaaccaggaaaacctgggcctcctggtgatgcaggattgcaggggttaccaggtgtacctggaattcctggtgcaaagggtgttgctggtgaaaagggtagcacaggtgctccagggaagcctggtcagatgggaaattcaggcaaaccgggccaacaggggcctccaggagaggtgggaccccgaggaccccaggggcttcctggcagtagaggagaattaggaccagtgggatccccaggcctaccaggtaaactgggttctctgggtagccctggcctccctggcttgcctgggccccctggacttcctggaatgaaaggtgacaggggtgtagtcggtgaaccgggtccaaagggtgaacagggtgcctctggtgaagaaggtgaagcaggagaaaggggggaacttggagatataggattacctggcccaaagggatctgcaggtaatcctggggaacctggcttgagagggcctgagggaagtcgggggcttcctggagtggaaggaccaagaggaccacctggaccccggggtgtgcagggagaacagggtgccaccggcctgcctggtgtccagggccctccgggtagagcaccgacagatcagcacattaagcaggtttgcatgagagtcatacaagaacattttgctgagatggctgccagtcttaagcgtccagactcaggtgccactgggcttcctggaaggcctggccctcctggtccccccggccctcctggagagaatggtttcccaggccagatgggaattcgtggccttccgggcattaaggggccccctggtgctcttggtttgaggggacctaaaggtgacttgggagaaaagggggagcgtggccctccaggaagaggtcccaacggtttgcctggagctataggtctcccaggtgacccaggccctgccagctatggcagaaatggccgagacggtgagcgaggccccccaggggtggcaggaattcctggagtgcctggacccccgggacctcctgggcttcccggtttctgtgagccagcctcctgcaccatgcaggctggtcagcgagcatttaacaaagggcctgacccttgaaaggcttactgctgcatggctgtctgcatgaaccacgcctggtgaaggagcctgggtgagaaacaccatccaaagctggggcaaagatgattaccttcagcatgattacaatgtattaccttcagtatgattacagaagtcctacttgacaatcacatatagaagaacggtgctattcagtaagttctctttcctttcccttggagggaagacagcagagtcatcagttaaaaaaaaaaaaagaaaaccaaacacctcccttgaataaatttatactcctgttcccaggatcttgagctttagtgtgctatacctatgtgtcttatcgtgggccactgtgccaataaacaaaaacaactgtttggtttacctcagttgcagtagttattttcatttagaagttgttctcagattattgtttcagttatatagaggattactagactagttatgaagaaaccccactacattcaatggaattggtgcttaaaatctcatcgatgtgctgtctctggagtgataagaaagggctacatctcccgaaatgatttctttacgtcatgtattggtttccttcttcaccttgaacttttgttgaactgtatgtactttaccccaaacctgttaatattttgagcgcttctatgtgaaagcaaagaaataattttaatactctggcattcataaattttattgatgagattatttattttaaaggtttgaggtaacatctctggttgtaccaaagaagaaataaatatggtttctta

SEQ ID NO: 281984 - DNA, 3588 bp, Homo sapiens
aaaatcatgttacatgtaaccaggttacatgccatgaaggaagtgggaatgatagtgtaagttctacatacaagttaaaaggtaagtcaaacatattatcacaatttctcttatgctggtatttactttttttgtcataagtgattttgtcaactccagttttgtgtaagacttcagaattttataaaaaggtttaccatcagaagaattctccttggactttctaaactagaaatgtttgtctatatatatatagttactatttcttggtattacctttggttatgataatatccattgtctagatcagcttttgtgatgagatttttaaaaatctttgcttcaactaaaataattcacttctctttttcacatttccagggagcccagggtttgcgaggcatcaccggcatagttggggacaaaggggaaaaaggtgctcggggcttagatggtgaacctgggcctcagggtcttcctggtgcacctggtgatcaaggacagcgaggacctccaggagaagcaggtcccaaaggagatagaggggctgaaggtgctagaggaattcctggtctccctgggcccaaaggagacacgggtttgccaggtgtggatggccgtgatgggatccctggaatgcctggaacaaagggtgaaccaggaaaacctgggcctcctggtgatgcaggattgcaggggttaccaggtgtacctggaattcctggtgcaaagggtgttgctggtgaaaagggtagcacaggtgctccagggaagcctggtcagatgggaaattcaggcaaaccgggccaacaggggcctccaggagaggtgggaccccgaggaccccaggggcttcctggcagtagaggagaattaggaccagtgggatccccaggcctaccaggtaaactgggttctctgggtagccctggcctccctggcttgcctgggccccctggacttcctggaatgaaaggtgacaggggtgtagtcggtgaaccgggtccaaagggtgaacagggtgcctctggtgaagaaggtgaagcaggagaaaggggggaacttggagatataggattacctggcccaaagggatctgcaggtaatcctggggaacctggcttgagagggcctgagggaagtcgggggcttcctggagtggaaggaccaagaggaccacctggaccccggggtgtgcagggagaacagggtgccaccggcctgcctggtgtccagggccctccgggtagagcaccgacagatcagcacattaagcaggtttgcatgagagtcatacaagaacattttgctgagatggctgccagtcttaagcgtccagactcaggtgccactgggcttcctggaaggcctggccctcctggtccccccggccctcctggagagaatggtttcccaggccagatgggaattcgtggccttccgggcattaaggggccccctggtgctcttggtttgaggggacctaaaggtgacttgggagaaaagggggagcgtggccctccaggaagaggtcccaacggtttgcctggagctataggtctcccaggtgacccaggccctgccagctatggcagaaatggccgagacggtgagcgaggccccccaggggtggcaggaattcctggagtgcctggacccccgggacctcctgggcttcccggtttctgtgagccagcctcctgcaccatgcaggctggtcagcgagcatttaacaaagggcctgacccttgaaaggcttactgctgcatggctgtctgcatgaaccacgcctggtgaaggagcctgggtgagaaacaccatccaaagctggggcaaagatgattaccttcagcatgattacaatgtattaccttcagtatgattacagaagtcctacttgacaatcacatatagaagaacggtgctattcagtaagttctctttcctttcccttggagggaagacagcagagtcatcagttaaaaaaaaaaaaagaaaaccaaacacctcccttgaataaatttatactcctgttcccaggatcttgagctttagtgtgctatacctatgtgtcttatcgtgggccactgtgccaataaacaaaaacaactgtttggtttacctcagttgcagtagttattttcatttagaagttgttctcagattattgtttcagttatatagaggattactagactagttatgaagaaaccccactacattcaatggaattggtgcttaaaatctcatcgatgtgctgtctctggagtgataagaaagggctacatctcccgaaatgatttctttacgtcatgtattggtttccttcttcaccttgaacttttgttgaactgtatgtactttaccccaaacctgttaatattttgagcgcttctatgtgaaagcaaagaaataattttaatactctggcattcataaattttattgatgagattatttattttaaaggtttgaggtaacatctctggttgtaccaaagaagaaataaatatggtttcttaatctcttgcatgttttcttataaataatcatgttcaatgaaaagaagttactgagcttatttagatacattaaacattacttaactactggttctataggtgtatgtttataatattagtgttttttctacataaagtaatttaaaaagctgttccacagagggtgttaccctgtgacagatgcgtatgtgtgtgtgtgtgtgtgtgtgtgtgttttagtgtgtatggagagagcttcatggaccttttcgaaatgttaattccctagaaagatgtgcagctgcatgcgcatctatatttttgtatagtatttcagagatttcgtggacttttttaagtctagccttgctttatttctaggttaagaaccactgccttcattccaatggcttgttagctccctcctactcagaactttattgtaaacatgatttatgtttcaccatttcttgtaaattttataaatgcagctcagctaaagcactgtattcttaacaagtatttcctgaccacttaagcactttattattatctgtgtaatcatattggcttgctgtttcattaacatctacttaactatccaacagacttaatatattcattttatatcacagagcctgtgagtaacctgtgctggggcataaaacaatagctcaacatagtatctttagttagtttatggaactaaattctgtcaagtcaaaggagagtgagccctaatataattttttatatatatttttctcgtgtgtacttttatacattttaaattctagtcctagttgtttggttaaatcaatcattatgtaatctgtatttggatttctttaaaactgcttacagcatctagttttatgcttctagcatgaattttgcttaagaagattccaactttgccatatagatcagtgctatttacatagactgaaagaatgttctttcccttttttcaaatatgacttttgaaaataaaggtctctgttatagctccctaaaacaatccttaaaaaaatggcaaactttttcaggagctgtgacacataattaaataaaggcatagaaatta

SEQ ID NO: 281985 - DNA, 3248 bp, Homo sapiens
cgtctataatgcaaaggctgggttctgctcttgtaatgcaaggtgaatgataaattcaaggtctttttcaggtcttcaaaatctcttcttctctgggtgctcggggcttagatggtgaacctgggcctcagggtcttcctggtgcacctggtgatcaaggacagcgaggacctccaggagaagcaggtcccaaaggagatagaggggctgaaggtgctagaggaattcctggtctccctgggcccaaaggagacacgggtttgccaggtgtggatggccgtgatgggatccctggaatgcctggaacaaagggtgaaccaggaaaacctgggcctcctggtgatgcaggattgcaggggttaccaggtgtacctggaattcctggtgcaaagggtgttgctggtgaaaagggtagcacaggtgctccagggaagcctggtcagatgggaaattcaggcaaaccgggccaacaggggcctccaggagaggtgggaccccgaggaccccaggggcttcctggcagtagaggagaattaggaccagtgggatccccaggcctaccaggtaaactgggttctctgggtagccctggcctccctggcttgcctgggccccctggacttcctggaatgaaaggtgacaggggtgtagtcggtgaaccgggtccaaagggtgaacagggtgcctctggtgaagaaggtgaagcaggagaaaggggggaacttggagatataggattacctggcccaaagggatctgcaggtaatcctggggaacctggcttgagagggcctgagggaagtcgggggcttcctggagtggaaggaccaagaggaccacctggaccccggggtgtgcagggagaacagggtgccaccggcctgcctggtgtccagggccctccgggtagagcaccgacagatcagcacattaagcaggtttgcatgagagtcatacaagaacattttgctgagatggctgccagtcttaagcgtccagactcaggtgccactgggcttcctggaaggcctggccctcctggtccccccggccctcctggagagaatggtttcccaggccagatgggaattcgtggccttccgggcattaaggggccccctggtgctcttggtttgaggggacctaaaggtgacttgggagaaaagggggagcgtggccctccaggaagaggtcccaacggtttgcctggagctataggtctcccaggtgacccaggccctgccagctatggcagaaatggccgagacggtgagcgaggccccccaggggtggcaggaattcctggagtgcctggacccccgggacctcctgggcttcccggtttctgtgagccagcctcctgcaccatgcaggctggtcagcgagcatttaacaaagggcctgacccttgaaaggcttactgctgcatggctgtctgcatgaaccacgcctggtgaaggagcctgggtgagaaacaccatccaaagctggggcaaagatgattaccttcagcatgattacaatgtattaccttcagtatgattacagaagtcctacttgacaatcacatatagaagaacggtgctattcagtaagttctctttcctttcccttggagggaagacagcagagtcatcagttaaaaaaaaaaaaagaaaaccaaacacctcccttgaataaatttatactcctgttcccaggatcttgagctttagtgtgctatacctatgtgtcttatcgtgggccactgtgccaataaacaaaaacaactgtttggtttacctcagttgcagtagttattttcatttagaagttgttctcagattattgtttcagttatatagaggattactagactagttatgaagaaaccccactacattcaatggaattggtgcttaaaatctcatcgatgtgctgtctctggagtgataagaaagggctacatctcccgaaatgatttctttacgtcatgtattggtttccttcttcaccttgaacttttgttgaactgtatgtactttaccccaaacctgttaatattttgagcgcttctatgtgaaagcaaagaaataattttaatactctggcattcataaattttattgatgagattatttattttaaaggtttgaggtaacatctctggttgtaccaaagaagaaataaatatggtttcttaatctcttgcatgttttcttataaataatcatgttcaatgaaaagaagttactgagcttatttagatacattaaacattacttaactactggttctataggtgtatgtttataatattagtgttttttctacataaagtaatttaaaaagctgttccacagagggtgttaccctgtgacagatgcgtatgtgtgtgtgtgtgtgtgtgtgtgtgttttagtgtgtatggagagagcttcatggaccttttcgaaatgttaattccctagaaagatgtgcagctgcatgcgcatctatatttttgtatagtatttcagagatttcgtggacttttttaagtctagccttgctttatttctaggttaagaaccactgccttcattccaatggcttgttagctccctcctactcagaactttattgtaaacatgatttatgtttcaccatttcttgtaaattttataaatgcagctcagctaaagcactgtattcttaacaagtatttcctgaccacttaagcactttattattatctgtgtaatcatattggcttgctgtttcattaacatctacttaactatccaacagacttaatatattcattttatatcacagagcctgtgagtaacctgtgctggggcataaaacaatagctcaacatagtatctttagttagtttatggaactaaattctgtcaagtcaaaggagagtgagccctaatataattttttatatatatttttctcgtgtgtacttttatacattttaaattctagtcctagttgtttggttaaatcaatcattatgtaatctgtatttggatttctttaaaactgcttacagcatctagttttatgcttctagcatgaattttgcttaagaagattccaactttgccatatagatcagtgctatttacatagactgaaagaatgttctttcccttttttcaaatatgacttttgaaaataaaggtctctgttatagctccctaaaacaatccttaaaaaaatggcaaactttttcaggagctgtgacacataattaaataaaggcatagaaatta

SEQ ID NO: 281986 - DNA, 1585 bp, Homo sapiens
cgggctggcgggcgggcgctcggctggcggctgcagcagcagagggagacccgcggcaaccccggcaacccagggctcggcgtcgctgccaccatgacgggaagcaatatgtcggacgccttggccaacgccgtgtgccagcgctgccaggcccgcttctcccccgccgagcgcattgtcaacagcaatggggagctgtaccatgagcactgcttcgtgtgtgcccagtgcttccggcccttccccgaggggctcttctatgagtttgaaggccggaagtactgcgaacacgacttccaaatgctgtttgctccgtgctgtggatcctgcggtgagttcatcattggccgcgtcatcaagcactttgtctgtgccaagtgtgagaagccattcctggggcaccggcactatgagaagaagggcctggcctactgcgagactcactacaaccagctcttcggggacgtctgctacaactgcagccatgtgattgaaggcgatgtggtgtcggccctcaacaaggcctggtgtgtgagctgcttctcctgctccacctgcaacagcaagctcaccctgaagaacaagtttgtggagttcgacatgaagcccgtgtgtaagaggtgctacgagaagttcccgctggagctgaagaagcggctgaagaagctgtcggagctgacctcccgcaaggcccagcccaaggccacagacctcaactctgcctgaaggccctcttgcgcagctgcctctcggcccctccgccttctcccctcccgctgtccatgcttggccccctcgtccccatccacctgtgccctccgcatcttaccctccctttctctttcctcattgccttctcccttcctgttccctcatctctgccttccccatgtctctcctctccttggccgtggcttctgtctgtgaggaggcaggagctggggagtgggagcctatgaccccacgtctgacagccatgtccacctgtgcccacagcttccgcccacagacctccagggacaggagcaaattgcaccacagctccccgcctggcctggccctccccaggcggctcagtggctcatgctgtcctgtgagagcccctgccccagagcggccccactaagcgcatgtggctcctgggctacccacagccagggcagcctgctggagccacagggccagggccatgcagatggaggcctctgggagccacctccaatccctcaccactcactcaaccagtggcacagtgtccttgtgcccacactgagccagcaagtcctgctgtccacacccacaagctacctggagggacaggacccacctccatccttcggaaggccttcctggaatcccaccttggcctccgccctcggttccgccccgcccctctccccccgaccttggggcttgtgtcgagcccttgggtggggccaggaggaggtgatggcgtcagaggaggtgtggtcagaggtgacttgttcccacctccagggaggacgcttcgtcttcggccagcgcagacctggtgtttgtttgtttgttgggctcacgcttgcacaatgaaggcttgttcacacaa

SEQ ID NO: 281987 - DNA, 498 bp, Homo sapiens
gcacagagagccagtcggcagcttagccagtgactgctgggcctttgtttgggccccttgccctgcacacagctgatgatgagacaccccagggccagggccatgcagatggaggcctctgggagccacctccaatccctcaccactcactcaaccagtggcacagtgtccttgtgcccacactgagccagcaagtcctgctgtccacacccacaagctacctggagggacaggacccacctccatccttcggaaggccttcctggaatcccaccttggcctccgccctcggttccgccccgcccctctccccccgaccttggggcttgtgtcgagcccttgggtggggccaggaggaggtgatggcgtcagaggaggtgtggtcagaggtgacttgttcccacctccagggaggacgcttcgtcttcggccagcgcagacctggtgtttgtttgtttgttgggctcacgcttgcacaatgaaggcttgttcacacaa

SEQ ID NO: 281988 - DNA, 455 bp, Homo sapiens
  misc_feature (83)..(83): n is a, c, g, or t
aagtgatatccacatctcacttccaaaatgatgggggatagagactactagtgaaaataaaaattgatatagacagttttagnatactccaatccctcaccactcactcaaccagtggcacagtgtccttgtgcccacactgagccagcaagtcctgctgtccacacccacaagctacctggagggacaggacccacctccatccttcggaaggccttcctggaatcccaccttggcctccgccctcggttccgccccgcccctctccccccgaccttggggcttgtgtcgagcccttgggtggggccaggaggaggtgatggcgtcagaggaggtgtggtcagaggtgacttgttcccacctccagggaggacgcttcgtcttcggccagcgcagacctggtgtttgtttgtttgttgggctcacgcttgcacaatgaaggcttgttcacacaa

SEQ ID NO: 281989 - DNA, 2524 bp, Homo sapiens
  misc_feature (1038)..(1038): n is a, c, g, or t
atcggctctgccctggtctgggtgccccacggtgatgtttgtggcagagggtctcagagaagggagcaaagcagaatgtgggcctgtgtggctccggtcctcggtttcctaactgttggcagggatcctaaaggcgccaggtcctccctgtcctcctcagctgactctgccctcctcagtgtgtccacgggcacaggctttcctcctggcaggtggcagccggagacctcctgggtgtcctgccgccactgtggacctcacctcagtgctgtctggggccttcccagaccagtcccctcccagcgggacccaacccccgccagcctcagctttcaggagctgcccccgcggcgcgaacaatatcctttctatttggagttgactctgctgccctttggagatcccagcgcgtaacgtgagctcgcgaccagcgcgggggaggcgcccacacgcccgtcccgtcttggtgtctggccccaggcggccgcgcctcccctccgaggtggtcccatagcccctgcaccaggcggcccgcgcccgcgacctcaaggcggctgccccgcgccatggcggcccggctgggtgcgctggccgcgtcggggctgtaccggcggcgccagcaccggcagagcccgccgccagccacggagcaatatgtcggacgccttggccaacgccgtgtgccagcgctgccaggcccgcttctcccccgccgagcgcattgtcaacagcaatggggagctgtaccatgagcactgcttcgtgtgtgcccagtgcttccggcccttccccgaggggctcttctatgagtttgaaggccggaagtactgcgaacacgacttccaaatgctgtttgctccgtgctgtggatcctgcggtgagttcatcattggccgcgtcatcaaggccatgaacaacaactggcacccgggctgcttccgctgcgagctgtgtgatgtggagctggctgacctgggctttgtgaagaatgccggcaggcatctctgccggccttgccacaaccgtgagaaggccaanggcctgggcaagtacatctgccagcggtgccacctggtcatcgacgagcagcccctcatgttcaggagcgacgcctaccaccctgaccacttcaactgcacccactgtgggaaggagctgacagccgaggcccgcgagctgaagggtgagctctactgcctgccctgccatgacaagatgggcgtccccatctgcggggcctgccgccggcccatcgagggccgagtggtcaacgcgctgggcaagcagtggcacgtggagcactttgtctgtgccaagtgtgagaagccattcctggggcaccggcactatgagaagaagggcctggcctactgcgagactcactacaaccagctcttcggggacgtctgctacaactgcagccatgtgattgaaggcgatgtggtgtcggccctcaacaaggcctggtgtgtgagctgcttctcctgctccacctgcaacagcaagctcaccctgaagaacaagtttgtggagttcgacatgaagcccgtgtgtaagaggtgctacgagaagttcccgctggagctgaagaagcggctgaagaagctgtcggagctgacctcccgcaaggcccagcccaaggccacagacctcaactctgcctgaaggccctcttgcgcagctgcctctcggcccctccgccttctcccctcccgctgtccatgcttggccccctcgtccccatccacctgtgccctccgcatcttaccctccctttctctttcctcattgccttctcccttcctgttccctcatctctgccttccccatgtctctcctctccttggccgtggcttctgtctgtgaggaggcaggagctggggagtgggagcctatgaccccacgtctgacagccatgtccacctgtgcccacagcttccgcccacagacctccagggacaggagcaaattgcaccacagctccccgcctggcctggccctccccaggcggctcagtggctcatgctgtcctgtgagagcccctgccccagagcggccccactaagcgcatgtggctcctgggctacccacagccagggcagcctgctggagccacagggccagggccatgcagatggaggcctctgggagccacctccaatccctcaccactcactcaaccagtggcacagtgtccttgtgcccacactgagccagcaagtcctgctgtccacacccacaagctacctggagggacaggacccacctccatccttcggaaggccttcctggaatcccaccttggcctccgccctcggttccgccccgcccctctccccccgaccttggggcttgtgtcgagcccttgggtggggccaggaggaggtgatggcgtcagaggaggtgtggtcagaggtgacttgttcccacctccagggaggacgcttcgtcttcggccagcgcagacctggtgtttgtttgtttgttgggctcacgcttgcacaatgaaggcttgttcacacaa

SEQ ID NO: 281990 - DNA, 1668 bp, Homo sapiens
  misc_feature (182)..(182): n is a, c, g, or t
ggagttcctcatggggaccccattccccaggaatccaggttccacagtactctgacttggtctggctggtctcggctggcactttccctaggactgctaaaaccacggtgagggcggagagctgagggccgaagaaggcggggcatctctgccggccttgccacaaccgtgagaaggccaanggcctgggcaagtacatctgccagcggtgccacctggtcatcgacgagcagcccctcatgttcaggagcgacgcctaccaccctgaccacttcaactgcacccactgtgggaaggagctgacagccgaggcccgcgagctgaagggtgagctctactgcctgccctgccatgacaagatgggcgtccccatctgcggggcctgccgccggcccatcgagggccgagtggtcaacgcgctgggcaagcagtggcacgtggagcactttgtctgtgccaagtgtgagaagccattcctggggcaccggcactatgagaagaagggcctggcctactgcgagactcactacaaccagctcttcggggacgtctgctacaactgcagccatgtgattgaaggcgatgtggtgtcggccctcaacaaggcctggtgtgtgagctgcttctcctgctccacctgcaacagcaagctcaccctgaagaacaagtttgtggagttcgacatgaagcccgtgtgtaagaggtgctacgagaagttcccgctggagctgaagaagcggctgaagaagctgtcggagctgacctcccgcaaggcccagcccaaggccacagacctcaactctgcctgaaggccctcttgcgcagctgcctctcggcccctccgccttctcccctcccgctgtccatgcttggccccctcgtccccatccacctgtgccctccgcatcttaccctccctttctctttcctcattgccttctcccttcctgttccctcatctctgccttccccatgtctctcctctccttggccgtggcttctgtctgtgaggaggcaggagctggggagtgggagcctatgaccccacgtctgacagccatgtccacctgtgcccacagcttccgcccacagacctccagggacaggagcaaattgcaccacagctccccgcctggcctggccctccccaggcggctcagtggctcatgctgtcctgtgagagcccctgccccagagcggccccactaagcgcatgtggctcctgggctacccacagccagggcagcctgctggagccacagggccagggccatgcagatggaggcctctgggagccacctccaatccctcaccactcactcaaccagtggcacagtgtccttgtgcccacactgagccagcaagtcctgctgtccacacccacaagctacctggagggacaggacccacctccatccttcggaaggccttcctggaatcccaccttggcctccgccctcggttccgccccgcccctctccccccgaccttggggcttgtgtcgagcccttgggtggggccaggaggaggtgatggcgtcagaggaggtgtggtcagaggtgacttgttcccacctccagggaggacgcttcgtcttcggccagcgcagacctggtgtttgtttgtttgttgggctcacgcttgcacaatgaaggcttgttcacacaa

SEQ ID NO: 281991 - DNA, 1635 bp, Homo sapiens
  misc_feature (149)..(149): n is a, c, g, or t
cagatggagcacagtgctgtgcaggatggagtccagacacccagcagtagcagaaatcgcctgtacgtgtttgggcccttcttcatctggcaaaccccgaaggaagggggcatctctgccggccttgccacaaccgtgagaaggccaanggcctgggcaagtacatctgccagcggtgccacctggtcatcgacgagcagcccctcatgttcaggagcgacgcctaccaccctgaccacttcaactgcacccactgtgggaaggagctgacagccgaggcccgcgagctgaagggtgagctctactgcctgccctgccatgacaagatgggcgtccccatctgcggggcctgccgccggcccatcgagggccgagtggtcaacgcgctgggcaagcagtggcacgtggagcactttgtctgtgccaagtgtgagaagccattcctggggcaccggcactatgagaagaagggcctggcctactgcgagactcactacaaccagctcttcggggacgtctgctacaactgcagccatgtgattgaaggcgatgtggtgtcggccctcaacaaggcctggtgtgtgagctgcttctcctgctccacctgcaacagcaagctcaccctgaagaacaagtttgtggagttcgacatgaagcccgtgtgtaagaggtgctacgagaagttcccgctggagctgaagaagcggctgaagaagctgtcggagctgacctcccgcaaggcccagcccaaggccacagacctcaactctgcctgaaggccctcttgcgcagctgcctctcggcccctccgccttctcccctcccgctgtccatgcttggccccctcgtccccatccacctgtgccctccgcatcttaccctccctttctctttcctcattgccttctcccttcctgttccctcatctctgccttccccatgtctctcctctccttggccgtggcttctgtctgtgaggaggcaggagctggggagtgggagcctatgaccccacgtctgacagccatgtccacctgtgcccacagcttccgcccacagacctccagggacaggagcaaattgcaccacagctccccgcctggcctggccctccccaggcggctcagtggctcatgctgtcctgtgagagcccctgccccagagcggccccactaagcgcatgtggctcctgggctacccacagccagggcagcctgctggagccacagggccagggccatgcagatggaggcctctgggagccacctccaatccctcaccactcactcaaccagtggcacagtgtccttgtgcccacactgagccagcaagtcctgctgtccacacccacaagctacctggagggacaggacccacctccatccttcggaaggccttcctggaatcccaccttggcctccgccctcggttccgccccgcccctctccccccgaccttggggcttgtgtcgagcccttgggtggggccaggaggaggtgatggcgtcagaggaggtgtggtcagaggtgacttgttcccacctccagggaggacgcttcgtcttcggccagcgcagacctggtgtttgtttgtttgttgggctcacgcttgcacaatgaaggcttgttcacacaa

SEQ ID NO: 281992 - DNA, 1427 bp, Homo sapiens
accctgcagaagggcaggggtggcacctgggggctgcacgctgtcttccaggaaggagctgacagccgaggcccgcgagctgaagggtgagctctactgcctgccctgccatgacaagatgggcgtccccatctgcggggcctgccgccggcccatcgagggccgagtggtcaacgcgctgggcaagcagtggcacgtggagcactttgtctgtgccaagtgtgagaagccattcctggggcaccggcactatgagaagaagggcctggcctactgcgagactcactacaaccagctcttcggggacgtctgctacaactgcagccatgtgattgaaggcgatgtggtgtcggccctcaacaaggcctggtgtgtgagctgcttctcctgctccacctgcaacagcaagctcaccctgaagaacaagtttgtggagttcgacatgaagcccgtgtgtaagaggtgctacgagaagttcccgctggagctgaagaagcggctgaagaagctgtcggagctgacctcccgcaaggcccagcccaaggccacagacctcaactctgcctgaaggccctcttgcgcagctgcctctcggcccctccgccttctcccctcccgctgtccatgcttggccccctcgtccccatccacctgtgccctccgcatcttaccctccctttctctttcctcattgccttctcccttcctgttccctcatctctgccttccccatgtctctcctctccttggccgtggcttctgtctgtgaggaggcaggagctggggagtgggagcctatgaccccacgtctgacagccatgtccacctgtgcccacagcttccgcccacagacctccagggacaggagcaaattgcaccacagctccccgcctggcctggccctccccaggcggctcagtggctcatgctgtcctgtgagagcccctgccccagagcggccccactaagcgcatgtggctcctgggctacccacagccagggcagcctgctggagccacagggccagggccatgcagatggaggcctctgggagccacctccaatccctcaccactcactcaaccagtggcacagtgtccttgtgcccacactgagccagcaagtcctgctgtccacacccacaagctacctggagggacaggacccacctccatccttcggaaggccttcctggaatcccaccttggcctccgccctcggttccgccccgcccctctccccccgaccttggggcttgtgtcgagcccttgggtggggccaggaggaggtgatggcgtcagaggaggtgtggtcagaggtgacttgttcccacctccagggaggacgcttcgtcttcggccagcgcagacctggtgtttgtttgtttgttgggctcacgcttgcacaatgaaggcttgttcacacaa

SEQ ID NO: 281993 - DNA, 1814 bp, Homo sapiens
ccctgatgacctggccagcgctgtgtccggaagctgtgccttgggtggcggcttgggtgggaggccatgcggtcctgccctgatgcaggccccagcccccagccctcatcctcacatgcagatccctgggggaatgcaaggtgctgctcagtgatcccaggcttgcagggggtgcctgcaggaggccccacgtggacaggcagggccgcctctgcctatgagggcccaccatgccgcagcaccaggctggcacctgactcctggggctgaggctgccgagggggaggccagactgggaggggatggtgactcacaaggttaccatcagtgccttagaggaggggtagggtctgctgaccccaggcattcacagaggtgtcagtcccctctgcccagtgtgaatcctgaaaggcctgcacctgcccagactctgctttctgtccccttctgtcactgctgcctcctggggccactgtggtcccctggagtcactggctcctggggtcactgttgtccccgggtcaccactgtccctcggggtcaccgctctagccctgatgccacccggcccgccctttgtccttgcagccactttgtctgtgccaagtgtgagaagccattcctggggcaccggcactatgagaagaagggcctggcctactgcgagactcactacaaccagctcttcggggacgtctgctacaactgcagccatgtgattgaaggcgatgtggtgtcggccctcaacaaggcctggtgtgtgagctgcttctcctgctccacctgcaacagcaagctcaccctgaagaacaagtttgtggagttcgacatgaagcccgtgtgtaagaggtgctacgagaagttcccgctggagctgaagaagcggctgaagaagctgtcggagctgacctcccgcaaggcccagcccaaggccacagacctcaactctgcctgaaggccctcttgcgcagctgcctctcggcccctccgccttctcccctcccgctgtccatgcttggccccctcgtccccatccacctgtgccctccgcatcttaccctccctttctctttcctcattgccttctcccttcctgttccctcatctctgccttccccatgtctctcctctccttggccgtggcttctgtctgtgaggaggcaggagctggggagtgggagcctatgaccccacgtctgacagccatgtccacctgtgcccacagcttccgcccacagacctccagggacaggagcaaattgcaccacagctccccgcctggcctggccctccccaggcggctcagtggctcatgctgtcctgtgagagcccctgccccagagcggccccactaagcgcatgtggctcctgggctacccacagccagggcagcctgctggagccacagggccagggccatgcagatggaggcctctgggagccacctccaatccctcaccactcactcaaccagtggcacagtgtccttgtgcccacactgagccagcaagtcctgctgtccacacccacaagctacctggagggacaggacccacctccatccttcggaaggccttcctggaatcccaccttggcctccgccctcggttccgccccgcccctctccccccgaccttggggcttgtgtcgagcccttgggtggggccaggaggaggtgatggcgtcagaggaggtgtggtcagaggtgacttgttcccacctccagggaggacgcttcgtcttcggccagcgcagacctggtgtttgtttgtttgttgggctcacgcttgcacaatgaaggcttgttcacacaa

SEQ ID NO: 281994 - DNA, 2006 bp, Homo sapiens
  misc_feature (492)..(492): n is a, c, g, or t
cgggctggcgggcgggcgctcggctggcggctgcagcagcagagggagacccgcggcaaccccggcaacccagggctcggcgtcgctgccaccatgacgggaagcaatatgtcggacgccttggccaacgccgtgtgccagcgctgccaggcccgcttctcccccgccgagcgcattgtcaacagcaatggggagctgtaccatgagcactgcttcgtgtgtgcccagtgcttccggcccttccccgaggggctcttctatgagtttgaaggccggaagtactgcgaacacgacttccaaatgctgtttgctccgtgctgtggatcctgcggtgagttcatcattggccgcgtcatcaaggccatgaacaacaactggcacccgggctgcttccgctgcgagctgtgtgatgtggagctggctgacctgggctttgtgaagaatgccggcaggcatctctgccggccttgccacaaccgtgagaaggccaanggcctgggcaagtacatctgccagcggtgccacctggtcatcgacgagcagcccctcatgttcaggagcgacgcctaccaccctgaccacttcaactgcacccactgtgggaaggagctgacagccgaggcccgcgagctgaagggtgagctctactgcctgccctgccatgacaagatgggcgtccccatctgcggggcctgccgccggcccatcgagggccgagtggtcaacgcgctgggcaagcagtggcacgtggagcactttgtctgtgccaagtgtgagaagccattcctggggcaccggcactatgagaagaagggcctggcctactgcgagactcactacaaccagctactctgacagcctgctcggcccacagctcttcggggacgtctgctacaactgcagccatgtgattgaaggcgatgtggtgtcggccctcaacaaggcctggtgtgtgagctgcttctcctgctccacctgcaacagcaagctcaccctgaagaacaagtttgtggagttcgacatgaagcccgtgtgtaagaggtgctacgagaagttcccgctggagctgaagaagcggctgaagaagctgtcggagctgacctcccgcaaggcccagcccaaggccacagacctcaactctgcctgaaggccctcttgcgcagctgcctctcggcccctccgccttctcccctcccgctgtccatgcttggccccctcgtccccatccacctgtgccctccgcatcttaccctccctttctctttcctcattgccttctcccttcctgttccctcatctctgccttccccatgtctctcctctccttggccgtggcttctgtctgtgaggaggcaggagctggggagtgggagcctatgaccccacgtctgacagccatgtccacctgtgcccacagcttccgcccacagacctccagggacaggagcaaattgcaccacagctccccgcctggcctggccctccccaggcggctcagtggctcatgctgtcctgtgagagcccctgccccagagcggccccactaagcgcatgtggctcctgggctacccacagccagggcagcctgctggagccacagggccagggccatgcagatggaggcctctgggagccacctccaatccctcaccactcactcaaccagtggcacagtgtccttgtgcccacactgagccagcaagtcctgctgtccacacccacaagctacctggagggacaggacccacctccatccttcggaaggccttcctggaatcccaccttggcctccgccctcggttccgccccgcccctctccccccgaccttggggcttgtgtcgagcccttgggtggggccaggaggaggtgatggcgtcagaggaggtgtggtcagaggtgacttgttcccacctccagggaggacgcttcgtcttcggccagcgcagacctggtgtttgtttgtttgttgggctcacgcttgcacaatgaaggcttgttcacacaa

SEQ ID NO: 281995 - DNA, 2334 bp, Homo sapiens
  misc_feature (492)..(492): n is a, c, g, or t
cgggctggcgggcgggcgctcggctggcggctgcagcagcagagggagacccgcggcaaccccggcaacccagggctcggcgtcgctgccaccatgacgggaagcaatatgtcggacgccttggccaacgccgtgtgccagcgctgccaggcccgcttctcccccgccgagcgcattgtcaacagcaatggggagctgtaccatgagcactgcttcgtgtgtgcccagtgcttccggcccttccccgaggggctcttctatgagtttgaaggccggaagtactgcgaacacgacttccaaatgctgtttgctccgtgctgtggatcctgcggtgagttcatcattggccgcgtcatcaaggccatgaacaacaactggcacccgggctgcttccgctgcgagctgtgtgatgtggagctggctgacctgggctttgtgaagaatgccggcaggcatctctgccggccttgccacaaccgtgagaaggccaanggcctgggcaagtacatctgccagcggtgccacctggtcatcgacgagcagcccctcatgttcaggagcgacgcctaccaccctgaccacttcaactgcacccactgtgggaaggagctgacagccgaggcccgcgagctgaagggtgagctctactgcctgccctgccatgacaagatgggcgtccccatctgcggggcctgccgccggcccatcgagggccgagtggtcaacgcgctgggcaagcagtggcacgtggagcactttgtctgtgccaagtgtgagaagccattcctggggcaccggcactatgagaagaagggcctggcctactgcgagactcactacaaccagctcttcggggacgtctgctacaactgcagccatgtgattgaaggcgatgtggtgtcggccctcaacaaggcctggtgtgtgagctgcttctcctgctccacctgcaacagcaagctcaccctgaagaacaagtttgtggagttcgacatgaagcccgtgtgtaagaggtgctacgagaagttcccgctggagctgaagaagcggctgaagaagctgtcggagctgacctcccgcaaggcccagcccaaggccacagacctcaactctgcctgaaggccctcttgcgcagctgcctctcggcccctccgccttctcccctcccgctgtccatgcttggccccctcgtccccatccacctgtgccctccgcatcttaccctccctttctctttcctcattgccttctcccttcctgttccctcatctctgccttccccatgtctctcctctccttggccgtggcttctgtctgtgaggaggcaggagctggggagtgggagcctatgaccccacgtctgacagccatgtccacctgtgcccacagcttccgcccacagacctccagggacaggagcaaattgcaccacagctccccgcctggcctggccctccccaggcggctcagtggctcatgctgtcctgtgagagcccctgccccagagcggccccactaagcgcatgtggctcctgggctacccacagccagggcagcctgctggagccacagggccagggccatgcagatggaggcctctgggagccacctccaatccctcaccactcactcaaccagtggcacagtgtccttgtgcccacactgagccagcaagtcctgctgtccacacccacaagctacctggagggacaggacccacctccatccttcggaaggccttcctggaatcccaccttggcctccgccctcggttccgccccgcccctctccccccgaccttggggcttgtgtcgagcccttgggtggggccaggaggaggtgatggcgtcagaggaggtgtggtcagaggtgacttgttcccacctccagggaggacgcttcgtcttcggccagcgcagacctggtgtttgtttgtttgttgggctcacgcttgcacaatgaaggcttgttcacacaaaaaaaacaacaacaaccaaacaacaaaaaaaccacaaaacacacacaaaaccaaaaaatgcaaaacaccccccaccccacaccacatccacccacaacacaccacctcccctgccctaccccgcagcaccgccaaacagtcaccccccacccactcccttcatcattcctcctgccctcgcgccactcccctcacccccgccccgggcacccgcccgcgacgcgccgccacgggcccgccccgacccgcacgagcctcccgcccactcatcccgacccccgcgccccgcgctccgggcggcgcgccccccccgcgccggcccgcaccactcgtcgcccgggccgggcgcgcccacc

SEQ ID NO: 281996 - DNA, 1169 bp, Homo sapiens
  misc_feature (31)..(31): n is a, c, g, or t
  misc_feature (38)..(38): n is a, c, g, or t
cccaaagtgctgggattacaggagtgagccnctgtgcncggccgtctctctagttttactttgcaatgtcgttcatatccatcccctttctagtgccactgctgaagtcctaagtcactgcctcctaactggtcctcctaccctaactcctcccagacaggcttcctgccctaactcctctctgaccagtcctcctgccctgacttctccctgaccggtcctcctgccctaactcctccctgaccagtcctcctgccctaactcctcccgcaaggcccagcccaaggccacagacctcaactctgcctgaaggccctcttgcgcagctgcctctcggcccctccgccttctcccctcccgctgtccatgcttggccccctcgtccccatccacctgtgccctccgcatcttaccctccctttctctttcctcattgccttctcccttcctgttccctcatctctgccttccccatgtctctcctctccttggccgtggcttctgtctgtgaggaggcaggagctggggagtgggagcctatgaccccacgtctgacagccatgtccacctgtgcccacagcttccgcccacagacctccagggacaggagcaaattgcaccacagctccccgcctggcctggccctccccaggcggctcagtggctcatgctgtcctgtgagagcccctgccccagagcggccccactaagcgcatgtggctcctgggctacccacagccagggcagcctgctggagccacagggccagggccatgcagatggaggcctctgggagccacctccaatccctcaccactcactcaaccagtggcacagtgtccttgtgcccacactgagccagcaagtcctgctgtccacacccacaagctacctggagggacaggacccacctccatccttcggaaggccttcctggaatcccaccttggcctccgccctcggttccgccccgcccctctccccccgaccttggggcttgtgtcgagcccttgggtggggccaggaggaggtgatggcgtcagaggaggtgtggtcagaggtgacttgttcccacctccagggaggacgcttcgtcttcggccagcgcagacctggtgtttgtttgtttgttgggctcacgcttgcacaatgaaggcttgttcacacaa

SEQ ID NO: 281997 - DNA, 1850 bp, Homo sapiens
  misc_feature (492)..(492): n is a, c, g, or t
cgggctggcgggcgggcgctcggctggcggctgcagcagcagagggagacccgcggcaaccccggcaacccagggctcggcgtcgctgccaccatgacgggaagcaatatgtcggacgccttggccaacgccgtgtgccagcgctgccaggcccgcttctcccccgccgagcgcattgtcaacagcaatggggagctgtaccatgagcactgcttcgtgtgtgcccagtgcttccggcccttccccgaggggctcttctatgagtttgaaggccggaagtactgcgaacacgacttccaaatgctgtttgctccgtgctgtggatcctgcggtgagttcatcattggccgcgtcatcaaggccatgaacaacaactggcacccgggctgcttccgctgcgagctgtgtgatgtggagctggctgacctgggctttgtgaagaatgccggcaggcatctctgccggccttgccacaaccgtgagaaggccaanggcctgggcaagtacatctgccagcggtgccacctggtcatcgacgagcagcccctcatgttcaggagcgacgcctaccaccctgaccacttcaactgcacccactgtgggaaggagctgacagccgaggcccgcgagctgaagggtgagctctactgcctgccctgccatgacaagatgggcgtccccatctgcggggcctgccgccggcccatcgagggccgagtggtcaacgcgctgggcaagcagtggcacgtggagcactttgtctgtgccaagtgtgagaagccattcctggggcaccggcactatgagaagaagggcctggcctactgcgagactcactacaaccagctcttcggggacgtctgctacaactgcagccatgtgattgaaggcgatgtggtgtcggccctcaacaaggcctggtgtgtgagctgcttctcctgctccacctgcaacagcaagctcaccctgaagaacaagtttgtggagttcgacatgaagcccgtgtgtaagaggtgctacgagaagttcccgctggagctgaagaagcggctgaagaagctgtcggagctgacctcccgcaaggcccagcccaaggccacagacctcaactctgcctgaaggccctcttgcgcagctgcctctcggcccctccgccttctcccctcccgctgtccatgcttggccccctcgtccccatccacctgtgccctccgcatcttaccctccctttctctttcctcattgccttctcccttcctgttccctcatctctgccttccccatgtctctcctctccttggccgtggcttctgtctgtgaggaggcaggagctggggagtgggagcctatgaccccacgtctgacagccatgtccacctgtgcccacagcttccgcccacagacctccagggacaggagcaaattgcaccacagctccccgcctggcctggccctccccaggcggctcagtggctcatgctgtcctgtgagagcccctgccccagagcggccccactaagcgcatgtggctcctgggctacccacagccagggcagcctgctggagccacagggccagggccatgcagatggaggcctctgggagccacctccaatccctcaccactcactcaaccagtggcacagtgtccttgtgcccacactgagccagcaagtcctgctgtcgagcccttgggtggggccaggaggaggtgatggcgtcagaggaggtgtggtcagaggtgacttgttcccacctccagggaggacgcttcgtcttcggccagcgcagacctggtgtttgtttgtttgttgggctcacgcttgcacaatgaaggcttgttcacacaa

SEQ ID NO: 281998 - DNA, 1978 bp, Homo sapiens
  misc_feature (492)..(492): n is a, c, g, or t
cgggctggcgggcgggcgctcggctggcggctgcagcagcagagggagacccgcggcaaccccggcaacccagggctcggcgtcgctgccaccatgacgggaagcaatatgtcggacgccttggccaacgccgtgtgccagcgctgccaggcccgcttctcccccgccgagcgcattgtcaacagcaatggggagctgtaccatgagcactgcttcgtgtgtgcccagtgcttccggcccttccccgaggggctcttctatgagtttgaaggccggaagtactgcgaacacgacttccaaatgctgtttgctccgtgctgtggatcctgcggtgagttcatcattggccgcgtcatcaaggccatgaacaacaactggcacccgggctgcttccgctgcgagctgtgtgatgtggagctggctgacctgggctttgtgaagaatgccggcaggcatctctgccggccttgccacaaccgtgagaaggccaanggcctgggcaagtacatctgccagcggtgccacctggtcatcgacgagcagcccctcatgttcaggagcgacgcctaccaccctgaccacttcaactgcacccactgtgggaaggagctgacagccgaggcccgcgagctgaagggtgagctctactgcctgccctgccatgacaagatgggcgtccccatctgcggggcctgccgccggcccatcgagggccgagtggtcaacgcgctgggcaagcagtggcacgtggagcactttgtctgtgccaagtgtgagaagccattcctggggcaccggcactatgagaagaagggcctggcctactgcgagactcactacaaccagctcttcggggacgtctgctacaactgcagccatgtgattgaaggcgatgtggtgtcggccctcaacaaggcctggtgtgtgagctgcttctcctgctccacctgcaacagcaagctcaccctgaagaacaagtttgtggagttcgacatgaagcccgtgtgtaagaggtgctacgagaagttcccgctggagctgaagaagcggctgaagaagctgtcggagctgacctcccgcaaggcccagcccaaggccacagacctcaactctgcctgaaggccctcttgcgcagctgcctctcggcccctccgccttctcccctcccgctgtccatgcttggccccctcgtccccatccacctgtgccctccgcatcttaccctccctttctctttcctcattgccttctcccttcctgttccctcatctctgccttccccatgtctctcctctccttggccgtggcttctgtctgtgaggaggcaggagctggggagtgggagcctatgaccccacgtctgacagccatgtccacctgtgcccacagcttccgcccacagacctccagggacaggagcaaattgcaccacagctccccgcctggcctggccctccccaggcggctcagtggctcatgctgtcctgtgagagcccctgccccagagcggccccactaagcgcatgtggctcctgggctacccacagccagggcagcctgctggagccacagggccagggccatgcagatggaggcctctgggagccacctccaatccctcaccactcactcaaccagtggcacagtgtccttgtgcccacactgagccagcaagtcctgctgtccacacccacaagctacctggagggacaggacccacctccatccttcggaaggccttcctggaatcccaccttggcctccgccctcggttccgccccgcccctctccccccgaccttggggcttgtgtcgagcccttgggtggggccaggaggaggtgatggcgtcagaggaggtgtggtcagaggtgacttgttcccacctccagggaggacgcttcgtcttcggccagcgcagacctggtgtttgtttgtttgttgggctcacgcttgcacaatgaaggcttgttcacacaa

SEQ ID NO: 281999 - DNA, 1191 bp, Homo sapiens
cagctgggccctgggaggcagggcctgggagatgcctgagaggggccgtggttggagggccaggctggctgcatgatggccctgggctggggtgtgactgcctgcagctactctgacagcctgctcggcccacagctcttcggggacgtctgctacaactgcagccatgtgattgaaggcgatggaacaagtttgtggagttcgacatgaagcccgtgtgtaagaggtgctacgagaagttcccgctggagctgaagaagcggctgaagaagctgtcggagctgacctcccgcaaggcccagcccaaggccacagacctcaactctgcctgaaggccctcttgcgcagctgcctctcggcccctccgccttctcccctcccgctgtccatgcttggccccctcgtccccatccacctgtgccctccgcatcttaccctccctttctctttcctcattgccttctcccttcctgttccctcatctctgccttccccatgtctctcctctccttggccgtggcttctgtctgtgaggaggcaggagctggggagtgggagcctatgaccccacgtctgacagccatgtccacctgtgcccacagcttccgcccacagacctccagggacaggagcaaattgcaccacagctccccgcctggcctggccctccccaggcggctcagtggctcatgctgtcctgtgagagcccctgccccagagcggccccactaagcgcatgtggctcctgggctacccacagccagggcagcctgctggagccacagggccagggccatgcagatggaggcctctgggagccacctccaatccctcaccactcactcaaccagtggcacagtgtccttgtgcccacactgagccagcaagtcctgctgtccacacccacaagctacctggagggacaggacccacctccatccttcggaaggccttcctggaatcccaccttggcctccgccctcggttccgccccgcccctctccccccgaccttggggcttgtgtcgagcccttgggtggggccaggaggaggtgatggcgtcagaggaggtgtggtcagaggtgacttgttcccacctccagggaggacgcttcgtcttcggccagcgcagacctggtgtttgtttgtttgttgggctcacgcttgcacaatgaaggcttgttcacacaa

SEQ ID NO: 282000 - DNA, 2018 bp, Homo sapiens
  misc_feature (532)..(532): n is a, c, g, or t
ggccggacactcctggcggctgctcagtcttgcacgtggctgtgccaagcgggccaggcagctgctatttccctcagagaagttgctggcggcgctcagggaaggaagcacccgaggaggcggagcggcatctcagccacagagcaatatgtcggacgccttggccaacgccgtgtgccagcgctgccaggcccgcttctcccccgccgagcgcattgtcaacagcaatggggagctgtaccatgagcactgcttcgtgtgtgcccagtgcttccggcccttccccgaggggctcttctatgagtttgaaggccggaagtactgcgaacacgacttccaaatgctgtttgctccgtgctgtggatcctgcggtgagttcatcattggccgcgtcatcaaggccatgaacaacaactggcacccgggctgcttccgctgcgagctgtgtgatgtggagctggctgacctgggctttgtgaagaatgccggcaggcatctctgccggccttgccacaaccgtgagaaggccaanggcctgggcaagtacatctgccagcggtgccacctggtcatcgacgagcagcccctcatgttcaggagcgacgcctaccaccctgaccacttcaactgcacccactgtgggaaggagctgacagccgaggcccgcgagctgaagggtgagctctactgcctgccctgccatgacaagatgggcgtccccatctgcggggcctgccgccggcccatcgagggccgagtggtcaacgcgctgggcaagcagtggcacgtggagcactttgtctgtgccaagtgtgagaagccattcctggggcaccggcactatgagaagaagggcctggcctactgcgagactcactacaaccagctcttcggggacgtctgctacaactgcagccatgtgattgaaggcgatgtggtgtcggccctcaacaaggcctggtgtgtgagctgcttctcctgctccacctgcaacagcaagctcaccctgaagaacaagtttgtggagttcgacatgaagcccgtgtgtaagaggtgctacgagaagttcccgctggagctgaagaagcggctgaagaagctgtcggagctgacctcccgcaaggcccagcccaaggccacagacctcaactctgcctgaaggccctcttgcgcagctgcctctcggcccctccgccttctcccctcccgctgtccatgcttggccccctcgtccccatccacctgtgccctccgcatcttaccctccctttctctttcctcattgccttctcccttcctgttccctcatctctgccttccccatgtctctcctctccttggccgtggcttctgtctgtgaggaggcaggagctggggagtgggagcctatgaccccacgtctgacagccatgtccacctgtgcccacagcttccgcccacagacctccagggacaggagcaaattgcaccacagctccccgcctggcctggccctccccaggcggctcagtggctcatgctgtcctgtgagagcccctgccccagagcggccccactaagcgcatgtggctcctgggctacccacagccagggcagcctgctggagccacagggccagggccatgcagatggaggcctctgggagccacctccaatccctcaccactcactcaaccagtggcacagtgtccttgtgcccacactgagccagcaagtcctgctgtccacacccacaagctacctggagggacaggacccacctccatccttcggaaggccttcctggaatcccaccttggcctccgccctcggttccgccccgcccctctccccccgaccttggggcttgtgtcgagcccttgggtggggccaggaggaggtgatggcgtcagaggaggtgtggtcagaggtgacttgttcccacctccagggaggacgcttcgtcttcggccagcgcagacctggtgtttgtttgtttgttgggctcacgcttgcacaatgaaggcttgttcacacaa

SEQ ID NO: 282001 - DNA, 1682 bp, Homo sapiens
  misc_feature (196)..(196): n is a, c, g, or t
gtgacagggcagtctgctttcccataccctgggctgagcccctttgaagcccccagctgctcagtgaagttgcaggggtctggcctctcttctcctggaggtggccaggctgtgtgggagtgggggctctgcccctaatgcccccgcctcccgcaggcatctctgccggccttgccacaaccgtgagaaggccaanggcctgggcaagtacatctgccagcggtgccacctggtcatcgacgagcagcccctcatgttcaggagcgacgcctaccaccctgaccacttcaactgcacccactgtgggaaggagctgacagccgaggcccgcgagctgaagggtgagctctactgcctgccctgccatgacaagatgggcgtccccatctgcggggcctgccgccggcccatcgagggccgagtggtcaacgcgctgggcaagcagtggcacgtggagcactttgtctgtgccaagtgtgagaagccattcctggggcaccggcactatgagaagaagggcctggcctactgcgagactcactacaaccagctcttcggggacgtctgctacaactgcagccatgtgattgaaggcgatgtggtgtcggccctcaacaaggcctggtgtgtgagctgcttctcctgctccacctgcaacagcaagctcaccctgaagaacaagtttgtggagttcgacatgaagcccgtgtgtaagaggtgctacgagaagttcccgctggagctgaagaagcggctgaagaagctgtcggagctgacctcccgcaaggcccagcccaaggccacagacctcaactctgcctgaaggccctcttgcgcagctgcctctcggcccctccgccttctcccctcccgctgtccatgcttggccccctcgtccccatccacctgtgccctccgcatcttaccctccctttctctttcctcattgccttctcccttcctgttccctcatctctgccttccccatgtctctcctctccttggccgtggcttctgtctgtgaggaggcaggagctggggagtgggagcctatgaccccacgtctgacagccatgtccacctgtgcccacagcttccgcccacagacctccagggacaggagcaaattgcaccacagctccccgcctggcctggccctccccaggcggctcagtggctcatgctgtcctgtgagagcccctgccccagagcggccccactaagcgcatgtggctcctgggctacccacagccagggcagcctgctggagccacagggccagggccatgcagatggaggcctctgggagccacctccaatccctcaccactcactcaaccagtggcacagtgtccttgtgcccacactgagccagcaagtcctgctgtccacacccacaagctacctggagggacaggacccacctccatccttcggaaggccttcctggaatcccaccttggcctccgccctcggttccgccccgcccctctccccccgaccttggggcttgtgtcgagcccttgggtggggccaggaggaggtgatggcgtcagaggaggtgtggtcagaggtgacttgttcccacctccagggaggacgcttcgtcttcggccagcgcagacctggtgtttgtttgtttgttgggctcacgcttgcacaatgaaggcttgttcacacaa

SEQ ID NO: 282002 - DNA, 2584 bp, Homo sapiens
  misc_feature (1038)..(1038): n is a, c, g, or t
atcggctctgccctggtctgggtgccccacggtgatgtttgtggcagagggtctcagagaagggagcaaagcagaatgtgggcctgtgtggctccggtcctcggtttcctaactgttggcagggatcctaaaggcgccaggtcctccctgtcctcctcagctgactctgccctcctcagtgtgtccacgggcacaggctttcctcctggcaggtggcagccggagacctcctgggtgtcctgccgccactgtggacctcacctcagtgctgtctggggccttcccagaccagtcccctcccagcgggacccaacccccgccagcctcagctttcaggagctgcccccgcggcgcgaacaatatcctttctatttggagttgactctgctgccctttggagatcccagcgcgtaacgtgagctcgcgaccagcgcgggggaggcgcccacacgcccgtcccgtcttggtgtctggccccaggcggccgcgcctcccctccgaggtggtcccatagcccctgcaccaggcggcccgcgcccgcgacctcaaggcggctgccccgcgccatggcggcccggctgggtgcgctggccgcgtcggggctgtaccggcggcgccagcaccggcagagcccgccgccagccacggagcaatatgtcggacgccttggccaacgccgtgtgccagcgctgccaggcccgcttctcccccgccgagcgcattgtcaacagcaatggggagctgtaccatgagcactgcttcgtgtgtgcccagtgcttccggcccttccccgaggggctcttctatgagtttgaaggccggaagtactgcgaacacgacttccaaatgctgtttgctccgtgctgtggatcctgcggtgagttcatcattggccgcgtcatcaaggccatgaacaacaactggcacccgggctgcttccgctgcgagctgtgtgatgtggagctggctgacctgggctttgtgaagaatgccggcaggcatctctgccggccttgccacaaccgtgagaaggccaanggcctgggcaagtacatctgccagcggtgccacctggtcatcgacgagcagcccctcatgttcaggagcgacgcctaccaccctgaccacttcaactgcacccactgtgggaaggagctgacagccgaggcccgcgagctgaagggtgagctctactgcctgccctgccatgacaagatgggcgtccccatctgcggggcctgccgccggcccatcgagggccgagtggtcaacgcgctgggcaagcagtggcacgtggaggtgagccaggctggtggacacgtggcctcaggttggggggtgccccagctcagggtcatgcactttgtctgtgccaagtgtgagaagccattcctggggcaccggcactatgagaagaagggcctggcctactgcgagactcactacaaccagctcttcggggacgtctgctacaactgcagccatgtgattgaaggcgatgtggtgtcggccctcaacaaggcctggtgtgtgagctgcttctcctgctccacctgcaacagcaagctcaccctgaagaacaagtttgtggagttcgacatgaagcccgtgtgtaagaggtgctacgagaagttcccgctggagctgaagaagcggctgaagaagctgtcggagctgacctcccgcaaggcccagcccaaggccacagacctcaactctgcctgaaggccctcttgcgcagctgcctctcggcccctccgccttctcccctcccgctgtccatgcttggccccctcgtccccatccacctgtgccctccgcatcttaccctccctttctctttcctcattgccttctcccttcctgttccctcatctctgccttccccatgtctctcctctccttggccgtggcttctgtctgtgaggaggcaggagctggggagtgggagcctatgaccccacgtctgacagccatgtccacctgtgcccacagcttccgcccacagacctccagggacaggagcaaattgcaccacagctccccgcctggcctggccctccccaggcggctcagtggctcatgctgtcctgtgagagcccctgccccagagcggccccactaagcgcatgtggctcctgggctacccacagccagggcagcctgctggagccacagggccagggccatgcagatggaggcctctgggagccacctccaatccctcaccactcactcaaccagtggcacagtgtccttgtgcccacactgagccagcaagtcctgctgtccacacccacaagctacctggagggacaggacccacctccatccttcggaaggccttcctggaatcccaccttggcctccgccctcggttccgccccgcccctctccccccgaccttggggcttgtgtcgagcccttgggtggggccaggaggaggtgatggcgtcagaggaggtgtggtcagaggtgacttgttcccacctccagggaggacgcttcgtcttcggccagcgcagacctggtgtttgtttgtttgttgggctcacgcttgcacaatgaaggcttgttcacacaa

SEQ ID NO: 282003 - DNA, 1267 bp, Homo sapiens
cagctgggccctgggaggcagggcctgggagatgcctgagaggggccgtggttggagggccaggctggctgcatgatggccctgggctggggtgtgactgcctgcagctactctgacagcctgctcggcccacagctcttcggggacgtctgctacaactgcagccatgtgattgaaggcgatgtggtgtcggccctcaacaaggcctggtgtgtgagctgcttctcctgctccacctgcaacagcaagctcaccctgaagaacaagtttgtggagttcgacatgaagcccgtgtgtaagaggtgctacgagaagttcccgctggagctgaagaagcggctgaagaagctgtcggagctgacctcccgcaaggcccagcccaaggccacagacctcaactctgcctgaaggccctcttgcgcagctgcctctcggcccctccgccttctcccctcccgctgtccatgcttggccccctcgtccccatccacctgtgccctccgcatcttaccctccctttctctttcctcattgccttctcccttcctgttccctcatctctgccttccccatgtctctcctctccttggccgtggcttctgtctgtgaggaggcaggagctggggagtgggagcctatgaccccacgtctgacagccatgtccacctgtgcccacagcttccgcccacagacctccagggacaggagcaaattgcaccacagctccccgcctggcctggccctccccaggcggctcagtggctcatgctgtcctgtgagagcccctgccccagagcggccccactaagcgcatgtggctcctgggctacccacagccagggcagcctgctggagccacagggccagggccatgcagatggaggcctctgggagccacctccaatccctcaccactcactcaaccagtggcacagtgtccttgtgcccacactgagccagcaagtcctgctgtccacacccacaagctacctggagggacaggacccacctccatccttcggaaggccttcctggaatcccaccttggcctccgccctcggttccgccccgcccctctccccccgaccttggggcttgtgtcgagcccttgggtggggccaggaggaggtgatggcgtcagaggaggtgtggtcagaggtgacttgttcccacctccagggaggacgcttcgtcttcggccagcgcagacctggtgtttgtttgtttgttgggctcacgcttgcacaatgaaggcttgttcacacaa

SEQ ID NO: 282004 - DNA, 1918 bp, Homo sapiens
  misc_feature (492)..(492): n is a, c, g, or t
cgggctggcgggcgggcgctcggctggcggctgcagcagcagagggagacccgcggcaaccccggcaacccagggctcggcgtcgctgccaccatgacgggaagcaatatgtcggacgccttggccaacgccgtgtgccagcgctgccaggcccgcttctcccccgccgagcgcattgtcaacagcaatggggagctgtaccatgagcactgcttcgtgtgtgcccagtgcttccggcccttccccgaggggctcttctatgagtttgaaggccggaagtactgcgaacacgacttccaaatgctgtttgctccgtgctgtggatcctgcggtgagttcatcattggccgcgtcatcaaggccatgaacaacaactggcacccgggctgcttccgctgcgagctgtgtgatgtggagctggctgacctgggctttgtgaagaatgccggcaggcatctctgccggccttgccacaaccgtgagaaggccaanggcctgggcaagtacatctgccagcggtgccacctggtcatcgacgagcagcccctcatgttcaggagcgacgcctaccaccctgaccacttcaactgcacccactgtgggaaggagctgacagccgaggcccgcgagctgaagggtgagctctactgcctgccctgccatgacaagatgggcgtccccatctgcggggcctgccgccggcccatcgagggccgagtggtcaacgcgctgggcaagcagtggcacgtggagcactttgtctgtgccaagtgtgagaagccattcctggggcaccggcactatgagaagaagggcctggcctactgcgagactcactacaaccagctcttcggggacgtctgctacaactgcagccatgtgattgaaggcgatgtggtgtcggccctcaacaaggcctggtgtgtgagctgcttctcctgctccacctgcaacagcaagctcaccctgaagaacaagtttgtggagttcgacatgaagcccgtgtgtaagaggtgctacgagaagttcccgctggagctgaagaagcggctgaagaagctgtcggagctgacctcccgcaaggcccagcccaaggccacagacctcaactctgcctgaaggccctcttgcgcagctgcctctcggcccctccgccttctcccctcccgctgtccatgcttggccccctcgtccccatccacctgtgccctccgcatcttaccctccctttctctttcctcattgccttctcccttcctgttccctcatctctgccttccccatgtctctcctctccttggccgtggcttctgtctgtgaggaggcaggagctggggagtgggagcctatgaccccacgtctgacagccatgtccacctgtgcccacagcttccgcccacagacctccagggacaggagcaaattgcaccacagctccccgcctggcctggccctccccaggcggctcagtggctcatgctgtcctgtgagagcccctgccccagagcggccggccagggccatgcagatggaggcctctgggagccacctccaatccctcaccactcactcaaccagtggcacagtgtccttgtgcccacactgagccagcaagtcctgctgtccacacccacaagctacctggagggacaggacccacctccatccttcggaaggccttcctggaatcccaccttggcctccgccctcggttccgccccgcccctctccccccgaccttggggcttgtgtcgagcccttgggtggggccaggaggaggtgatggcgtcagaggaggtgtggtcagaggtgacttgttcccacctccagggaggacgcttcgtcttcggccagcgcagacctggtgtttgtttgtttgttgggctcacgcttgcacaatgaaggcttgttcacacaa

SEQ ID NO: 282005 - DNA, 1038 bp, Homo sapiens
cagctgggccctgggaggcagggcctgggagatgcctgagaggggccgtggttggagggccaggctggctgcatgatggccctgggctggggtgtgactgcctgcagctactctgacagcctgctcggcccacagctcttcggggacgtctgctacaactgcagccatgtgattgaaggcgatgtggtgtcggccctcaacaaggcctggtgtgtgagctgcttctcctgctccacctgcaacagcaagctcaccctgaagaacaagtttgtggagttcgacatgaagcccgtgtgtaagaggtgctacgagaagttcccgctggagctgaagaagcggctgaagaagctgtcggagctgacctcccgcaaggcccagcccaaggccacagacctcaactctgcctgaaggccctcttgcgcagctgcctctcggcccctccgccttctcccctcccgctgtccatgcttggccccctcgtccccatccacctgtgccctccgcatcttacccctccccaggcggctcagtggctcatgctgtcctgtgagagcccctgccccagagcggccccactaagcgcatgtggctcctgggctacccacagccagggcagcctgctggagccacagggccagggccatgcagatggaggcctctgggagccacctccaatccctcaccactcactcaaccagtggcacagtgtccttgtgcccacactgagccagcaagtcctgctgtccacacccacaagctacctggagggacaggacccacctccatccttcggaaggccttcctggaatcccaccttggcctccgccctcggttccgccccgcccctctccccccgaccttggggcttgtgtcgagcccttgggtggggccaggaggaggtgatggcgtcagaggaggtgtggtcagaggtgacttgttcccacctccagggaggacgcttcgtcttcggccagcgcagacctggtgtttgtttgtttgttgggctcacgcttgcacaatgaaggcttgttcacacaa

SEQ ID NO: 282006 - DNA, 3546 bp, Homo sapiens
gccatggccgtccggcccggcctgtggccagcgctcctgggcatagtcctcgccgcttggctccgcggctcgggtgcccagcagagtgccaccgtggccaacccagtgcctggtgccaacccggacctgcttccccacttcctggtggagcccgaggatgtgtacatcgtcaagaacaagccagtgctgcttgtgtgcaaggccgtgcccgccacgcagatcttcttcaagtgcaacggggagtgggtgcgccaggtggaccacgtgatcgagcgcagcacagacgggagcagtgggctgcccaccatggaggtccgcattaatgtctcaaggcagcaggtcgagaaggtgttcgggctggaggaatactggtgccagtgcgtggcatggagctcctcgggcaccaccaagagtcagaaggcctacatccgcatagcctatttgcgcaagaacttcgagcaggagccgctggccaaggaggtgtccctggagcagggcatcgtgctgccctgccgtccaccggagggcatccctccagccgaggtggagtggctccggaacgaggacctggtggacccgtccctggaccccaatgtatacatcacgcgggagcacagcctggtggtgcgacaggcccgccttgctgacacggccaactacacctgcgtggccaagaacatcgtggcacgtcgccgcagcgcctccgctgctgtcatcgtctacgtggacggcagctggagcccgtggagcaagtggtcggcctgtgggctggactgcacccactggcggagccgtgagtgctctgacccagcaccccgcaacggaggggaggagtgccagggcactgacctggacacccgcaactgtaccagtgacctctgtgtacacactggcttctggccctgaggacgtggccctctatgtgggcctcatcgccgtggccgtctgcctggtcctgctgctgcttgtcctcatcctcgtttattgccggaagaaggaggggctggactcagatgtggctgactcgtccattctcacctcaggcttccagcccgtcagcatcaagcccagcaaagcagacaacccccatctgctcaccatccagccggacctcagcaccaccaccaccacctaccagggcagtctctgtccccggcaggatgggcccagccccaagttccagctcaccaatgggcacctgctcagccccctgggtggcggccgccacacactgcaccacagctctcccacctctgaggccgaggagttcgtctcccgcctctccacccagaactacttccgctccctgccccgaggcaccagcaacatgacctatgggaccttcaacttcctcgggggccggctgatgatccctaatacaggaatcagcctcctcatccccccagatgccataccccgagggaagatctatgagatctacctcacgctgcacaagccggaagacgtgaggttgcccctagctggctgtcagaccctgctgagtcccatcgttagctgtggaccccctggcgtcctgctcacccggccagtcatcctggctatggaccactgtggggagcccagccctgacagcttggagcctgcgcctcaaaaagcagtcgtgcgagggcagctgggaggatgtgctgcacctgggcgaggaggcgccctcccacctctactactgccagctggaggccagtgcctgctacgtcttcaccgagcagctgggccgctttgccctggtgggagaggccctcagcgtggctgccgccaagcgcctcaagctgcttctgtttgcgccggtggcctgcacctccctcgagtacaacatccgggtctactgcctgcatgacacccacgatgcactcaaggaggtggtgcagctggagaagcagctggggggacagctgatccaggagccacgggtcctgcacttcaaggacagttaccacaacctgcgcctatccatccacgatgtgcccagctccctgtggaagagtaagctccttgtcagctaccaggagatccccttttatcacatctggaatggcacgcagcggtacttgcactgcaccttcaccctggagcgtgtcagccccagcactagtgacctggcctgcaagctgtgggtgtggcaggtggagggcgacgggcagagcttcagcatcaacttcaacatcaccaaggacacaaggtttgctgagctgctggctctggagagtgaagcgggggtcccagccctggtgggccccagtgccttcaagatccccttcctcattcggcagaagataatttccagcctggacccaccctgtaggcggggtgccgactggcggactctggcccagaaactccacctggacagccatctcagcttctttgcctccaagcccagccccacagccatgatcctcaacctgtgggaggcgcggcacttccccaacggcaacctcagccagctggctgcagcagtggctggactgggccagccagacgctggcctcttcacagtgtcggaggctgagtgctgaggccggccaggcccgacacctacactctcaccagctttggcacccaccaaggacaggcagaagccggacaggggcccttccccacaccggggagagctgctcggacaggccccctcccggccgaagctgtcccttaatgctggtccttcagaccctgcccgaactcccacctctccatggcctgcctagccaggctggcactgccactcacactcggccccagggcccaggagggacagtgcctggagcctgggccaggcccagcccatctgtgtgtgtgtatgtgcgtgtgatgctacctctcctcccgtccctctccaggggccccgcatacacacggccatgcacgcacacactgggcctgggccagggccccagagctcctgcctgagctggaccttatgcaaacatttctgtgcctgctgggtaggggcacgtctgaggggccctgctccaagcctgcaggaccgagggccacagccggacagggggtagcccctggattcaggcacacgaccaccacacgagcacgtgccacgcatgcctcgtgtgctcatctcacacacacccccctcccgggtcacgcagacaccccccaaccacacacatctcatgccgtacacctgaggctgctcacgtctcacgcccagtgttggtgcacatttgcctctcacatgctgccctctccacccacccagggacaccccacggctcctccctgcccctgcccctcccccagccttgaggtgccctgcccggcggggcctgtgaatatgcaatgggagtcccaggctgtacagtggtgagtgtgtgtgtggcgtggcgtgcccgtccccagggctggctggtgccccacgcggggcctgtcatgtgaagctcgtgtcctgactttgtcttaagtgcattcacgcacttactcttggccttatgtacacagccttgcccggccgccggggcacataggggttttatcgggcgtgaatgtaaataaattatatatatatattgctaa

SEQ ID NO: 282007 - DNA, 3889 bp, Homo sapiens
ccagctggtacggctcggatacgggatgtacagcaggcaggtgcccagcagagtgccaccgtggccaacccagtgcctggtgccaacccggacctgcttccccacttcctggtggagcccgaggatgtgtacatcgtcaagaacaagccagtgctgcttgtgtgcaaggccgtgcccgccacgcagatcttcttcaagtgcaacggggagtgggtgcgccaggtggaccacgtgatcgagcgcagcacagacgggagcagtgagggagatagagagggttggcggccaatgtagcccaacagaaccctgggcaccaacacctcccaggaccagagcctctcccggccccagcggaggtgccagaggcctccctgcccagcagcagggcccaccttgtcttgctgggagggtctgcaggagaaccgcagggtcctcttctgccccgagcatccgactccagcctcccatggccggaacatctgaacgttcattgatctcatcgatttctcaacccaaagccatcgagtgctttgaggtgaagaaaaaggctttccttacccacggcagataccacggcagtggcgccacgccgccaaagaccaaagaccccaaaccagaaacgttctgtggtcagacagggctgcccaccatggaggtccgcattaatgtctcaaggcagcaggtcgagaaggtgttcgggctggaggaatactggtgccagtgcgtggcatggagctcctcgggcaccaccaagagtcagaaggcctacatccgcatagcctatttgcgcaagaacttcgagcaggagccgctggccaaggaggtgtccctggagcagggcatcgtgctgccctgccgtccaccggagggcatccctccagccgaggtggagtggctccggaacgaggacctggtggacccgtccctggaccccaatgtatacatcacgcgggagcacagcctggtggtgcgacaggcccgccttgctgacacggccaactacacctgcgtggccaagaacatcgtggcacgtcgccgcagcgcctccgctgctgtcatcgtctacgtggacggcagctggagcccgtggagcaagtggtcggcctgtgggctggactgcacccactggcggagccgtgagtgctctgacccagcaccccgcaacggaggggaggagtgccagggcactgacctggacacccgcaactgtaccagtgacctctgtgtacacactggcttctggccctgaggacgtggccctctatgtgggcctcatcgccgtggccgtctgcctggtcctgctgctgcttgtcctcatcctcgtttattgccggaagaaggaggggctggactcagatgtggctgactcgtccattctcacctcaggcttccagcccgtcagcatcaagcccagcaaagcagacaacccccatctgctcaccatccagccggacctcagcaccaccaccaccacctaccagggcagtctctgtccccggcaggatgggcccagccccaagttccagctcaccaatgggcacctgctcagccccctgggtggcggccgccacacactgcaccacagctctcccacctctgaggccgaggagttcgtctcccgcctctccacccagaactacttccgctccctgccccgaggcaccagcaacatgacctatgggaccttcaacttcctcgggggccggctgatgatccctaatacaggaatcagcctcctcatccccccagatgccataccccgagggaagatctatgagatctacctcacgctgcacaagccggaagacgtgaggttgcccctagctggctgtcagaccctgctgagtcccatcgttagctgtggaccccctggcgtcctgctcacccggccagtcatcctggctatggaccactgtggggagcccagccctgacagcttggagcctgcgcctcaaaaagcagtcgtgcgagggcagctgggaggatgtgctgcacctgggcgaggaggcgccctcccacctctactactgccagctggaggccagtgcctgctacgtcttcaccgagcagctgggccgctttgccctggtgggagaggccctcagcgtggctgccgccaagcgcctcaagctgcttctgtttgcgccggtggcctgcacctccctcgagtacaacatccgggtctactgcctgcatgacacccacgatgcactcaaggaggtggtgcagctggagaagcagctggggggacagctgatccaggagccacgggtcctgcacttcaaggacagttaccacaacctgcgcctatccatccacgatgtgcccagctccctgtggaagagtaagctccttgtcagctaccaggagatccccttttatcacatctggaatggcacgcagcggtacttgcactgcaccttcaccctggagcgtgtcagccccagcactagtgacctggcctgcaagctgtgggtgtggcaggtggagggcgacgggcagagcttcagcatcaacttcaacatcaccaaggacacaaggtttgctgagctgctggctctggagagtgaagcgggggtcccagccctggtgggccccagtgccttcaagatccccttcctcattcggcagaagataatttccagcctggacccaccctgtaggcggggtgccgactggcggactctggcccagaaactccacctggacagccatctcagcttctttgcctccaagcccagccccacagccatgatcctcaacctgtgggaggcgcggcacttccccaacggcaacctcagccagctggctgcagcagtggctggactgggccagccagacgctggcctcttcacagtgtcggaggctgagtgctgaggccggccaggcccgacacctacactctcaccagctttggcacccaccaaggacaggcagaagccggacaggggcccttccccacaccggggagagctgctcggacaggccccctcccggccgaagctgtcccttaatgctggtccttcagaccctgcccgaactcccacctctccatggcctgcctagccaggctggcactgccactcacactcggccccagggcccaggagggacagtgcctggagcctgggccaggcccagcccatctgtgtgtgtgtatgtgcgtgtgatgctacctctcctcccgtccctctccaggggccccgcatacacacggccatgcacgcacacactgggcctgggccagggccccagagctcctgcctgagctggaccttatgcaaacatttctgtgcctgctgggtaggggcacgtctgaggggccctgctccaagcctgcaggaccgagggccacagccggacagggggtagcccctggattcaggcacacgaccaccacacgagcacgtgccacgcatgcctcgtgtgctcatctcacacacacccccctcccgggtcacgcagacaccccccaaccacacacatctcatgccgtacacctgaggctgctcacgtctcacgcccagtgttggtgcacatttgcctctcacatgctgccctctccacccacccagggacaccccacggctcctccctgcccctgcccctcccccagccttgaggtgccctgcccggcggggcctgtgaatatgcaatgggagtcccaggctgtacagtggtgagtgtgtgtgtggcgtggcgtgcccgtccccagggctggctggtgccccacgcggggcctgtcatgtgaagctcgtgtcctgactttgtcttaagtgcattcacgcacttactcttggccttatgtacacagccttgcccggccgccggggcacataggggttttatcgggcgtgaatgtaaataaattatatatatatattgctaa

SEQ ID NO: 282008 - DNA, 3574 bp, Homo sapiens
gccatggccgtccggcccggcctgtggccagcgctcctgggcatagtcctcgccgcttggctccgcggctcgggtgcccagcagagtgccaccgtggccaacccagtgcctggtgccaacccggacctgcttccccacttcctggtggagcccgaggatgtgtacatcgtcaagaacaagccagtgctgcttgtgtgcaaggccgtgcccgccacgcagatcttcttcaagtgcaacggggagtgggtgcgccaggtggaccacgtgatcgagcgcagcacagacgggagcagtgggctgcccaccatggaggtccgcattaatgtctcaaggcagcaggtcgagaaggtgttcgggctggaggaatactggtgccagtgcgtggcatggagctcctcgggcaccaccaagagtcagaaggcctacatccgcatagcctatttgcgcaagaacttcgagcaggagccgctggccaaggaggtgtccctggagcagggcatcgtgctgccctgccgtccaccggagggcatccctccagccgaggtggagtggctccggaacgaggacctggtggacccgtccctggaccccaatgtatacatcacgcgggagcacagcctggtggtgcgacaggcccgccttgctgacacggccaactacacctgcgtggccaagaacatcgtggcacgtcgccgcagcgcctccgctgctgtcatcgtctacgtggacggcagctggagcccgtggagcaagtggtcggcctgtgggctggactgcacccactggcggagccgtgagtgctctgacccagcaccccgcaacggaggggaggagtgccagggcactgacctggacacccgcaactgtaccagtgacctctgtgtacacactggcttctggccctgaggacgtggccctctatgtgggcctcatcgccgtggccgtctgcctggtcctgctgctgcttgtcctcatcctcgtttattgccggaagaaggaggggctggactcagatgtggctgactcgtccattctcacctcaggcttccagcccgtcagcatcaagcccagcaaagcagacaacccccatctgctcaccatccagccggacctcagcaccaccaccaccacctaccagggcagtctctgtccccggcaggatgggcccagccccaagttccagctcaccaatgggcacctgctcagccccctgggtggcggccgccacacactgcaccacagctctcccacctctgaggccgaggagttcgtctcccgcctctccacccagaactacttccgctccctgccccgaggcaccagcaacatgacctatgggaccttcaacttcctcgggggccggctgatgatccctaatacaggaatcagcctcctcatccccccagatgccataccccgagggaagatctatgagatctacctcacgctgcacaagccggaagacgtgaggttgcccctagctggctgtcagaccctgctgagtcccatcgttagctgtggaccccctggcgtcctgctcacccggccagtcatcctggctatggaccactgtggggagcccagccctgacagcttggagcctgcgcctcaaaaagcagtcgtgcgagggcagctgggaggatgtgctgcacctgggcgaggaggcgccctcccacctctactactgccagctggaggccagtgcctgctacgtcttcaccgagcagctgggccgctttgccctggtgggagaggccctcagcgtggctgccgccaagcgcctcaagctgcttctgtttgcgccggtggcctgcacctccctcgagtacaacatccgggtctactgcctgcatgacacccacgatgcactcaaggaggtggtgcagctggagaagcagctggggggacagctgatccaggagccacgggtcctgcacttcaaggacagttaccacaacctgcgcctatccatccacgatgtgcccagctccctgtggaagagtaagctccttgtcagctaccaggagatccccttttatcacatctggaatggcacgcagcggtacttgcactgcaccttcaccctggagcgtgtcagccccagcactagtgacctggcctgcaagctgtgggtgtggcaggtggagggcgacgggcagagcttcagcatcaacttcaacatcaccaaggacacaaggtttgctgagctgctggctctggagagtgaagcgggggtcccagccctggtgggccccagtgccttcaagatccccttcctcattcggcagaagataatttccagcctggacccaccctgtaggcggggtgccgactggcggactctggcccagaaactccacctggacagccatctcagcttctttgcctccaagcccagccccacagccatgatcctcaacctgtgggaggcgcggcacttccccaacggcaacctcagccagctggctgcagcagtggctggactgggccagccagacgctggcctcttcacagtgtcggaggctgagtgctgaggccggccaggcccgacacctacactctcaccagctttggcacccaccaaggacaggcagaagccggacaggggcccttccccacaccggggagagctgctcggacaggccccctcccggccgaagctgtcccttaatgctggtccttcagaccctgcccgaactcccacctctccatggcctgcctagccaggctggcactgccactcacactcggccccagggcccaggagggacagtgcctggagcctgggccaggcccagcccatctgtgtgtgtgtatgtgcgtgtgatgctacctctcctcccgtccctctccaggggccccgcatacacacggccatgcacgcacacactgggcctgggccagggccccagagctcctgcctgagctggaccttatgcaaacatttctgtgcctgctgggtaggggcacgtctgaggggccctgctccaagcctgcaggaccgagggccacagccggacagggggtagcccctggattcaggcacacgaccaccacacgagcacgtgccacgcatgcctcgtgtgctcatctcacacacacccccctcccgggtcacgcagacaccccccaaccacacacatctcatgccgtacacctgaggctgctcacgtctcacgcccagtgttggtgcacatttgcctctcacatgctgccctctccacccacccagggacaccccacggctcctccctgcccctgcccctcccccagccttgaggtgccctgcccggcggggcctgtgaatatgcaatgggagtcccaggctgtacagtggtgagtgtgtgtgtggcgtggcgtgcccgtccccagggctggctggtgccccacgcggggcctgtcatgtgaagctcgtgtcctgactttgtcttaagtgcattcacgcacttactcttggccttatgtacacagccttgcccggccgccggggcacataggggttttatcgggcgtgaatgtaaataaattatatatatatattgctaaaaaaaaaaaaaaacgggcgccgctccga

SEQ ID NO: 282009 - DNA, 418 bp, Homo sapiens
gtcctgctcacccggccagtcatcctggctatggaccactgtggggagcccagccctgacagcttggagcctgcgcctcaaaaagcagtcgtgcgagggcagctgggaggtgagcagggaactgacccgggctccagaagggaacgtgggctaactgcacgctccacccggccttccaccgctgggtggtcctgagccgcacccccacccctccccagtctccggccacttcttgaagccacagctggccctagggctctgaggctgggccgaattgacccactgacccctgcccacaggatgtgctgcacctgggcgaggaggcgccctcccacctctactactgccagctggaggccagtgcctgctacgtcttcaccgagcagctgggccgctttgccctggtgggagaggccct

SEQ ID NO: 282010 - DNA, 306 bp, Homo sapiens
tgcaccacagctctcccacctctgaggccgaggagttcgtctcccgcctctccacccagaactacttccgctccctgccccgaggcaccagcaacatgacctatgggaccttcaacttcctcgggggccggctgatgatccctaatacaggtaggaaggaccccagggggctctgagagctccacttccctcctggaggaggacgggacagccggacgttcctctcgtgcccctcggtgtcccgtgacagatcagcaaggaaagggggtggagttttggggagaacccagtcttggctggcaccga

SEQ ID NO: 282011 - DNA, 3681 bp, Homo sapiens
ccagctggtacggctcggatacgggatgtacagcaggcaggtgcccagcagagtgccaccgtggccaacccagtgcctggtgccaacccggacctgcttccccacttcctggtggagcccgaggatgtgtacatcgtcaagaacaagccagtgctgcttgtgtgcaaggccgtgcccgccacgcagatcttcttcaagtgcaacggggagtgggtgcgccaggtggaccacgtgatcgagcgcagcacagacgggagcagtgggctgcccaccatggaggtccgcattaatgtctcaaggcagcaggtcgagaaggtgttcgggctggaggaatactggtgccagtgcgtggcatggagctcctcgggcaccaccaagagtcagaaggcctacatccgcatagcctatttgcgcaagaacttcgagcaggagccgctggccaaggaggtgtccctggagcagggcatcgtgctgccctgccgtccaccggagggcatccctccagccgaggtggagtggctccggaacgaggacctggtggacccgtccctggaccccaatgtatacatcacgcgggagcacagcctggtggtgcgacaggcccgccttgctgacacggccaactacacctgcgtggccaagaacatcgtggcacgtcgccgcagcgcctccgctgctgtcatcgtctacgtgaacggtgggtggtcgacgtggaccgagtggtccgtctgcagcgccagctgtgggcgcggctggcagaaacggagccggagctgcaccaacccggcgcctctcaacgggggcgctttctgtgaggggcagaatgtccagaaaacagcctgcgccaccctgtgcccagtggacggcagctggagcccgtggagcaagtggtcggcctgtgggctggactgcacccactggcggagccgtgagtgctctgacccagcaccccgcaacggaggggaggagtgccagggcactgacctggacacccgcaactgtaccagtgacctctgtgtacacactggcttctggccctgaggacgtggccctctatgtgggcctcatcgccgtggccgtctgcctggtcctgctgctgcttgtcctcatcctcgtttattgccggaagaaggaggggctggactcagatgtggctgactcgtccattctcacctcaggcttccagcccgtcagcatcaagcccagcaaagcagacaacccccatctgctcaccatccagccggacctcagcaccaccaccaccacctaccagggcagtctctgtccccggcaggatgggcccagccccaagttccagctcaccaatgggcacctgctcagccccctgggtggcggccgccacacactgcaccacagctctcccacctctgaggccgaggagttcgtctcccgcctctccacccagaactacttccgctccctgccccgaggcaccagcaacatgacctatgggaccttcaacttcctcgggggccggctgatgatccctaatacaggaatcagcctcctcatccccccagatgccataccccgagggaagatctatgagatctacctcacgctgcacaagccggaagacgtgaggttgcccctagctggctgtcagaccctgctgagtcccatcgttagctgtggaccccctggcgtcctgctcacccggccagtcatcctggctatggaccactgtggggagcccagccctgacagcttggagcctgcgcctcaaaaagcagtcgtgcgagggcagctgggaggatgtgctgcacctgggcgaggaggcgccctcccacctctactactgccagctggaggccagtgcctgctacgtcttcaccgagcagctgggccgctttgccctggtgggagaggccctcagcgtggctgccgccaagcgcctcaagctgcttctgtttgcgccggtggcctgcacctccctcgagtacaacatccgggtctactgcctgcatgacacccacgatgcactcaaggaggtggtgcagctggagaagcagctggggggacagctgatccaggagccacgggtcctgcacttcaaggacagttaccacaacctgcgcctatccatccacgatgtgcccagctccctgtggaagagtaagctccttgtcagctaccaggagatccccttttatcacatctggaatggcacgcagcggtacttgcactgcaccttcaccctggagcgtgtcagccccagcactagtgacctggcctgcaagctgtgggtgtggcaggtggagggcgacgggcagagcttcagcatcaacttcaacatcaccaaggacacaaggtttgctgagctgctggctctggagagtgaagcgggggtcccagccctggtgggccccagtgccttcaagatccccttcctcattcggcagaagataatttccagcctggacccaccctgtaggcggggtgccgactggcggactctggcccagaaactccacctggacagccatctcagcttctttgcctccaagcccagccccacagccatgatcctcaacctgtgggaggcgcggcacttccccaacggcaacctcagccagctggctgcagcagtggctggactgggccagccagacgctggcctcttcacagtgtcggaggctgagtgctgaggccggccaggcccgacacctacactctcaccagctttggcacccaccaaggacaggcagaagccggacaggggcccttccccacaccggggagagctgctcggacaggccccctcccggccgaagctgtcccttaatgctggtccttcagaccctgcccgaactcccacctctccatggcctgcctagccaggctggcactgccactcacactcggccccagggcccaggagggacagtgcctggagcctgggccaggcccagcccatctgtgtgtgtgtatgtgcgtgtgatgctacctctcctcccgtccctctccaggggccccgcatacacacggccatgcacgcacacactgggcctgggccagggccccagagctcctgcctgagctggaccttatgcaaacatttctgtgcctgctgggtaggggcacgtctgaggggccctgctccaagcctgcaggaccgagggccacagccggacagggggtagcccctggattcaggcacacgaccaccacacgagcacgtgccacgcatgcctcgtgtgctcatctcacacacacccccctcccgggtcacgcagacaccccccaaccacacacatctcatgccgtacacctgaggctgctcacgtctcacgcccagtgttggtgcacatttgcctctcacatgctgccctctccacccacccagggacaccccacggctcctccctgcccctgcccctcccccagccttgaggtgccctgcccggcggggcctgtgaatatgcaatgggagtcccaggctgtacagtggtgagtgtgtgtgtggcgtggcgtgcccgtccccagggctggctggtgccccacgcggggcctgtcatgtgaagctcgtgtcctgactttgtcttaagtgcattcacgcacttactcttggccttatgtacacagccttgcccggccgccggggcacataggggttttatcgggcgtgaatgtaaataaattatatatatatattgctaa

SEQ ID NO: 282012 - DNA, 2144 bp, Homo sapiens
gccatggccgtccggcccggcctgtggccagcgctcctgggcatagtcctcgccgcttggctccgcggctcgggtgcccagcagagtgccaccgtggccaacccagtgcctggtgccaacccggacctgcttccccacttcctggtggagcccgaggatgtgtacatcgtcaagaacaagccagtgctgcttgtgtgcaaggccgtgcccgccacgcagatcttcttcaagtgcaacggggagtgggtgcgccaggtggaccacgtgatcgagcgcagcacagacgggagcagtgggctgcccaccatggaggtccgcattaatgtctcaaggcagcaggtcgagaaggtgttcgggctggaggaatactggtgccagtgcgtggcatggagctcctcgggcaccaccaagagtcagaaggcctacatccgcatagcctatttgcgcaagaacttcgagcaggagccgctggccaaggaggtgtccctggagcagggcatcgtgctgccctgccgtccaccggagggcatccctccagccgaggtggagtggctccggaacgaggacctggtggacccgtccctggaccccaatgtatacatcacgcgggagcacagcctggtggtgcgacaggcccgccttgctgacacggccaactacacctgcgtggccaagaacatcgtggcacgtcgccgcagcgcctccgctgctgtcatcgtctacgtggacggcagctggagcccgtggagcaagtggtcggcctgtgggctggactgcacccactggcggagccgtgagtgctctgacccagcaccccgcaacggaggggaggagtgccagggcactgacctggacacccgcaactgtaccagtgacctctgtgtacacactggcttctggccctgaggacgtggccctctatgtgggcctcatcgccgtggccgtctgcctggtcctgctgctgcttgtcctcatcctcgtttattgccggaagaaggaggggctggactcagatgtggctgactcgtccattctcacctcaggcttccagcccgtcagcatcaagcccagcaaagcagacaacccccatctgctcaccatccagccggacctcagcaccaccaccaccacctaccagggcagtctctgtccccggcaggatgggcccagccccaagttccagctcaccaatgggcacctgctcagccccctgggtggcggccgccacacactgcaccacagctctcccacctctgaggccgaggagttcgtctcccgcctctccacccagaactacttccgctccctgccccgaggcaccagcaacatgacctatgggaccttcaacttcctcgggggccggctgatgatccctaatacaggaatcagcctcctcatccccccagatgccataccccgagggaagatctatgagatctacctcacgctgcacaagccggaagacgtgaggttgcccctagctggctgtcagaccctgctgagtcccatcgttagctgtggaccccctggcgtcctgctcacccggccagtcatcctggctatggaccactgtggggagcccagccctgacagcttggagcctgcgcctcaaaaagcagtcgtgcgagggcagctgggaggatgtgctgcacctgggcgaggaggcgccctcccacctctactactgccagctggaggccagtgcctgctacgtcttcaccgagcagctgggccgctttgccctggtgggagaggccctcagcgtggctgccgccaagcgcctcaagctgcttctgtttgcgccggtggcctgcacctccctcgagtacaacatccgggtctactgcctgcatgacacccacgatgcactcaaggaggtggtgcagctggagaagcagctggggggacagctgatccaggagccacgggtcctgcacttcaaggacagttaccacaacctgcgcctatccatccacgatgtgcccagctccctgtggaagagtaagctccttgtcagctaccaggagatccccttttatcacatctggaatggcacgcagcggtacttgcactgcaccacagctctcccacctctgaggccgaggagttcgtctcccgcctctccacccagaactacttccgcc

SEQ ID NO: 282013 - DNA, 1205 bp, Homo sapiens
tgcgctgggactgatactgtggtcctggtcaccagagccaaaatagggggaaagctggcttggaaaaagcaggcaaccaagggtacacaccgttagccaatatttgcaaggctgttggcagattagatatatctgtactcaaacactgcaatctgatttctctgtcaaaagtacacttaacatttttgtcccattacttaaatctagtggattttctactcagcatcaggaaaaggaaacgccaagacatagaaaaccacgcttttcccgtaggaagaaccgatgatgagccctgatgaaagaaggaagaagacccgctgtctgcgaaggcctaaaggttagaaatacagcaatttttctcatgccgaaggaaaggcaaaatggtctaagaaactgcaagagtgtgatacaagttttcctcaacagcgagctgggactggcgacaatttcttaactcacagcctccgcagtcgccttagtcgacaaagagagcagcccacgcagcggccgccgcgcccgtgcccgtggcctttacttgcttttgccctgaagttcagtgtagtggtttgtttggggcttgcaggaagaaacaaacacactccctctgactctccacaacccatctttgccttctgcaaccgcttctcctgcccatcgctggttttggggtaggctctttgtctgcctgaggccccgcactcgcagggcaagaagcttaaaggaatccaactccaaactcctccgaagttaaatattgaccagaacctctttcaacaggccgcggttgccaggaaccgtggagggccaactcctcccaaccgccctggtgcaaagtcccacgcggcgaagagttttggagcagcgcttacctagaaagatgtttaaattctgaaccaggaattgtctccaactccaggcgctcagggaatcgccttttccggtgtccaggcgctctgcagacaaataaacagcagaaggtgaatggcggctgcgagggaagggagttggaggccgggagtgggaagcgaggctcatgcgggcgccaaggtggccctgggggtgacgcgaacatcagggagtcaccagggcactcgtccgtgtggcgcactcattgctcgaaatgttccagtctacaaatggtccgaagatggtgatttatttttgtaaaataaatacatactccatctccacacccataaaaaatc

SEQ ID NO: 282014 - DNA, 1119 bp, Homo sapiens
cctcccccaaacaggcatgtaatttatggatcttttacaaggtaataaaccacagtaattacctccctgcatcccaaactaagaggacaaattaagtcagaacttgaaaataatttaaaagagttttcccttgtttcaaataggaaaaggaaacgccaagacatagaaaaccacgcttttcccgtaggaagaaccgatgatgagccctgatgaaagaaggaagaagacccgctgtctgcgaaggcctaaaggttagaaatacagcaatttttctcatgccgaaggaaaggcaaaatggtctaagaaactgcaagagtgtgatacaagttttcctcaacagcgagctgggactggcgacaatttcttaactcacagcctccgcagtcgccttagtcgacaaagagagcagcccacgcagcggccgccgcgcccgtgcccgtggcctttacttgcttttgccctgaagttcagtgtagtggtttgtttggggcttgcaggaagaaacaaacacactccctctgactctccacaacccatctttgccttctgcaaccgcttctcctgcccatcgctggttttggggtaggctctttgtctgcctgaggccccgcactcgcagggcaagaagcttaaaggaatccaactccaaactcctccgaagttaaatattgaccagaacctctttcaacaggccgcggttgccaggaaccgtggagggccaactcctcccaaccgccctggtgcaaagtcccacgcggcgaagagttttggagcagcgcttacctagaaagatgtttaaattctgaaccaggaattgtctccaactccaggcgctcagggaatcgccttttccggtgtccaggcgctctgcagacaaataaacagcagaaggtgaatggcggctgcgagggaagggagttggaggccgggagtgggaagcgaggctcatgcgggcgccaaggtggccctgggggtgacgcgaacatcagggagtcaccagggcactcgtccgtgtggcgcactcattgctcgaaatgttccagtctacaaatggtccgaagatggtgatttatttttgtaaaataaatacatactccatctccacacccataaaaaatc

SEQ ID NO: 282015 - DNA, 1469 bp, Homo sapiens
tttgagggtgattaggcctgtttttattctgccacatttcagtaaggggaggatgtcactgtttcattagaagagctgtgctaaaaagatagacagtggagctcaggttgtttctgcacagaggtcctaactccaagagtggagcaagaagagattccaactgcactagaccctacttgcccttgagaagtccagagggactcccagcaggtctctggtgttttccagcctcagaggcctatcacctccctaagttgcaaagactatgaaaacctttttggtgggcagtggtgtgggagcagtgaattccagacatgctccatcgctcctaggctgtgctggatgtcgtgggcagtagcttggggaccaggagccaggccagaggaccctcttccagaaggcactcctttacctgagctggagctgctggttttctgctttgtgttttgtcgagactctttcatccaggggaagatttgtttggccactgtgggaaaaggaaacgccaagacatagaaaaccacgcttttcccgtaggaagaaccgatgatgagccctgatgaaagaaggaagaagacccgctgtctgcgaaggcctaaaggttagaaatacagcaatttttctcatgccgaaggaaaggcaaaatggtctaagaaactgcaagagtgtgatacaagttttcctcaacagcgagctgggactggcgacaatttcttaactcacagcctccgcagtcgccttagtcgacaaagagagcagcccacgcagcggccgccgcgcccgtgcccgtggcctttacttgcttttgccctgaagttcagtgtagtggtttgtttggggcttgcaggaagaaacaaacacactccctctgactctccacaacccatctttgccttctgcaaccgcttctcctgcccatcgctggttttggggtaggctctttgtctgcctgaggccccgcactcgcagggcaagaagcttaaaggaatccaactccaaactcctccgaagttaaatattgaccagaacctctttcaacaggccgcggttgccaggaaccgtggagggccaactcctcccaaccgccctggtgcaaagtcccacgcggcgaagagttttggagcagcgcttacctagaaagatgtttaaattctgaaccaggaattgtctccaactccaggcgctcagggaatcgccttttccggtgtccaggcgctctgcagacaaataaacagcagaaggtgaatggcggctgcgagggaagggagttggaggccgggagtgggaagcgaggctcatgcgggcgccaaggtggccctgggggtgacgcgaacatcagggagtcaccagggcactcgtccgtgtggcgcactcattgctcgaaatgttccagtctacaaatggtccgaagatggtgatttatttttgtaaaataaatacatactccatctccacacccataaaaaatc

SEQ ID NO: 282016 - DNA, 1034 bp, Homo sapiens
ccggagataagcgctagtgcggcgccgggctctgcctgggctagtggcaccgacttgggaaaaggaaacgccaagacatagaaaaccacgcttttcccgtaggaagaaccgatgatgagccctgatgaaagaaggaagaagacccgctgtctgcgaaggcctaaaggttagaaatacagcaatttttctcatgccgaaggaaaggcaaaatggtctaagaaactgcaagagtgtgatacaagttttcctcaacagcgagctgggactggcgacaatttcttaactcacagcctccgcagtcgccttagtcgacaaagagagcagcccacgcagcggccgccgcgcccgtgcccgtggcctttacttgcttttgccctgaagttcagtgtagtggtttgtttggggcttgcaggaagaaacaaacacactccctctgactctccacaacccatctttgccttctgcaaccgcttctcctgcccatcgctggttttggggtaggctctttgtctgcctgaggccccgcactcgcagggcaagaagcttaaaggaatccaactccaaactcctccgaagttaaatattgaccagaacctctttcaacaggccgcggttgccaggaaccgtggagggccaactcctcccaaccgccctggtgcaaagtcccacgcggcgaagagttttggagcagcgcttacctagaaagatgtttaaattctgaaccaggaattgtctccaactccaggcgctcagggaatcgccttttccggtgtccaggcgctctgcagacaaataaacagcagaaggtgaatggcggctgcgagggaagggagttggaggccgggagtgggaagcgaggctcatgcgggcgccaaggtggccctgggggtgacgcgaacatcagggagtcaccagggcactcgtccgtgtggcgcactcattgctcgaaatgttccagtctacaaatggtccgaagatggtgatttatttttgtaaaataaatacatactccatctccacacccataaaaaatc

SEQ ID NO: 282017 - DNA, 1236 bp, Homo sapiens
gggaaacggagtgcggggcggagaagagagaaaaggaaggaaggaaagggcaggaagaacctaaaaaaaaaaaaaaaaaaaagcaaccaaagaaaaaaggctgtgctggatgtcgtgggcagtagcttggggaccaggagccaggccagaggaccctcttccagaaggcactcctttacctgagctggagctgctggttttctgctttgtgttttgtcgagactctttcatccaggggaagatttgtttggccactgtgggaaaaggaaacgccaagacatagaaaaccacgcttttcccgtaggaagaaccgatgatgagccctgatgaaagaaggaagaagacccgctgtctgcgaaggcctaaaggttagaaatacagcaatttttctcatgccgaaggaaaggcaaaatggtctaagaaactgcaagagtgtgatacaagttttcctcaacagcgagctgggactggcgacaatttcttaactcacagcctccgcagtcgccttagtcgacaaagagagcagcccacgcagcggccgccgcgcccgtgcccgtggcctttacttgcttttgccctgaagttcagtgtagtggtttgtttggggcttgcaggaagaaacaaacacactccctctgactctccacaacccatctttgccttctgcaaccgcttctcctgcccatcgctggttttggggtaggctctttgtctgcctgaggccccgcactcgcagggcaagaagcttaaaggaatccaactccaaactcctccgaagttaaatattgaccagaacctctttcaacaggccgcggttgccaggaaccgtggagggccaactcctcccaaccgccctggtgcaaagtcccacgcggcgaagagttttggagcagcgcttacctagaaagatgtttaaattctgaaccaggaattgtctccaactccaggcgctcagggaatcgccttttccggtgtccaggcgctctgcagacaaataaacagcagaaggtgaatggcggctgcgagggaagggagttggaggccgggagtgggaagcgaggctcatgcgggcgccaaggtggccctgggggtgacgcgaacatcagggagtcaccagggcactcgtccgtgtggcgcactcattgctcgaaatgttccagtctacaaatggtccgaagatggtgatttatttttgtaaaataaatacatactccatctccacacccataaaaaatc

SEQ ID NO: 282018 - DNA, 1143 bp, Homo sapiens
caaaaatccgttcggcggcattttctcttcaaacccgcccggtcggatgtggcatttgaagaaagaaggcgtgggtcaataatcaacccgcactttctcctccaaactgctgacgcgactctcaccgccttctcagctaagccagctgccgggaaggccagctctccgaaaaggaaacgccaagacatagaaaaccacgcttttcccgtaggaagaaccgatgatgagccctgatgaaagaaggaagaagacccgctgtctgcgaaggcctaaaggttagaaatacagcaatttttctcatgccgaaggaaaggcaaaatggtctaagaaactgcaagagtgtgatacaagttttcctcaacagcgagctgggactggcgacaatttcttaactcacagcctccgcagtcgccttagtcgacaaagagagcagcccacgcagcggccgccgcgcccgtgcccgtggcctttacttgcttttgccctgaagttcagtgtagtggtttgtttggggcttgcaggaagaaacaaacacactccctctgactctccacaacccatctttgccttctgcaaccgcttctcctgcccatcgctggttttggggtaggctctttgtctgcctgaggccccgcactcgcagggcaagaagcttaaaggaatccaactccaaactcctccgaagttaaatattgaccagaacctctttcaacaggccgcggttgccaggaaccgtggagggccaactcctcccaaccgccctggtgcaaagtcccacgcggcgaagagttttggagcagcgcttacctagaaagatgtttaaattctgaaccaggaattgtctccaactccaggcgctcagggaatcgccttttccggtgtccaggcgctctgcagacaaataaacagcagaaggtgaatggcggctgcgagggaagggagttggaggccgggagtgggaagcgaggctcatgcgggcgccaaggtggccctgggggtgacgcgaacatcagggagtcaccagggcactcgtccgtgtggcgcactcattgctcgaaatgttccagtctacaaatggtccgaagatggtgatttatttttgtaaaataaatacatactccatctccacacccataaaaaatc

SEQ ID NO: 282019 - DNA, 1720 bp, Homo sapiens
tgcgctgggactgatactgtggtcctggtcaccagagccaaaatagggggaaagctggcttggaaaaagcaggcaaccaagggtacacaccgttagccaatatttgcaaggctgttggcagattagatatatctgtactcaaacactgcaatctgatttctctgtcaaaagtacacttaacatttttgtcccattacttaaatctagtggattttctactcagcatcaggaaaaggaaacgccaagacatagaaaaccacgcttttcccgtaggaagaaccgatgatgagccctgatgaaagaaggaagaagacccgctgtctgcgaaggcctaaaggttagaaatacagcaatttttctcatgccgaaggaaaggcaaaatggtctaagaaactgcaagagtgtgatacaagttttcctcaacagcgagctgggactggcgacaatttcttaactcacagcctccgcagtcgccttagtcgacaaagagagcagcccacgcagcggccgccgcgcccgtgcccgtggcctttacttgcttttgccctgaagttcagtgtagtggtttgtttggggcttgcaggaagaaacaaacacactccctctgactctccacaacccatctttgccttctgcaaccgcttctcctgcccatcgctggttttggggtaggctctttgtctgcctgaggccccgcactcgcagggcaagaagcttaaaggaatccaactccaaactcctccgaagttaaatattgaccagaacctctttcaacaggccgcggttgccaggaaccgtggagggccaactcctcccaaccgccctggtgcaaagtcccacgcggcgaagagttttggagcagcgcttacctagaaagatgtttaaattctgaaccaggaattgtctccaactccaggcgctcagggaatcgccttttccggtgtccaggcgctctgcagacaaataaacagcagaagcaaatggtcaccgagccggcagtcagctttctgggagtgggagatgatggggaaagaggaaagaatcgtccgctcgccggaccctggcttggagaagttctgcgctccgctgggactctgcgggccctttgcgtctacagacctatccctgccccgactaccccttcactcagacccagggaaggacacgtttctatgccttacagagacttgaagcctgaaagcctggccaagtttgggaagaagaggagccctctcagagctcaagagccttcctactctttggaacttttccacagtaggccaagcttgacaagagttcagctcaagttgaacatacatacacacactctcacacacaaattatgtgagccgtcagaatccaagtgaatccagctcaagctatctacaaggtttttacatgcaaggtcaagtatctcaatccagaggacttttgttttcttaatgaaaagcttagaaaacacatgaatcttagatttttaatgttttttaaatggagtttattcttagcacatggctttctatgtagccacatcacaatttgtacagttccacataagtctaaatgcactcccctctccccaaagaccgtgccccagaaggtgacaacagtatctctgtaacagtgtcttaaataaatgcaagtaagaaaaactaacatgtcacacctaccatcaaggtctacacatcttaagaattaaataatcttgtgaggtccacaa

SEQ ID NO: 282020 - DNA, 1194 bp, Homo sapiens
cctcccccaaacaggcatgtaatttatggatcttttacaaggtaataaaccacagtaattacctccctgcatcccaaactaagaggacaaattaagtcagaacttgaaaataatttaaaagagttttcccttgtttcaaataggaaaaggaaacgccaagacatagaaaaccacgcttttcccgtaggaagaaccgatgatgagccctgatgaaagaaggaagaagacccgctgtctgcgaaggcctaaaggccgcggttgccaggaaccgtggagggccaactcctcccaaccgccctggtgcaaagtcccacgcggcgaagagttttggagcagcgcttacctagaaagatgtttaaattctgaaccaggaattgtctccaactccaggcgctcagggaatcgccttttccggtgtccaggcgctctgcagacaaataaacagcagaagcaaatggtcaccgagccggcagtcagctttctgggagtgggagatgatggggaaagaggaaagaatcgtccgctcgccggaccctggcttggagaagttctgcgctccgctgggactctgcgggccctttgcgtctacagacctatccctgccccgactaccccttcactcagacccagggaaggacacgtttctatgccttacagagacttgaagcctgaaagcctggccaagtttgggaagaagaggagccctctcagagctcaagagccttcctactctttggaacttttccacagtaggccaagcttgacaagagttcagctcaagttgaacatacatacacacactctcacacacaaattatgtgagccgtcagaatccaagtgaatccagctcaagctatctacaaggtttttacatgcaaggtcaagtatctcaatccagaggacttttgttttcttaatgaaaagcttagaaaacacatgaatcttagatttttaatgttttttaaatggagtttattcttagcacatggctttctatgtagccacatcacaatttgtacagttccacataagtctaaatgcactcccctctccccaaagaccgtgccccagaaggtgacaacagtatctctgtaacagtgtcttaaataaatgcaagtaagaaaaactaacatgtcacacctaccatcaaggtctacacatcttaagaattaaataatcttgtgaggtccacaa

SEQ ID NO: 282021 - DNA, 649 bp, Homo sapiens
tgcgctgggactgatactgtggtcctggtcaccagagccaaaatagggggaaagctggcttggaaaaagcaggcaaccaagggtacacaccgttagccaatatttgcaaggctgttggcagattagatatatctgtactcaaacactgcaatctgatttctctgtcaaaagtacacttaacatttttgtcccattacttaaatctagtggattttctactcagcatcaggaaaaggaaacgccaagacatagaaaaccacgcttttcccgtaggaagaaccgatgatgagccctgatgaaagaaggaagaagacccgctgtctgcgaaggcctaaaggttagaaatacagcaatttttctcatgccgaaggaaaggcaaaatggtctaagaaactgcaagagtgtgatacaagttttcctcaacagcgagctgggactggcgacaatttcttaactcacagcctccgcagtcgccttagtcgacaaagagagcagccctgggggtgacgcgaacatcagggagtcaccagggcactcgtccgtgtggcgcactcattgctcgaaatgttccagtctacaaatggtccgaagatggtgatttatttttgtaaaataaatacatactccatctccacacccataaaaaatc

SEQ ID NO: 282022 - DNA, 1590 bp, Homo sapiens
tgcgctgggactgatactgtggtcctggtcaccagagccaaaatagggggaaagctggcttggaaaaagcaggcaaccaagggtacacaccgttagccaatatttgcaaggctgttggcagattagatatatctgtactcaaacactgcaatctgatttctctgtcaaaagtacacttaacatttttgtcccattacttaaatctagtggattttctactcagcatcaggaaaaggaaacgccaagacatagaaaaccacgcttttcccgtaggaagaaccgatgatgagccctgatgaaagaaggaagaagacccgctgtctgcgaaggcctaaaggttagaaatacagcaatttttctcatgccgaaggaaaggcaaaatggtctaagaaactgcaagagtgtgatacaagttttcctcaacagcgagctgggactggcgacaatttcttaactcacagcctccgcagtcgccttagtcgacaaagagagcagcccacgcagcggccgccgcgcccgtgcccgtggcctttacttgcttttgccctgaagttcagtgtagtggtttgtttggggcttgcaggaagaaacaaacacactccctctgactctccacaacccatctttgccttctgcaaccgcttctcctgcccatcgctggttttggggtaggctctttgtctgcctgaggccccgcactcgcagggcaagaagcttaaaggaatccaactccaaactcctccgaagttaaatattgaccagaacctctttcaacaggccgcggttgccaggaaccgtggagggccaactcctcccaaccgccctggtgcaaagtcccacgcggcgaagagttttggagcagcgcttacctagaaagatgtttaaattctgaaccaggaattgtctccaactccaggcgctcagggaatcgccttttccggtgtccaggcgctctgcagacaaataaacagcagaagcaaatggtcaccgagccggcagtcagctttctgggagtgggagatgatggggaaagaggaaagaatcgtccgctcgccggaccctggcttggagaagttctgcgctccgctgggactctgcgggccctttgcgtctacagacctatccctgccccgactaccccttcactcagacccagccttccccagcgtgaatcagaacattaccaactgtctgcgcatccgtcccacttcatcaccaaagccaggatgtgaccgcagaaaacccaagcccgaactcacgtttccccggacgcggcgcgcatccctggactcgcagaaaccctgcggaaaaggccccaagatctggtgagggcctgccagctccgtcctccctgccgagggctctctcctgccttcctgaaggagttaaaagcctttggagataaatctgagggtgtgtgttttaaaaatcaaatgagcgagagtcccccagactgttctctatctgatgcatgtctctagagctgaacagtggaatggcagaatttcaaaacgcctgatggtggcatttgaaggcttccccaccacctacactagacacaagatttgagaggaacaacactttaccagc

SEQ ID NO: 282023 - DNA, 368 bp, Homo sapiens
acgcggcgcgcatccctggactcgcagaaaccctgcggaaaaggccccaagatctggtgagggcctgccagctccgtcctccctgccgagggctctctcctgccttcctgaaggagttaaaagcctttggagataaatctgagggtgtgtgttttaaaaatcaaatggtaagttggaatctcacttctgagagattcattcctagtgaggccctgacgactccgatccattcctgacgatctgcattaattatttaatgagtcacgtgacctcaaagattacaatttcaatatctcccttgcacaggcgctacacctttatcagctgcaaccagggtcctttttttggctctgccggcctccggggca

SEQ ID NO: 282024 - DNA, 2749 bp, Homo sapiens
caatccctccctccggcgggcgtcgctggcgggtggctaggcccaacggcaggaagccgacgctatcctccgttccgcggcgccgggtccgccttccgtctgttctagggcctgctcctgcgcggcagctgctttagaaggtctcgagcctcctgtaccttcccagggatgaaccgggccttccctctggaaggcgagggttcgggccacagtgagcgagggccagggcggtgggcgcgcgcagagggaaaccggatcagttgagagagaatcaagagtagcggatgaggcgcttgtggggcgcggcccggaagccctcgggcgcgggctgggagaaggagtgggcggaggcgccgcaggaggctcccggggcctggtcgggccggctgggccccgggcgcagtggaagaaagggacgggcggtgcccggttgggcgtcctggccagctcaccttgccctggcggctcgccccgcccggcacttgggaggagcagggcagggcccgcggcctttgcattctgggaccgcccccttccattcccgggccagcggcgagcggcagcgacggctggagccgcagctacagcatgagagccggtgccgctcctccacgcctgcggacgcgtggcgagcggaggcagcgctgcctgttcgcgccatgggggcaccgtggggctcgccgacggcggcggcgggcgggcggcgcgggtggcgccgaggccgggggctgccatggaccgtctgtgtgctggcggccgccggcttgacgtgtacggcgctgatcacctacgcttgctgggggcagctgccgccgctgccctgggcgtcgccaaccccgtcgcgaccggtgggcgtgctgctgtggtgggagcccttcggggggcgcgatagcgccccgaggccgccccctgactgccggctgcgcttcaacatcagcggctgccgcctgctcaccgaccgcgcgtcctacggagaggctcaggccgtgcttttccaccaccgcgacctcgtgaaggggccccccgactggcccccgccctggggcatccaggcgcacactgccgaggaggtggatctgcgcgtgttggactacgaggaggcagcggcggcggcagaagccctggcgacctccagccccaggcccccgggccagcgctgggtttggatgaacttcgagtcgccctcgcactccccggggctgcgaagcctggcaagtaacctcttcaactggacgctctcctaccgggcggactcggacgtctttgtgccttatggctacctctaccccagaagccaccccggcgacccgccctcaggcctggccccgccactgtccaggaaacaggggctggtggcatgggtggtgagccactgggacgagcgccaggcccgggtccgctactaccaccaactgagccaacatgtgaccgtggacgtgttcggccggggcgggccggggcagccggtgcccgaaattgggctcctgcacacagtggcccgctacaagttctacctggctttcgagaactcgcagcacctggattatatcaccgagaagctctggcgcaacgcgttgctcgctggggcggtgccggtggtgctgggcccagaccgtgccaactacgagcgctttgtgccccgcggcgccttcatccacgtggacgacttcccaagtgcctcctccctggcctcgtacctgcttttcctcgaccgcaaccccgcggtctatcgccgctacttccactggcgccggagctacgctgtccacatcacctccttctgggacgagccttggtgccgggtgtgccaggctgtacagagggctggggaccggcccaagagcatacggaacttggccagctggttcgagcggtgaagccgcgctcccctggaagcgacccaggggaggccaagttgtcagctttttgatcctctactgtgcatctccttgactgccgcatcatgggagtaagttcttcaaacacccatttttgctctatgggaaaaaaacgatttaccaattaatattactcagcacagagatgggggcccggtttccatattttttgcacagctagcaattgggctccctttgctgctgatgggcatcattgtttaggggtgaaggagggggttcttcctcaccttgtaaccagtgcagaaatgaaatagcttagcggcaagaagccgttgaggcggtttcctgaatttccccatctgccacaggccatatttgtggcccgtgcagcttccaaatctcatacacaactgttcccgattcacgtttttctggaccaaggtgaagcaaatttgtggttgtagaaggagccttgttggtggagagtggaaggactgtggctgcaggtgggactttgttgtttggattcctcacagccttggctcctgagaaaggtgaggagggcagtccaagaggggccgctgacttctttcacaagtactatctgttcccctgtcctgtgaatggaagcaaagtgctggattgtccttggaggaaacttaagatgaatacatgcgtgtacctcactttacataagaaatgtattcctgaaaagctgcatttaaatcaagtcccaaattcattgacttaggggagttcagtatttaatgaaaccctatggagaatttatccctttacaatgtgaatagtcatctcctaatttgtttcttctgtctttatgtttttctataacctggattttttaaatcatattaaaattacagatgtga

SEQ ID NO: 282025 - DNA, 6043 bp, Homo sapiens
  misc_feature (3715)..(3715): n is a, c, g, or t
  misc_feature (3959)..(3959): n is a, c, g, or t
  misc_feature (4162)..(4162): n is a, c, g, or t
  misc_feature (4329)..(4329): n is a, c, g, or t
caatccctccctccggcgggcgtcgctggcgggtggctaggcccaacggcaggaagccgacgctatcctccgttccgcggcgccgggtccgccttccgtctgttctagggcctgctcctgcgcggcagctgctttagaaggtctcgagcctcctgtaccttcccagggatgaaccgggccttccctctggaaggcgagggttcgggccacagtgagcgagggccagggcggtgggcgcgcgcagagggaaaccggatcagttgagagagaatcaagagtagcggatgaggcgcttgtggggcgcggcccggaagccctcgggcgcgggctgggagaaggagtgggcggaggcgccgcaggaggctcccggggcctggtcgggccggctgggccccgggcgcagtggaagaaagggacgggcggtgcccggttgggcgtcctggccagctcaccttgccctggcggctcgccccgcccggcacttgggaggagcagggcagggcccgcggcctttgcattctgggaccgcccccttccattcccgggccagcggcgagcggcagcgacggctggagccgcagctacagcatgagagccggtgccgctcctccacgcctgcggacgcgtggcgagcggaggcagcgctgcctgttcgcgccatgggggcaccgtggggctcgccgacggcggcggcgggcgggcggcgcgggtggcgccgaggccgggggctgccatggaccgtctgtgtgctggcggccgccggcttgacgtgtacggcgctgatcacctacgcttgctgggggcagctgccgccgctgccctgggcgtcgccaaccccgtcgcgaccggtgggcgtgctgctgtggtgggagcccttcggggggcgcgatagcgccccgaggccgccccctgactgccggctgcgcttcaacatcagcggctgccgcctgctcaccgaccgcgcgtcctacggagaggctcaggccgtgcttttccaccaccgcgacctcgtgaaggggccccccgactggcccccgccctggggcatccaggcgcacactgccgaggaggtggatctgcgcgtgttggactacgaggaggcagcggcggcggcagaagccctggcgacctccagccccaggcccccgggccagcgctgggtttggatgaacttcgagtcgccctcgcactccccggggctgcgaagcctggcaagtaacctcttcaactggacgctctcctaccgggcggactcggacgtctttgtgccttatggctacctctaccccagaagccaccccggcgacccgccctcaggcctggccccgccactgtccaggaaacaggggctggtggcatgggtggtgagccactgggacgagcgccaggcccgggtccgctactaccaccaactgagccaacatgtgaccgtggacgtgttcggccggggcgggccggggcagccggtgcccgaaattgggctcctgcacacagtggcccgctacaagttctacctggctttcgagaactcgcagcacctggattatatcaccgagaagctctggcgcaacgcgttgctcgctggggcggtgccggtggtgctgggcccagaccgtgccaactacgagcgctttgtgccccgcggcgccttcatccacgtggacgacttcccaagtgcctcctccctggcctcgtacctgcttttcctcgaccgcaaccccgcggtctatcgccgctacttccactggcgccggagctacgctgtccacatcacctccttctgggacgagccttggtgccgggtgtgccaggctgtacagagggctggggaccggcccaagagcatacggaacttggccagctggttcgagcggtgaagccgcgctcccctggaagcgacccaggggaggccaagttgtcagctttttgatcctctactgtgcatctccttgactgccgcatcatgggagtaagttcttcaaacacccatttttgctctatgggaaaaaaacgatttaccaattaatattactcagcacagagatgggggcccggtttccatattttttgcacagctagcaattgggctccctttgctgctgatgggcatcattgtttaggggtgaaggagggggttcttcctcaccttgtaaccagtgcagaaatgaaatagcttagcggcaagaagccgttgaggcggtttcctgaatttccccatctgccacaggccatatttgtggcccgtgcagcttccaaatctcatacacaactgttcccgattcacgtttttctggaccaaggtgaagcaaatttgtggttgtagaaggagccttgttggtggagagtggaaggactgtggctgcaggtgggactttgttgtttggattcctcacagccttggctcctgagaaaggtgaggagggcagtccaagaggggccgctgacttctttcacaagtactatctgttcccctgtcctgtgaatggaagcaaagtgctggattgtccttggaggaaacttaagatgaatacatgcgtgtacctcactttacataagaaatgtattcctgaaaagctgcatttaaatcaagtcccaaattcattgacttaggggagttcagtatttaatgaaaccctatggagaatttatccctttacaatgtgaatagtcatctcctaatttgtttcttctgtctttatgtttttctataacctggattttttaaatcatattaaaattacagatgtgaaaataaagcagaagcaacctttttccctcttcccagaaaaccagtctgtgtttacagacagaagagaaggaagccatagtgtcacttccacacaattatttatttcatgtctttactggacctgaaatttaaactgcaatgccagtcctgcaggagtgctggcattaccctctgcagaacagtgaaaggtattgcactacattatggaatcatgcaaaaggaaaaaaagtttcatgatatctgttgttggcagtttttgtttatctctgacagtttttagttaaatgtttagatcctcagaactacattagtgcctactattaacttactctgtctcttgttaaaggctaaatctgcgcttctccctggtgccagcaggttcccctcacagtcaatgcagtggtatagcatatcctcacatttctagtgcccttgagactgtgctatggaaccaatcttgaacatacatgcattgacttgacaagttactgagtaagcagcatatcagcaggtgccactacagcctactctgccagacactgagcttggggccctagggaagatagagaattatacaaggcaaagtccttctctttagggctcttacaatctatcacttccaaaaagtaaatggtgactgataaaacaattggcagaacctgtttgattactgtgacagtcttaatgataccataaatcaatattagaaagctagttgacttaaagcctgaaataatgggagttttctcctccacttattagaataaggaccctcagtgactaattattgtgggtagggtcaagattaactagttttatacagagttctgctgtaaatagtcattttgcattgattagtgcagttctctgaatcataaagcaagttttacctctctgtacatgtttttgcagacatacttgaaaagctccttaaatctaggtgcttcaattcactttcttgagagnacaaatgaaaagctgtggagaaaatgtcctcattaaagtattaaagtgtgggcagaattacaattacaaagtgccagccaccgaataaagataaaagttcagttcttaaaatgagtttttatgagataacagtcagtgatcttggtgttaccgggattccacatggggcagtgggaaagagttcaggttttgaaggtaacctagtttagatttgaattccagctatgtgacattgggtaaattngtagtagtcctgagcctcagcgtcctcatctataaaatgactggcgaaaatacttcacaagctcattttgagcactttaggaagtaagtgaaagtacctaaaatagcaggcacccaattgatgattttatatcttccttctttgcttgcagtgatttcaggatgtcctcatatctatttataggtctaaaattatatcttaangtatgttgtagaataaattaaaaggataactaaatcaccatttagattaagcttgacttgcaaactaggaagaagcacctaggctttctttgaaaatatttttttggttcgttttggtaaagctctataaattggtatctattattttaccaatttttttttagtantaagtccatttagaactaaccatattatttatggaataattagcatgaggaaggtataattgcatttttttttttttgagacggagcttgcactgtagccccagctggactgcagtggcgtgatcttggctcactgcaacctccgcctcccaggttcaagcgattctcctgcctcagcctcccgagcagctgagactacaggcgcctgccaccacgcctggccaattttttgtatttttagtagagactgcgtttcaccatgttgggcaggctggtcttgaactcctgaccttgtgatccacctgcctcggcctctcagagagctgggattacaggtgtgagccgccgtgcccagccattgcatttttattcacatacacattgttaatgtggaacaatttaacactaatctcatcagagagcgagatgaatgtggcaattgctcattttattttgcatatattaaattgagtaggttcagctctaacataccttaagaaaaatgcatatcggtgcactgtatgtatttcaaaatgcctttcctatgattgtcatgtcctcctttaaggcttttccctcaaatttattacaaatttagtatttttagtacttgatgactctaattacatgaatgcacctggaatgacatttgtaacagaagacggtctgacttgctttcagtattcacaagttctttccagtttccaagtcttttcctagcagtaatttaggggagacagaggagtttcatgtaaagagcatgcagtttggagtcagaacctgggtatgactctgtggccttgatgaagcaagttacttaaactcttgagttttagctttctcctttacaatgcatgaatgcctatccccctacaaaacaaagattaaatgtgatgatgtatgccaaggtgctttgtatattgtaaagtgctatataattataagatgttctaaattttcaaggatctaaaccagggattggcaaacgtttttccagggagtaaatattttacgctttgcatatataatttatggaggtgttgagaggatagattagacacttgaagtactcaggatagtgcctggcatgtaggaagcacctggaaaatattcgctgtgattaccatcagtccattttaccgaggaaggagccaaggtccaggcccactgaaggacttgcataacattacaatagcagtggcagaaccagccatgcttctgcaaatcacaacctctttgagcctctgtcacctgaactgcaaaatgagtgggttagacaaaatcatctgttgggacctcctagttccacgtgctatcattctactaactggcaccctaaggttgaaagtgcttatctgctttccaatgtggcttccttacagtctggaactgacaatatgcaggagcagtaaactggcagaaaaccaggaatcagagaaagaaaatataatttaactttaaagatgtaaattatatatatagtatattatatatatttttaaagctttatatgcctcaaatatcagggaaaggagccaagtccttggtatttagtttggtgaatacttgcattgaatacatgtcaagatgtcaagtcatttttgaatgtgtctcagggatttctatgctacacattcttttaacaaatcaagtatttatgtacacatgttcagattttttgacaaaatgattaaaataatgagatggaaaatga

SEQ ID NO: 282026 - DNA, 370 bp, Homo sapiens
aagaaattatttggtatacagtagtagacttgtatagaatttctaaacaatttaatgttaatagatttttggaaagactttaacggtgtattgaaaagttttatctacttcctgtgaacgtttgtctcaagttactgtgtaaattttgtgagcaggtgtagttaaaagaaaatcttgttaggcacctgcaattccgtgaaactgtacacaggagttggttacatagttttgtctaggttgtgcatgagcaaagaagcatgtgagccaaaaagtttaggaaacactgcatgtgtgtctttatcttactacattaatacacccaaacatgaagtatctgtttgctgagaaaatacttcaataaccacggtat

SEQ ID NO: 282027 - DNA, 242 bp, Homo sapiens
aagagtgaattttgtggcacatggattttttcctcagtaaagctgttatataaaaaaacatgagagagtaaattccttggcatattttgaatttttagttgatgattatgttgatagtaagcgtgtgcaacattcattgctgtgccatgtcttaagttattcaaaataatctgcagtcttaactttgttctcgtgaacttagcctctgtactgtgtgttctttagggacgattactttgcca

SEQ ID NO: 282028 - DNA, 1483 bp, Homo sapiens
gggaagcagaggagttgggagctggcggtcgttcccggggaagaactgctaaaacatgagaccaaggcacagaccttactgtatgagaagcaatgctcctcaaaccttctgcgtgctgacatagaccttcccagaagcaaaactgttggcggcgacctgagcgctggaagccgaaggggaagaggaaggagacgcgaagccagggcggccggcacaaaggcggcggactcgcggcggcagcgcctgcccggccgggagcacaacccacggccctactccagcgaagtcccgcaccggcttctaggaataaagtttacgttctcctgaggccgcaccccccacctcccacccaggacggcacatctccgtgtcctcctcccccaaactccactcgggaccccgagaaccaccccagccttccggccaccacaacaaagagccgcaccgaccggcgaggataaacagcggcggagggcgagagggcggcggggcgagcgcctccacgcagcaactccggagtcccccgcttgcccgagcgcagtttctccgctgctgtttccaccggctttgtaacactgggaatttacatcctcacccgcacccctcacgcccgaggattttaaactcacctttactctcgaactgagagttgcggtagatgggatttttgccttttccccagatggttgaaggttaagatttttggaaaccccaccacctccttatttctattattatttctgcaagaaaagtataaagagagttgtagtggaggtgagatttgtgatcgggaaagccttcgactccctccttctccgtcttccgcttctctctctctgattagttcctatccagcagcagattgaagcaggagatgattcttctcaaggtttgttcagcagcttcacttctaggcgaaggcttcatgaaccaagtgacgtcaaccaacaaggcttctctctctctcctctctctaacaatgaaagttgctgttaacaagggaaaaaaagagagagaattgtttataccatttcagttccaataataaatgacctatcagctcctaaaggagccaagggagggggttgcttcttctttccaagaatactgtagctttgagtttgcaccgttccttgtcccaggaaaaagttaagaaacttaaaatgttttgttttgcttttaaagaagacaggacagaaaacgggatttaaaacttagtttttaaaaaaacaaaagctacagagtagggagcataggtcaaccatctccacctaatttttttttgttcctaaactcagaattctacaacccaactaaattaatatgccaagattttgcggatgttaaaactcaaaaaaagcagtatgcaagacggtcccggggtaaaattctactgcctttccacggacaagttaaactggctgtaatgtttatgcactaagttaaaataaaatttaaataaaagacgttaaaatagtcgttt

SEQ ID NO: 282029 - DNA, 1095 bp, Homo sapiens
  misc_feature (1)..(1): n is a, c, g, or t
  misc_feature (4)..(4): n is a, c, g, or t
  misc_feature (13)..(13): n is a, c, g, or t
natntcggcacgngcggggaccttcatgtgaagagttatgtagaaatgctggaattctatggggatcgagatggagcccaagaggtactcaccaattatgcatatgatgaaaagtttccatcaaatccaaatgcccatatctacttatacaactttctaaagagacagaaggcaccaagatcaaaattgataagtgtgcttaagcatctacagaaaatttcaataatgtacagtacactgagataaacagagaaagttggctccagctgccatctccatgtatgtatcatccacgctatcccctgctgcccggatgagactgaggagagaggatcagaagtcttgtgcaaccctggttggaatactctgcactgatattttttgaaaatcaactttattgaaatttagttttcagagagtaaacacacttattttaagtatgtgcttggatgcgttacattcatgaaccaccatggtaatcatgatatagaacatttctgtcgcccccagaatgcctttcatttccctttgcagcctgtctgtccccacaaccatggccccagacaatcactgatctgcttattgtcactatagattaatttttatctcttctagaatttcatgtaaatggactcttatgtagtcattttaatctggcttctcttgctcagcgtaacatatttgagattcacccatgttattgtgtatattagtaatttccttattactgctgaatagtatttcatttttatacattcacttcttgatggacatttgggtaatttttactttttggctattgtgaatgatgctgctgagaacattcatgtacaagattctgtatacacatatattttcatgtttcttgggtagctacctgagagaggagttgctgcctaagagtagtaaggaaagtatatgcttaacttcctaagaaactgcccagctgttttttgaagtgactgtaccatcgacattcacacagcaatatgaaaattcagtttctccacatctgtgccaacacttggtattggaggtcttttgaataatagcctcttgtgggtgtcccatgtggcattaaattgtatttcccta

SEQ ID NO: 282030 - DNA, 1905 bp, Homo sapiens
  misc_feature (7)..(7): n is a, c, g, or t
gccaacnatacgcctgctgccgcaggaggagttacgagccgggccgcgcgctgcctaaatacctaaaccaggtttagcgcctgctcatataaagctctcctaactcgtcttccggtgggaatttcttcacgtgggccggagtcggagactgagtttagctttactgaggagctctaaatttaggcgggtatgagtgatttcagtgaagaattaaaagggcctgtgacagatgatgaagaagtggaaacatctgtgctcagtggtgcaggaatgcattttccttggcttcaaacatacgtagaaactgtggccattggagggaaaaggaggaaggattttgctcagacaacaagtgcttgtttaagttttatccaagaagctctgctgaagcaccaatggcagcaagctgcagaatacatgtacagttattttcagaccttggaagattcagatagctacaaaaggcaggctgcacctgagattatttggaagctcggaagtgaaattctattttatcatcccaaaagcaacatggagagtttcaatacttttgctaaccggatgaaaaatattggcgtcatgaattatttaaagatctccttacaacatgcattataccttctgcatcatggaatgcttaaagatgctaagagaaatctgagtgaggcagagacatggagacatggtgaaaatacgtcttcccgggaaatattaatcaaccttattcaggcctataaagggcttttacagtattatacctggtctgaaaagaagatggaattgtcaaagcttgataaggatgattatgcttacaatgcagtagcccaggatgtgttcaaccacagctggaagacatctgcaaatatttctgcattgattaaaattcctggagtttgggacccttttgtgaagagttatgtagaaatgctggaattctatggggatcgagatggagcccaagaggtactcaccaattatgcatatgatgaaaagtttccatcaaatccaaatgcccatatctacttatacaactttctaaagagacagaaggcaccaagatcaaaattgataagtgtgcttaagattttgtatcagattgtaccatctcataaattgatgttggaattccatacattacttagaaaatcagaaaaagaagaacaccgtaaactggggttggaggtattatttggagtcttagattttgccggatgcactaagaatataactgcttggaaatacttggcaaaatatctgaaaaatatcttaatgggaaaccaccttgcgtgggttcaagaagagtggaactccaggaaaaactggtggccagggtttcatttcagctacttttgggcaaaaagtgattggaaggaagatacagctttggcctgtgagaaagcttttgtggctggtttactgttaggaaaaggttgtagatatttccggtatattttaaagcaagatcaccaaatcttagggaagaaaattaagcggatgaagagatctgtgaaaaaatacagtattgtaaatccaagactctgatactgaattttagttatttcacagttgtagctacacagtaagtagcttggtagatagttattgaatgtatttatgtagtgtattaagaagcttatattactacaaaaaacttatttttatatatttttatatttttgtattatttatagctagagaaacaatattactgcctttgctctttgtaactatgtctgttttcttttttgtaatgttaaatgttacatttgttaaggaataattcttcaaatgacaaactaattacagaatatagctctacagcagttattgtttgcaaatactttgcctcttgctattgtgtaataaactgtaacttgtagtgctgtgaaatgtatttatattcta

SEQ ID NO: 282031 - DNA, 1923 bp, Homo sapiens
  misc_feature (7)..(7): n is a, c, g, or t
gccaacnatacgcctgctgccgcaggaggagttacgagccgggccgcgcgctgcctaaatacctaaaccaggtttagcgcctgctcatataaagctctcctaactcgtcttccggtgggaatttcttcacgtgggccggagtcggagactgagtttagctttactgaggagctctaaatttaggcgggtatgagtgatttcagtgaagaattaaaagggcctgtgacagatgatgaagaagtggaaacatctgtgctcagtggtgcaggaatgcattttccttggcttcaaacatacgtagaaactgtggccattggagggaaaaggaggaaggattttgctcagacaacaagtgcttgtttaagttttatccaagaagctctgctgaagcaccaatggcagcaagctgcagaatacatgtacagttattttcagaccttggaagattcagatagctacaaaaggcaggctgcacctgagtaatttctgctttgacagattatttggaagctcggaagtgaaattctattttatcatcccaaaagcaacatggagagtttcaatacttttgctaaccggatgaaaaatattggcgtcatgaattatttaaagatctccttacaacatgcattataccttctgcatcatggaatgcttaaagatgctaagagaaatctgagtgaggcagagacatggagacatggtgaaaatacgtcttcccgggaaatattaatcaaccttattcaggcctataaagggcttttacagtattatacctggtctgaaaagaagatggaattgtcaaagcttgataaggatgattatgcttacaatgcagtagcccaggatgtgttcaaccacagctggaagacatctgcaaatatttctgcattgattaaaattcctggagtttgggacccttttgtgaagagttatgtagaaatgctggaattctatggggatcgagatggagcccaagaggtactcaccaattatgcatatgatgaaaagtttccatcaaatccaaatgcccatatctacttatacaactttctaaagagacagaaggcaccaagatcaaaattgataagtgtgcttaagattttgtatcagattgtaccatctcataaattgatgttggaattccatacattacttagaaaatcagaaaaagaagaacaccgtaaactggggttggaggtattatttggagtcttagattttgccggatgcactaagaatataactgcttggaaatacttggcaaaatatctgaaaaatatcttaatgggaaaccaccttgcgtgggttcaagaagagtggaactccaggaaaaactggtggccagggtttcatttcagctacttttgggcaaaaagtgattggaaggaagatacagctttggcctgtgagaaagcttttgtggctggtttactgttaggaaaaggttgtagatatttccggtatattttaaagcaagatcaccaaatcttagggaagaaaattaagcggatgaagagatctgtgaaaaaatacagtattgtaaatccaagactctgatactgaattttagttatttcacagttgtagctacacagtaagtagcttggtagatagttattgaatgtatttatgtagtgtattaagaagcttatattactacaaaaaacttatttttatatatttttatatttttgtattatttatagctagagaaacaatattactgcctttgctctttgtaactatgtctgttttcttttttgtaatgttaaatgttacatttgttaaggaataattcttcaaatgacaaactaattacagaatatagctctacagcagttattgtttgcaaatactttgcctcttgctattgtgtaataaactgtaacttgtagtgctgtgaaatgtatttatattcta

SEQ ID NO: 282032 - DNA, 1776 bp, Homo sapiens
  misc_feature (7)..(7): n is a, c, g, or t
gccaacnatacgcctgctgccgcaggaggagttacgagccgggccgcgcgctgcctaaatacctaaaccaggtttagcgcctgctcatataaagctctcctaactcgtcttccggtgggaatttcttcacgtgggccggagtcggagactgagtttagctttactgaggagctctaaatttaggcgggtatgagtgatttcagtgaagaattaaaagggcctgtgacagatgatgaagaagtggaaacatctgtgctcagtggtgcaggaatgcattttccttggcttcaaacatacgtagaaactgtggattatttggaagctcggaagtgaaattctattttatcatcccaaaagcaacatggagagtttcaatacttttgctaaccggatgaaaaatattggcgtcatgaattatttaaagatctccttacaacatgcattataccttctgcatcatggaatgcttaaagatgctaagagaaatctgagtgaggcagagacatggagacatggtgaaaatacgtcttcccgggaaatattaatcaaccttattcaggcctataaagggcttttacagtattatacctggtctgaaaagaagatggaattgtcaaagcttgataaggatgattatgcttacaatgcagtagcccaggatgtgttcaaccacagctggaagacatctgcaaatatttctgcattgattaaaattcctggagtttgggacccttttgtgaagagttatgtagaaatgctggaattctatggggatcgagatggagcccaagaggtactcaccaattatgcatatgatgaaaagtttccatcaaatccaaatgcccatatctacttatacaactttctaaagagacagaaggcaccaagatcaaaattgataagtgtgcttaagattttgtatcagattgtaccatctcataaattgatgttggaattccatacattacttagaaaatcagaaaaagaagaacaccgtaaactggggttggaggtattatttggagtcttagattttgccggatgcactaagaatataactgcttggaaatacttggcaaaatatctgaaaaatatcttaatgggaaaccaccttgcgtgggttcaagaagagtggaactccaggaaaaactggtggccagggtttcatttcagctacttttgggcaaaaagtgattggaaggaagatacagctttggcctgtgagaaagcttttgtggctggtttactgttaggaaaaggttgtagatatttccggtatattttaaagcaagatcaccaaatcttagggaagaaaattaagcggatgaagagatctgtgaaaaaatacagtattgtaaatccaagactctgatactgaattttagttatttcacagttgtagctacacagtataccaccatgaagaaatatattggtgatgagttctattgaggaattttgaaaagagagaaggatttagaaaaaagactctttctcggccgggcgcagtggctcacacttctaatcccagcacttgggaggccgaggtgggtggatcatgaggtcaggagttcaagaccagcctggccaacacagtgaaaccctgtctctactaaaaatacaaaaagtagctgggcgcagtggcgggcatttgtaatcccagatactcgggaggctgaagcaggagaattgcttgaacccgggaggtggaggttgcagtgagccgagattgcaccaccgtactcctgcctgggcgacagaactagactctgtctc

SEQ ID NO: 282033 - DNA, 2059 bp, Homo sapiens
  misc_feature (7)..(7): n is a, c, g, or t
gccaacnatacgcctgctgccgcaggaggagttacgagccgggccgcgcgctgcctaaatacctaaaccaggtttagcgcctgctcatataaagctctcctaactcgtcttccggtgggaatttcttcacgtgggccggagtcggagactgagtttagctttactgaggagctctaaatttaggcgggtatgagtgatttcagtgaagaattaaaagggcctgtgacagatgatgaagaagtggaaacatctgtgctcagtggtgcaggaatgcattttccttggcttcaaacatacgtagaaactgtggccattggagggaaaaggaggaaggattttgctcagacaacaagtgcttgtttaagttttatccaagaagctctgctgaagcaccaatggcagcaagctgcagaatacatgtacagttattttcagaccttggaagattcagatagctacaaaaggcaggctgcacctgagattatttggaagctcggaagtgaaattctattttatcatcccaaaagcaacatggagagtttcaatacttttgctaaccggatgaaaaatattggcgtcatgaattatttaaagatctccttacaacatgcattataccttctgcatcatggaatgcttaaagatgctaagagaaatctgagtgaggcagagacatggagacatggtgaaaatacgtcttcccgggaaatattaatcaaccttattcaggcctataaagggcttttacagtattatacctggtctgaaaagaagatggaattgtcaaagcttgataaggatgattatgcttacaatgcagtagcccaggatgtgttcaaccacagctggaagacatctgcaaatatttctgcattgattaaaattcctggagtttgggacccttttgtgaagagttatgtagaaatgctggaattctatggggatcgagatggagcccaagaggtactcaccaattatgcatatgatgaaaagtttccatcaaatccaaatgcccatatctacttatacaactttctaaagagacagaaggcaccaagatcaaaattgataagtgtgcttaaggtatagaatttttatctcgatgtttgaccagggttgggaatctacattaaaacattcttaggccattgctttctaacttttatagcatctacagaaaatttcaataatgtacagtacactgagataaacagagaaagttggctccagctgccatctccatgtatgtatcatccacgctatcccctgctgcccggatgagactgaggagagaggatcagaagtcttgtgcaaccctggttggaatactctgcactgatattttttgaaaatcaactttattgaaatttagttttcagagagtaaacacacttattttaagtatgtgcttggatgcgttacattcatgaaccaccatggtaatcatgatatagaacatttctgtcgcccccagaatgcctttcatttccctttgcagcctgtctgtccccacaaccatggccccagacaatcactgatctgcttattgtcactatagattaatttttatctcttctagaatttcatgtaaatggactcttatgtagtcattttaatctggcttctcttgctcagcgtaacatatttgagattcacccatgttattgtgtatattagtaatttccttattactgctgaatagtatttcatttttatacattcacttcttgatggacatttgggtaatttttactttttggctattgtgaatgatgctgctgagaacattcatgtacaagattctgtatacacatatattttcatgtttcttgggtagctacctgagagaggagttgctgcctaagagtagtaaggaaagtatatgcttaacttcctaagaaactgcccagctgttttttgaagtgactgtaccatcgacattcacacagcaatatgaaaattcagtttctccacatctgtgccaacacttggtattggaggtcttttgaataatagcctcttgtgggtgtcccatgtggcattaaattgtatttcccta

SEQ ID NO: 282034 - DNA, 956 bp, Homo sapiens
cccctcgccccggcctcctttccccttcacgaagccggctctggggcgcgctcacccctgtgaggaggccggaggtcggactcaggaggctccttctccactcccggaagatcatgtaccagcccagccggggtgcggcccggcgtctcggcccttgcctgcgcgcctaccaggctcgaccccaggggccggacatggtacattctttcactgaccctctgccgtttcctggcctggaattattttgcacaccttcgtttggaggttttacagctgacccgccaccctgagaactggaccctgcaagcccggtggcggcttgtggggctgcccgtccacttgctctttttgcggttctacaagcgtgacaaagacgagcattaccggacctatgatgcctactccactttctacctgaattccagtggcctcatttgtcgccatcgtctagataaactgatgccttcacactcacctccaacgcctgtgaagaagctgctagtgggagccctggtggccctggggctgtcagagccagaacctgacttaaacctgtgttccaagccctgatccttgaccttggagtggaggcagcactgaagactgctacgcccaagagaaggaggtggaggcagccaagaatctcaggagccagcttcctctcctcgtttctctccttccttcctttccatctcatgctgtgtaaagctgctgtgtaatttaacttgtaaataataaagtttaactgactatatgagatagaatttcacatatcactttctctagatcccaaatgttcccacaagctttattccaaaaataattttatttaataggtattaaataatgtatagaaggaaaaggagctggtgtcaggttctgtttacgtccttctcttaccctagctcttctcgtgttttgcctatttttttgggcattttcttagcatggggatc

SEQ ID NO: 282035 - DNA, 414 bp, Homo sapiens
accagtcaccttctccctcagtaagcctccctctattccccaggacctatgatgcctactccactttctacctgaattccagtggcctcatttgtcgccatcgtctagataaactgatgccttcacactcacctccaacgcctgtgaagaagctgctagtgggagccctggtggccctggggctgtcagagccagaacctgacttaaacctgtgttccaagccctgatccttgaccttggagtggaggcagcactgaagactgctacgcccaagagaaggaggtggaggcagccaagaatctcaggagccagcttcctctcctcgtttctctccttccttcctttccatctcatgctgtgtaaagctgctgtgtaatttaacttgtaaataataaagtttaactgactatatga

SEQ ID NO: 282036 - DNA, 1248 bp, Homo sapiens
cccctcgccccggcctcctttccccttcacgaagccggctctggggcgcgctcacccctgtgaggaggccggaggtcggactcaggaggctccttctccactcccggaagatcatgtaccagcccagccggggtgcggcccggcgtctcggcccttgcctgcgcgcctaccaggctcgaccccaggaccagctttatccagggactctaccattcccacccctttggccccactccacgacaaccacttccccatcttctcctctattctggtctcccctgcccccacgccttcccacccagcgtcttccccaggttcccccactacctctccctcagatccaggccctcagctcagcatgggtggttctccctccaggaaagggggaggagggaccaggacctgagttgcatagcggctgcctggatgggcttagaagcctttttgagggacctccctgcccctatcctggggcttggatacctttccaagtccctggaactgcccacccttcccctgccaccccgtcaggagatcctagtatggaggaacatctgtctgtcatgtatgagagactgagacaagagcttcccaagctcttccttcagtcccacgactacagtctgtattccttggatgtggaattcatcaatgagatcctcaacatacgtaccaagggccggacatggtacattctttcactgaccctctgccgtttcctggcctggaattattttgcacaccttcgtttggaggttttacagctgacccgccaccctgagaactggaccctgcaagcccggtggcggcttgtggggctgcccgtccacttgctctttttgcggttctacaagcgtgacaaagacgagcattaccggacctatgatgcctactccactttctacctgaattccagtggcctcatttgtcgccatcgtctagataaactgatgccttcacactcacctccaacgcctgtgaagaagctgctagtgggagccctggtggccctggggctgtcagagccagaacctgacttaaacctgtgttccaagccctgatccttgaccttggagtggaggcagcactgaagactgctacgcccaagagaaggaggtggaggcagccaagaatctcaggagccagcttcctctcctcgtttctctccttccttcctttccatctcatgctgtgtaaagctgctgtgtaatttaacttgtaaataataaagtttaactgactatatga

SEQ ID NO: 282037 - DNA, 1447 bp, Homo sapiens
cccctcgccccggcctcctttccccttcacgaagccggctctggggcgcgctcacccctgtgaggaggccggaggtcggactcaggaggctccttctccactcccggaagatcatgtaccagcccagccggggtgcggcccggcgtctcggcccttgcctgcgcgcctaccaggctcgaccccaggaccagctttatccagggactctaccattcccacccctttggccccactccacgacaaccacttccccatcttctcctctattctggtctcccctgcccccacgccttcccacccagcgtcttccccaggttcccccactacctctccctcagatccaggccctcagctcagcatgggtggttctccctccaggaaagggggaggagggaccaggacctgagttgcatagcggctgcctggatgggcttagaagcctttttgagggacctccctgcccctatcctggggcttggatacctttccaagtccctggaactgcccacccttcccctgccaccccgtcaggagatcctagtatggaggaacatctgtctgtcatgtatgagagactgagacaagagcttcccaagctcttccttcagtcccacgactacagtctgtattccttggatgtggaattcatcaatgagatcctcaacatacgtaccaagggccggacatggtacattctttcactgaccctctgccgtttcctggcctggaattattttgcacaccttcgtttggaggttttacagctgacccgccaccctgagaactggaccctgcaagcccggtggcggcttgtggggctgcccgtccacttgctctttttgcggttctacaagcgtgacaaagacgagcattaccggacctatgatgcctactccactttctacctgaattccagtggcctcatttgtcgccatcgtctagataaactgatgccttcacactcacctccaacgcctgtgaagaagctgctagtgggagccctggtggccctggggctgtcagagccagaacctgacttaaacctgtgttccaagccctgatccttgaccttggagtggaggcagcactgaagactgctacgcccaagagaaggaggtggaggcagccaagaatctcaggagccagcttcctctcctcgtttctctccttccttcctttccatctcatgctgtgtaaagctgctgtgtaatttaacttgtaaataataaagtttaactgactatatgagatagaatttcacatatcactttctctagatcccaaatgttcccacaagctttattccaaaaataattttatttaataggtattaaataatgtatagaaggaaaaggagctggtgtcaggttctgtttacgtccttctcttaccctagctcttctcgtgttttgcctatttttttgggcattttcttagcatggggatc

SEQ ID NO: 282038 - DNA, 1908 bp, Homo sapiens
  misc_feature (374)..(374): n is a, c, g, or t
  misc_feature (1188)..(1188): n is a, c, g, or t
  misc_feature (1191)..(1191): n is a, c, g, or t
cgtgcgcgaacgtgggcacagatctggtgtctcttgtctcttcttgcatcgagacgttcgccgtagcaccgttccctcgctgttctttacattctttttctctgtgttgactctatccttcgtgttatgtgctagttgtgctggcctcgatcggtcgttcctccactgctgtggtctgcgttactgtggttcaagagcccatcagctggtgccctcgacactgcgggtccgtctctcgttttgatcgttcagtagggtttctccatcccgggggagtgtaccatttcaccattgttctaaactttacatgaccagtggttacgccagggagaaatagtgatcacggcatgttcagcatggacgacttggtcctntggtcggtagaaagatggattgttgacagaagagcattggcagcccctgtcaggatctccttctgtacagctggtacttctcagaggctaagatcatttggacagcatggggtccaccggcagctctgccatctttcgaccagacgtggtgagctccccaaggtggttgagggctcccagagcatacagctgctccgaaagccagcagcagtgtctcatactggtggagggctcctaggaaagtcaagagtgcattaggtcatggtatcccgtaagcttcttgagctagcaactacgacgattgccctaagcgtggtccgcgtggatctgcaggcactggtggttgtccgtcatgcatcgtgcatgtataggctccaggcgtgtatatctaggctggatagctacttcgcctgctagcctacccgtaccgtgccctgctctagcttcgctggtattgcgctggaggccttttgctgtctagggtgctgtactagtggtagcgtatttcctatgctctgtcgactgggggtcgtgtgagcttctgtcgtgctgtagcgagagagccctcggagtcgcagtcatcactatcagtgagtgcccctcagactggatgacgtgactgcgcgtcgagtcaactgtttccgttgtcgcatcaacgcacacgttgtcgttggccccagggaggatgatggcgaatggaagataacgggaacagacaatgatacagagggcagaaaggcaaaaaagagacaagcaacacaagagaaaaaccaggaaaaatggaaaacagacaaagacaagaaaaagggcggcngcncgcgatctagaactagggaacatctgtctgtcatgtatgagagactgagacaagagcttcccaagctcttccttcagtcccacgactacagtctgtattccttggatgtggaattcatcaatgagatcctcaacatacgtaccaagggccggacatggtacattctttcactgaccctctgccgtttcctggcctggaattattttgcacaccttcgtttggaggttttacagctgacccgccaccctgagaactggaccctgcaagcccggtggcggcttgtggggctgcccgtccacttgctctttttgcggttctacaagcgtgacaaagacgagcattaccggacctatgatgcctactccactttctacctgaattccagtggcctcatttgtcgccatcgtctagataaactgatgccttcacactcacctccaacgcctgtgaagaagctgctagtgggagccctggtggccctggggctgtcagagccagaacctgacttaaacctgtgttccaagccctgatccttgaccttggagtggaggcagcactgaagactgctacgcccaagagaaggaggtggaggcagccaagaatctcaggagccagcttcctctcctcgtttctctccttccttcctttccatctcatgctgtgtaaagctgctgtgtaatttaacttgtaaataataaagtttaactgactatatga

SEQ ID NO: 282039 - DNA, 1531 bp, Homo sapiens
cccctcgccccggcctcctttccccttcacgaagccggctctggggcgcgctcacccctgtgaggaggccggaggtcggactcaggaggctccttctccactcccggaagatcatgtaccagcccagccggggtgcggcccggcgtctcggcccttgcctgcgcgcctaccaggctcgaccccaggaccagctttatccagggactctaccattcccacccctttggccccactccacgacaaccacttccccatcttctcctctattctggtctcccctgcccccacgccttcccacccagcgtcttccccaggttcccccactacctctccctcagatccaggccctcagctcagcatgggtggttctccctccaggaaagggggaggagggaccaggacctgagttgcatagcggctgcctggatgggcttagaagcctttttgagggacctccctgcccctatcctggggcttggatacctttccaagtccctggaactgcccacccttcccctgccaccccgtcaggagatcctagtatggaggaacatctgtctgtcatgtatgagagactgagacaagagcttcccaagctcttccttcagtcccacgactacagtctgtattccttggatgtggaattcatcaatgagatcctcaacatacgtaccaagggccggacatggtacattctttcactgaccctctgccgtttcctggcctggaattattttgcacaccttcgtttggaggttttacagctgacccgccaccctgagaactggaccctgcaagcccggtggcggcttgtggggctgcccgtccacttgctctttttgcggttctacaagcgtgacaaagacgagcattaccggacctatgatgcctactccactttctacctgaattccagtggcctcatttgtcgccatcgtctagataaagtgagtcctaggtagggctgggtggggtaaagggtagaacatttgtgtgcctcccccaactggcattaacctttctccctgcagctgatgccttcacactcacctccaacgcctgtgaagaagctgctagtgggagccctggtggccctggggctgtcagagccagaacctgacttaaacctgtgttccaagccctgatccttgaccttggagtggaggcagcactgaagactgctacgcccaagagaaggaggtggaggcagccaagaatctcaggagccagcttcctctcctcgtttctctccttccttcctttccatctcatgctgtgtaaagctgctgtgtaatttaacttgtaaataataaagtttaactgactatatgagatagaatttcacatatcactttctctagatcccaaatgttcccacaagctttattccaaaaataattttatttaataggtattaaataatgtatagaaggaaaaggagctggtgtcaggttctgtttacgtccttctcttaccctagctcttctcgtgttttgcctatttttttgggcattttcttagcatggggatc

SEQ ID NO: 282040 - DNA, 1178 bp, Homo sapiens
cccctcgccccggcctcctttccccttcacgaagccggctctggggcgcgctcacccctgtgaggaggccggaggtcggactcaggaggctccttctccactcccggaagatcatgtaccagcccagccggggtgcggcccggcgtctcggcccttgcctgcgcgcctaccaggctcgaccccaggaccagctttatccagggactctaccattcccacccctttggccccactccacgacaaccacttccccatcttctcctctattctggtctcccctgcccccacgccttcccacccagcgtcttccccaggttcccccactacctctccctcagatccaggccctcagctcagcatgggtggttctccctccaggaaagggggaggagggaccaggacctgagttgcatagcggctgcctggatgggcttagaagcctttttgagggacctccctgcccctatcctggggcttggatacctttccaagtccctggaactgcccacccttcccctgccaccccgtcaggagatcctagtatggaggaacatctgtctgtcatgtatgagagactgagacaagagcttcccaagctcttccttcagtcccacgactacagtctgtattccttggatgtggaattcatcaatgagatcctcaacatacgtaccaagggccggacatggtacattctttcactgaccctctgccgtttcctggcctggaattattttgcacaccttcgtttggaggttttacagctgacccgccaccctgagaactggaccctgcaagcccggtggcggcttgtggggctgcccgtccacttgctctttttgcggttctacaagcgtgacaaagacgagcattaccgctgatgccttcacactcacctccaacgcctgtgaagaagctgctagtgggagccctggtggccctggggctgtcagagccagaacctgacttaaacctgtgttccaagccctgatccttgaccttggagtggaggcagcactgaagactgctacgcccaagagaaggaggtggaggcagccaagaatctcaggagccagcttcctctcctcgtttctctccttccttcctttccatctcatgctgtgtaaagctgctgtgtaatttaacttgtaaataataaagtttaactgactatatga

SEQ ID NO: 282041 - DNA, 2010 bp, Homo sapiens
  misc_feature (374)..(374): n is a, c, g, or t
  misc_feature (1188)..(1188): n is a, c, g, or t
  misc_feature (1191)..(1191): n is a, c, g, or t
cgtgcgcgaacgtgggcacagatctggtgtctcttgtctcttcttgcatcgagacgttcgccgtagcaccgttccctcgctgttctttacattctttttctctgtgttgactctatccttcgtgttatgtgctagttgtgctggcctcgatcggtcgttcctccactgctgtggtctgcgttactgtggttcaagagcccatcagctggtgccctcgacactgcgggtccgtctctcgttttgatcgttcagtagggtttctccatcccgggggagtgtaccatttcaccattgttctaaactttacatgaccagtggttacgccagggagaaatagtgatcacggcatgttcagcatggacgacttggtcctntggtcggtagaaagatggattgttgacagaagagcattggcagcccctgtcaggatctccttctgtacagctggtacttctcagaggctaagatcatttggacagcatggggtccaccggcagctctgccatctttcgaccagacgtggtgagctccccaaggtggttgagggctcccagagcatacagctgctccgaaagccagcagcagtgtctcatactggtggagggctcctaggaaagtcaagagtgcattaggtcatggtatcccgtaagcttcttgagctagcaactacgacgattgccctaagcgtggtccgcgtggatctgcaggcactggtggttgtccgtcatgcatcgtgcatgtataggctccaggcgtgtatatctaggctggatagctacttcgcctgctagcctacccgtaccgtgccctgctctagcttcgctggtattgcgctggaggccttttgctgtctagggtgctgtactagtggtagcgtatttcctatgctctgtcgactgggggtcgtgtgagcttctgtcgtgctgtagcgagagagccctcggagtcgcagtcatcactatcagtgagtgcccctcagactggatgacgtgactgcgcgtcgagtcaactgtttccgttgtcgcatcaacgcacacgttgtcgttggccccagggaggatgatggcgaatggaagataacgggaacagacaatgatacagagggcagaaaggcaaaaaagagacaagcaacacaagagaaaaaccaggaaaaatggaaaacagacaaagacaagaaaaagggcggcngcncgcgatctagaactagggaacatctgtctgtcatgtatgagagactgagacaagagcttcccaagctcttccttcagtcccacgactacagtctgtattccttggatgtggaattcatcaatgagatcctcaacatacgtaccaagtgagaattggggcacaggggccggacatggtacattctttcactgaccctctgccgtttcctggcctggaattattttgcacaccttcgtttggaggttttacagctgacccgccaccctgagaactggaccctgcaagcccggtggcggcttgtggggctgcccgtccacttgctctttttgcggttctacaagcgtgacaaagacgagcattaccggacctatgatgcctactccactttctacctgaattccagtggcctcatttgtcgccatcgtctagataaagtgagtcctaggtagggctgggtggggtaaagggtagaacatttgtgtgcctcccccaactggcattaacctttctccctgcagctgatgccttcacactcacctccaacgcctgtgaagaagctgctagtgggagccctggtggccctggggctgtcagagccagaacctgacttaaacctgtgttccaagccctgatccttgaccttggagtggaggcagcactgaagactgctacgcccaagagaaggaggtggaggcagccaagaatctcaggagccagcttcctctcctcgtttctctccttccttcctttccatctcatgctgtgtaaagctgctgtgtaatttaacttgtaaataataaagtttaactgactatatga

SEQ ID NO: 282042 - DNA, 697 bp, Homo sapiens
accagtcaccttctccctcagtaagcctccctctattccccaggacctatgatgcctactccactttctacctgaattccagtggcctcatttgtcgccatcgtctagataaagtgagtcctaggtagggctgggtggggtaaagggtagaacatttgtgtgcctcccccaactggcattaacctttctccctgcagctgatgccttcacactcacctccaacgcctgtgaagaagctgctagtgggagccctggtggccctggggctgtcagagccagaacctgacttaaacctgtgttccaagccctgatccttgaccttggagtggaggcagcactgaagactgctacgcccaagagaaggaggtggaggcagccaagaatctcaggagccagcttcctctcctcgtttctctccttccttcctttccatctcatgctgtgtaaagctgctgtgtaatttaacttgtaaataataaagtttaactgactatatgagatagaatttcacatatcactttctctagatcccaaatgttcccacaagctttattccaaaaataattttatttaataggtattaaataatgtatagaaggaaaaggagctggtgtcaggttctgtttacgtccttctcttaccctagctcttctcgtgttttgcctatttttttgggcattttcttagcatggggatc

SEQ ID NO: 282043 - DNA, 467 bp, Homo sapiens
gaacatctgtctgtcatgtatgagagactgagacaagaggtaagtcagtgcaaaagtggccttcgtctacagtgggaaggatgtgggtaatccttggacgtacagggatagtcaactggattcttttttggaaccatgaggcaggcatagaaatatattataaacattttcctgagaaaatgatgttccagccaggcacggtggctcaaagtgctgtaatcccagcactttgggaggcttaggcaggtggatcacctgaggtcaggagttcaagaccagcctggccaacatggtgaaaccccatctctactaaaaacacaaaaatcagccaggcatggtggcagacgcctataatcccagctactcaggaggctgaggcaggagaatcgcttgaacccaggaggcgcagtgaaaggaggtatctccattgtactccagcctaggcaacagagcgagactccgtctca

SEQ ID NO: 282044 - DNA, 636 bp, Homo sapiens
ggctggtacgcccccggagtaaacgggatgaattcatcaatgagatcctcaacatacgtaccaagggccggacatggtacattctttcactgaccctctgccgtttcctggcctggaattattttgcacaccttcgtttggaggttttacagctgacccgccaccctgagaactggaccctgcaagcccggtggcggcttgtggggctgcccgtccacttgctctttttgcggttctacaagcgtgacaaagacgagcattaccggacctatgatgcctactccactttctacctgaattccagtggcctcatttgtcgccatcgtctagataaactgatgccttcacactcacctccaacgcctgtgaagaagctgctagtgggagccctggtggccctggggctgtcagagccagaacctgacttaaacctgtgttccaagccctgatccttgaccttggagtggaggcagcactgaagactgctacgcccaagagaaggaggtggaggcagccaagaatctcaggagccagcttcctctcctcgtttctctccttccttcctttccatctcatgctgtgtaaagctgctgtgtaatttaacttgtaaataataaagtttaactgactatatga

SEQ ID NO: 282045 - DNA, 1479 bp, Homo sapiens
gtgccctgcagcgcgtggacaggctaggggtcgcgggagcgggagggaggcgctgccgggcctgtcgcgcaaggacgtcggtcctcccaggtttgagggcggtcaggcggggtcaaggccaggcagcggggcgcgtctgcgttgcgcccgactctccgcggttacctgtgcctagaggtgatttgaagggcaggggccgagagattcgtagccctgctgcggcgccgtcccggagttccccggcccagaccagacccgcggggcgccctcagcagcccgcccgtcttgcactcggagagcggtcctggcaggaaggccggccagtgtgcacccggttcgggcccctgcgcccgggctggcaagatggccacgcccccagcagagacggcgcctctaggacaccatcggggaccgaggaccagctttatccagggactctaccattcccacccctttggccccactccacgacaaccacttccccatcttctcctctattctggtctcccctgcccccacgccttcccacccagcgtcttccccaggttcccccactacctctccctcagatccaggccctcagctcagcatgggtggttctccctccaggaaagggggaggagggaccaggacctgagttgcatagcggctgcctggatgggcttagaagcctttttgagggacctccctgcccctatcctggggcttggatacctttccaagtccctggaactgcccacccttcccctgccaccccgtcaggagatcctagtatggaggaacatctgtctgtcatgtatgagagactgagacaagagcttcccaagctcttccttcagtcccacgactacagtctgtattccttggatgtggaattcatcaatgagatcctcaacatacgtaccaagggccggacatggtacattctttcactgaccctctgccgtttcctggcctggaattattttgcacaccttcgtttggaggttttacagctgacccgccaccctgagaactggaccctgcaagcccggtggcggcttgtggggctgcccgtccacttgctctttttgcggttctacaagcgtgacaaagacgagcattaccggacctatgatgcctactccactttctacctgaattccagtggcctcatttgtcgccatcgtctagataaactgatgccttcacactcacctccaacgcctgtgaagaagctgctagtgggagccctggtggccctggggctgtcagagccagaacctgacttaaacctgtgttccaagccctgatccttgaccttggagtggaggcagcactgaagactgctacgcccaagagaaggaggtggaggcagccaagaatctcaggagccagcttcctctcctcgtttctctccttccttcctttccatctcatgctgtgtaaagctgctgtgtaatttaacttgtaaataataaagtttaactgactatatga

SEQ ID NO: 282046 - DNA, 1489 bp, Homo sapiens
cccctcgccccggcctcctttccccttcacgaagccggctctggggcgcgctcacccctgtgaggaggccggaggtcggactcaggaggctccttctccactcccggaagatcatgtaccagcccagccggggtgcggcccggcgtctcggcccttgcctgcgcgcctaccaggctcgaccccagaggtgatttgaagggcaggggccgagagattcgtagccctgctgcggcgccgtcccggagttccccggcccagaccagacccgcggggcgccctcagcagcccgcccgtcttgcactcggagagcggtcctggcaggaaggccggccagtgtgcacccggttcgggcccctgcgcccgggctggcaagatggccacgcccccagcagagacggcgcctctaggacaccatcggggaccgaggaccagctttatccagggactctaccattcccacccctttggccccactccacgacaaccacttccccatcttctcctctattctggtctcccctgcccccacgccttcccacccagcgtcttccccaggttcccccactacctctccctcagatccaggccctcagctcagcatgggtggttctccctccaggaaagggggaggagggaccaggacctgagttgcatagcggctgcctggatgggcttagaagcctttttgagggacctccctgcccctatcctggggcttggatacctttccaagtccctggaactgcccacccttcccctgccaccccgtcaggagatcctagtatggaggaacatctgtctgtcatgtatgagagactgagacaagagcttcccaagctcttccttcagtcccacgactacagtctgtattccttggatgtggaattcatcaatgagatcctcaacatacgtaccaagggccggacatggtacattctttcactgaccctctgccgtttcctggcctggaattattttgcacaccttcgtttggaggttttacagctgacccgccaccctgagaactggaccctgcaagcccggtggcggcttgtggggctgcccgtccacttgctctttttgcggttctacaagcgtgacaaagacgagcattaccggacctatgatgcctactccactttctacctgaattccagtggcctcatttgtcgccatcgtctagataaactgatgccttcacactcacctccaacgcctgtgaagaagctgctagtgggagccctggtggccctggggctgtcagagccagaacctgacttaaacctgtgttccaagccctgatccttgaccttggagtggaggcagcactgaagactgctacgcccaagagaaggaggtggaggcagccaagaatctcaggagccagcttcctctcctcgtttctctccttccttcctttccatctcatgctgtgtaaagctgctgtgtaatttaacttgtaaataataaagtttaactgactatatga

SEQ ID NO: 282047 - DNA, 1332 bp, Homo sapiens
cccctcgccccggcctcctttccccttcacgaagccggctctggggcgcgctcacccctgtgaggaggccggaggtcggactcaggaggctccttctccactcccggaagatcatgtaccagcccagccggggtgcggcccggcgtctcggcccttgcctgcgcgcctaccaggctcgaccccaggaccagctttatccagggactctaccattcccacccctttggccccactccacgacaaccacttccccatcttctcctctattctggtctcccctgcccccacgccttcccacccagcgtcttccccaggttcccccactacctctccctcagatccaggccctcagctcagcatgggtggttctccctccaggaaagggggaggagggaccaggacctgagttgcatagcggctgcctggatgggcttagaagcctttttgagggacctccctgcccctatcctggggcttggatacctttccaagtccctggaactgcccacccttcccctgccaccccgtcaggagatcctagtatggaggaacatctgtctgtcatgtatgagagactgagacaagagcttcccaagctcttccttcagtcccacgactacagtctgtattccttggatgtggaattcatcaatgagatcctcaacatacgtaccaagggccggacatggtacattctttcactgaccctctgccgtttcctggcctggaattattttgcacaccttcgtttggaggttttacagctgacccgccaccctgagaactggaccctgcaagcccggtggcggcttgtggggctgcccgtccacttgctctttttgcggttctacaagcgtgacaaagacgagcattaccggacctatgatgcctactccactttctacctgaattccagtggcctcatttgtcgccatcgtctagataaagtgagtcctaggtagggctgggtggggtaaagggtagaacatttgtgtgcctcccccaactggcattaacctttctccctgcagctgatgccttcacactcacctccaacgcctgtgaagaagctgctagtgggagccctggtggccctggggctgtcagagccagaacctgacttaaacctgtgttccaagccctgatccttgaccttggagtggaggcagcactgaagactgctacgcccaagagaaggaggtggaggcagccaagaatctcaggagccagcttcctctcctcgtttctctccttccttcctttccatctcatgctgtgtaaagctgctgtgtaatttaacttgtaaataataaagtttaactgactatatga

SEQ ID NO: 282048 - DNA, 757 bp, Homo sapiens
cccctcgccccggcctcctttccccttcacgaagccggctctggggcgcgctcacccctgtgaggaggccggaggtcggactcaggaggctccttctccactcccggaagatcatgtaccagcccagccggggtgcggcccggcgtctcggcccttgcctgcgcgcctaccaggctcgaccccaggggccggacatggtacattctttcactgaccctctgccgtttcctggcctggaattattttgcacaccttcgtttggaggttttacagctgacccgccaccctgagaactggaccctgcaagcccggtggcggcttgtggggctgcccgtccacttgctctttttgcggttctacaagcgtgacaaagacgagcattaccggacctatgatgcctactccactttctacctgaattccagtggcctcatttgtcgccatcgtctagataaactgatgccttcacactcacctccaacgcctgtgaagaagctgctagtgggagccctggtggccctggggctgtcagagccagaacctgacttaaacctgtgttccaagccctgatccttgaccttggagtggaggcagcactgaagactgctacgcccaagagaaggaggtggaggcagccaagaatctcaggagccagcttcctctcctcgtttctctccttccttcctttccatctcatgctgtgtaaagctgctgtgtaatttaacttgtaaataataaagtttaactgactatatga

SEQ ID NO: 282049 - DNA, 3357 bp, Homo sapiens
  misc_feature (2)..(3): n is a, c, g, or t
gnngagggcggggccggaggtttcgattagttgtctctgccgctggggaaggtaaagcggcgacggcgtcctcaggagctgtggggtcccctgctagaagtgggggactcggcgggggagtcatttaatacttcatgattagaacaaatatgtgaaagttcccaccaaccagtgagaatttcttccttcagacggttttggatcttactgcacagctttctgagaagttcttttggtgccatgttttgtggcttgcatcaaaagaggagtttgtcttcatgaagattcctaacattggtaatgtgatgaataaatttgagatccttggggttgtaggtgaaggagcctatggagttgtacttaaatgcagacacaaggaaacacatgaaattgtggcgatcaagaaattcaaggacagtgaagaaaatgaagaagtcaaagaaacgactttacgagagcttaaaatgcttcggactctcaagcaggaaaacattgtggagttgaaggaagcatttcgtcggaggggaaagttgtacttggtgtttgagtatgttgaaaaaaatatgctcgaattgctggaagaaatgccaaatggagttccacctgagaaagtaaaaagctacatctatcagctaatcaaggctattcactggtgccataagaatgatattgtccatcgagatataaaaccagaaaatctcttaatcagccacaatgatgtcctaaaactgtgtgactttggttttgctcgtaatctgtcagaaggcaataatgctaattacacagagtacgttgccaccagatggtatcggtccccagaactcttacttggcgctccctatggaaagtccgtggacatgtggtcggtgggctgtattcttggggagcttagcgatggacagcctttatttcctggagaaagtgaaattgaccaactttttactattcagaaggtgctaggaccacttccatctgagcagatgaagcttttctacagtaatcctcgcttccatgggctccggtttccagctgttaaccatcctcagtccttggaaagaagataccttggaattttgaatagtgttctacttgacctaatgaagaatttactgaagttggacccagctgacagatacttgacagaacagtgtttgaatcaccctacatttcaaacccagagacttctggatcgttctccttcaaggtcagcaaaaagaaaaccttaccatgtggaaagcagcacattgtctaatagaaaccaagccggcaaaagtactgctttgcagtctcaccacagatctaacagcaaggacatccagaacctgagtgtaggcctgccccgggctgacgaaggtctccctgccaatgaaagcttcctaaatggaaaccttgctggagctagtcttagtccactgcacaccaaaacctaccaagcaagcagccagcctgggtctaccagcaaagatctcaccaacaacaacataccacaccttcttagcccaaaagaagccaagtcaaaaacagagtttgattttaatattgacccaaagccttcagaaggcccagggacaaagtacctcaagtcaaacagcagatctcagcagaaccgccactcattcatggaaagctctcaaagcaaagctgggacactgcagcccaatgaaaagcagagtcggcatagctatattgacacaattccccagtcctctaggagtccctcctacaggaccaaggccaaaagccatggggcactgagtgactccaagtctgtgagcaacctttctgaagccagggcccaaattgcggagcccagtaccagtaggtacttcccatctagctgcttagacttgaattctcccaccagcccaacccccaccagacacagtgacacgagaactttgctcagcccttctggaagaaataaccgaaatgagggaacgctggactcacgtcgaaccacaaccagacattctaagacgatggaggaattgaagctgccggagcacatggacagtagccattcccattcactgtctgcacctcacgaatctttttcttatggactgggctacaccagccccttttcttcccagcaacgtcctcataggcattctatgtatgtgacccgtgacaaagtgagagccaagggcttggatggaagcttgagcatagggcaagggatggcagctagagccaacagcctgcaactcttgtcaccccagcctggagaacagctccctccagagatgactgtggcaagatcttcggtcaaagagacctccagagaaggcacctcttccttccatacacgccagaagtctgagggtggagtgtatcatgacccacactctgatgatggcacagcccccaaagaaaatagacacctatacaatgatcctgtgccaaggagagttggtagcttttacagagtgccatctccacgtccagacaattctttccatgaaaatattagtcattcagagcaactcaaggaaaaagagaagcaaggatttttcaggtcaatgaaaaagaaaaagaagaaatctcaaacagtacccaattccgacagccctgatcttctgacgttgcagaaatccattcattctgctagcactccaagcagcagaccaaaggagtggcgccccgagaagatctcagatctgcagacccaaagccagccattaaaatcactgcgcaagttgttacatctctcttcggcctcaaatcacccggcttcctcagatccccgcttccagcccttaacagctcaacaaaccaaaaattccttctcagaaattcggattcaccccctgagccaggcctctggcgggagcagcaacatccggcaggaacccgcaccgaagggcaggccagccctccagctgccagacggtggatgtgatggcagaagacagagacaccattctggaccccaagatagacgcttcatgttaaggacgacagaacaacaaggagaatacttctgctgtggtgacccaaagaagcctcacactccgtgcgtcccaaaccgagcccttcatcgtccaatctccagtcctgctccctatccagtactccaggtccgaggcacttccatgtgcccgacactccaggtccgaggcactgatgctttcagctgcccaacccagcaatccgggttctctttcttcgtgagacacgttatgagggaagccctgattcacagggcccaggtaaaccaagctgcgctcctgacataccatgagaatgcggcactgacgggcaagtgacttctgcaagcctgcggctggtcccaatgccctgaatcacctctctcatggaagaaccaattaacaccaatgaatcaaccattaacgc

SEQ ID NO: 282050 - DNA, 3334 bp, Homo sapiens
tggggtgggggagttggaggaggaagaccctacaggaagttgagctgtactctccaacaggcgagcacatggtcgtctcctctctcccttcagggagtcatttaatacttcatgattagaacaaatatgtgaaagttcccaccaaccagtgagaatttcttccttcagacggttttggatcttactgcacagctttctgagaagttcttttggtgccatgttttgtggcttgcatcaaaagaggagtttgtcttcatgaagattcctaacattggtaatgtgatgaataaatttgagatccttggggttgtaggtgaaggagcctatggagttgtacttaaatgcagacacaaggaaacacatgaaattgtggcgatcaagaaattcaaggacagtgaagaaaatgaagaagtcaaagaaacgactttacgagagcttaaaatgcttcggactctcaagcaggaaaacattgtggagttgaaggaagcatttcgtcggaggggaaagttgtacttggtgtttgagtatgttgaaaaaaatatgctcgaattgctggaagaaatgccaaatggagttccacctgagaaagtaaaaagctacatctatcagctaatcaaggctattcactggtgccataagaatgatattgtccatcgagatataaaaccagaaaatctcttaatcagccacaatgatgtcctaaaactgtgtgactttggttttgctcgtaatctgtcagaaggcaataatgctaattacacagagtacgttgccaccagatggtatcggtccccagaactcttacttggcgctccctatggaaagtccgtggacatgtggtcggtgggctgtattcttggggagcttagcgatggacagcctttatttcctggagaaagtgaaattgaccaactttttactattcagaaggtgctaggaccacttccatctgagcagatgaagcttttctacagtaatcctcgcttccatgggctccggtttccagctgttaaccatcctcagtccttggaaagaagataccttggaattttgaatagtgttctacttgacctaatgaagaatttactgaagttggacccagctgacagatacttgacagaacagtgtttgaatcaccctacatttcaaacccagagacttctggatcgttctccttcaaggtcagcaaaaagaaaaccttaccatgtggaaagcagcacattgtctaatagaaaccaagccggcaaaagtactgctttgcagtctcaccacagatctaacagcaaggacatccagaacctgagtgtaggcctgccccgggctgacgaaggtctccctgccaatgaaagcttcctaaatggaaaccttgctggagctagtcttagtccactgcacaccaaaacctaccaagcaagcagccagcctgggtctaccagcaaagatctcaccaacaacaacataccacaccttcttagcccaaaagaagccaagtcaaaaacagagtttgattttaatattgacccaaagccttcagaaggcccagggacaaagtacctcaagtcaaacagcagatctcagcagaaccgccactcattcatggaaagctctcaaagcaaagctgggacactgcagcccaatgaaaagcagagtcggcatagctatattgacacaattccccagtcctctaggagtccctcctacaggaccaaggccaaaagccatggggcactgagtgactccaagtctgtgagcaacctttctgaagccagggcccaaattgcggagcccagtaccagtaggtacttcccatctagctgcttagacttgaattctcccaccagcccaacccccaccagacacagtgacacgagaactttgctcagcccttctggaagaaataaccgaaatgagggaacgctggactcacgtcgaaccacaaccagacattctaagacgatggaggaattgaagctgccggagcacatggacagtagccattcccattcactgtctgcacctcacgaatctttttcttatggactgggctacaccagccccttttcttcccagcaacgtcctcataggcattctatgtatgtgacccgtgacaaagtgagagccaagggcttggatggaagcttgagcatagggcaagggatggcagctagagccaacagcctgcaactcttgtcaccccagcctggagaacagctccctccagagatgactgtggcaagatcttcggtcaaagagacctccagagaaggcacctcttccttccatacacgccagaagtctgagggtggagtgtatcatgacccacactctgatgatggcacagcccccaaagaaaatagacacctatacaatgatcctgtgccaaggagagttggtagcttttacagagtgccatctccacgtccagacaattctttccatgaaaatattagtcattcagagcaactcaaggaaaaagagaagcaaggatttttcaggtcaatgaaaaagaaaaagaagaaatctcaaacagtacccaattccgacagccctgatcttctgacgttgcagaaatccattcattctgctagcactccaagcagcagaccaaaggagtggcgccccgagaagatctcagatctgcagacccaaagccagccattaaaatcactgcgcaagttgttacatctctcttcggcctcaaatcacccggcttcctcagatccccgcttccagcccttaacagctcaacaaaccaaaaattccttctcagaaattcggattcaccccctgagccaggcctctggcgggagcagcaacatccggcaggaacccgcaccgaagggcaggccagccctccagctgccagacggtggatgtgatggcagaagacagagacaccattctggaccccaagatagacgcttcatgttaaggacgacagaacaacaaggagaatacttctgctgtggtgacccaaagaagcctcacactccgtgcgtcccaaaccgagcccttcatcgtccaatctccagtcctgctccctatccagtactccaggtccgaggcacttccatgtgcccgacactccaggtccgaggcactgatgctttcagctgcccaacccagcaatccgggttctctttcttcgtgagacacgttatgagggaagccctgattcacagggcccaggtaaaccaagctgcgctcctgacataccatgagaatgcggcactgacgggcaagtgacttctgcaagcctgcggctggtcccaatgccctgaatcacctctctcatggaagaaccaattaacaccaatgaatcaaccattaacgc

SEQ ID NO: 282051 - DNA, 3459 bp, Homo sapiens
  misc_feature (2)..(3): n is a, c, g, or t
gnngagggcggggccggaggtttcgattagttgtctctgccgctggggaaggtaaagcggcgacggcgtcctcaggagctgtggggtcccctgctagaagtgggggactcggcgggggagtcatttaatacttcatgattagaacaaatatgtgaaagttcccaccaaccagtgagaatttcttccttcagacggttttggatcttactgcacagctttctgagaagttcttttggtgccatgttttgtggcttgcatcaaaagaggagtttgtcttcatgaagattcctaacattggtaatgtgatgaataaatttgagatccttggggttgtaggtgaaggagcctatggagttgtacttaaatgcagacacaaggaaacacatgaaattgtggcgatcaagaaattcaaggacagtgaagaaaatgaagaagtcaaagaaacgactttacgagagcttaaaatgcttcggactctcaagcaggaaaacattgtggagttgaaggaagcatttcgtcggaggggaaagttgtacttggtgtttgagtatgttgaaaaaaatatgctcgaattgctggaagaaatgccaaatggagttccacctgagaaagtaaaaagctacatctatcagctaatcaaggctattcactggtgccataagaatgatattgtccatcgagatataaaaccagaaaatctcttaatcagccacaatgatgtcctaaaactgtgtgactttggttttgctcgtaatctgtcagaaggcaataatgctaattacacagagtacgttgccaccagatggtatcggtccccagaactcttacttggcgctccctatggaaagtccgtggacatgtggtcggtgggctgtattcttggggagcttagcgatggacagcctttatttcctggagaaagtgaaattgaccaactttttactattcagaaggtgctaggaccacttccatctgagcagatgaagcttttctacagtaatcctcgcttccatgggctccggtttccagctgttaaccatcctcagtccttggaaagaagataccttggaattttgaatagtgttctacttgacctaatgaagaatttactgaagttggacccagctgacagatacttgacagaacagtgtttgaatcaccctacatttcaaacccagagacttctggatcgttctccttcaaggtcagcaaaaagaaaaccttaccatgtggaaagcagcacattgtctaatagaaaccaagccggcaaaagtactgctttgcagtctcaccacagatctaacagcaaggacatccagaacctgagtgtaggcctgccccgggctgacgaaggtctccctgccaatgaaagcttcctaaatggaaaccttgctggagctagtcttagtccactgcacaccaaaacctaccaagcaagcagccagcctgggtctaccagcaaagatctcaccaacaacaacataccacaccttcttagcccaaaagaagccaagtcaaaaacagagtttgattttaatattgacccaaagccttcagaaggcccagggacaaagtacctcaagtcaaacagcagatctcagcagaaccgccactcattcatggaaagctctcaaagcaaagctgggacactgcagcccaatgaaaagcagagtcggcatagctatattgacacaattccccagtcctctaggagtccctcctacaggaccaaggccaaaagccatggggcactgagtgactccaagtctgtgagcaacctttctgaagccagggcccaaattgcggagcccagtaccagtaggtacttcccatctagctgcttagacttgaattctcccaccagcccaacccccaccagacacagtgacacgagaactttgctcagcccttctggaagaaataaccgaaatgagggaacgctggactcacgtcgaaccacaaccagacattctaagacgatggaggaattgaagctgccggagcacatggacagtagccattcccattcactgtctgcacctcacgaatctttttcttatggactgggctacaccagccccttttcttcccagcaacgtcctcataggcattctatgtatgtgacccgtgacaaagtgagagccaagggcttggatggaagcttgagcatagggcaagggatggcagctagagccaacagcctgcaactcttgtcaccccagcctggagaacagctccctccagagatgactgtggcaagatcttcggtcaaagagacctccagagaaggcacctcttccttccatacacgccagaagtctgagggtggagtgtatcatgacccacactctgatgatggcacagcccccaaagaaaatagacacctatacaatgatcctgtgccaaggagagttggtagcttttacagagtgccatctccacgtccagacaattctttccatgaaaataatgtgtcaactagagtttcttctctaccatcagagagcagttctggaaccaaccactcaaaaagacaaccagcattcgatccatggaaaagtcctgaaaatattagtcattcagagcaactcaaggaaaaagagaagcaaggatttttcaggtcaatgaaaaagaaaaagaagaaatctcaaacagtacccaattccgacagccctgatcttctgacgttgcagaaatccattcattctgctagcactccaagcagcagaccaaaggagtggcgccccgagaagatctcagatctgcagacccaaagccagccattaaaatcactgcgcaagttgttacatctctcttcggcctcaaatcacccggcttcctcagatccccgcttccagcccttaacagctcaacaaaccaaaaattccttctcagaaattcggattcaccccctgagccaggcctctggcgggagcagcaacatccggcaggaacccgcaccgaagggcaggccagccctccagctgccagacggtggatgtgatggcagaagacagagacaccattctggaccccaagatagacgcttcatgttaaggacgacagaacaacaaggagaatacttctgctgtggtgacccaaagaagcctcacactccgtgcgtcccaaaccgagcccttcatcgtccaatctccagtcctgctccctatccagtactccaggtccgaggcacttccatgtgcccgacactccaggtccgaggcactgatgctttcagctgcccaacccagcaatccgggttctctttcttcgtgagacacgttatgagggaagccctgattcacagggcccaggtaaaccaagctgcgctcctgacataccatgagaatgcggcactgacgggcaagtgacttctgcaagcctgcggctggtcccaatgccctgaatcacctctctcatggaagaaccaattaacaccaatgaatcaaccattaacgc

SEQ ID NO: 282052 - DNA, 959 bp, Homo sapiens
ctgcgacttgggggtgtccgagagcggcctcttcggcgtcgagaggaggtccgggaaaagtcctgaaaatattagtcattcagagcaactcaaggaaaaagagaagcaaggatttttcaggtcaatgaaaaagaaaaagaagaaatctcaaacagtacccaattccgacagccctgatcttctgacgttgcagaaatccattcattctgctagcactccaagcagcagaccaaaggagtggcgccccgagaagatctcagatctgcagacccaaagccagccattaaaatcactgcgcaagttgttacatctctcttcggcctcaaatcacccggcttcctcagatccccgcttccagcccttaacagctcaacaaaccaaaaattccttctcagaaattcggattcaccccctgagccaggcctctggcgggagcagcaacatccggcaggaacccgcaccgaagggcaggccagccctccagctgccagacggtggatgtgatggcagaagacagagacaccattctggaccccaagatagacgcttcatgttaaggacgacagaacaacaaggagaatacttctgctgtggtgacccaaagaagcctcacactccgtgcgtcccaaaccgagcccttcatcgtccaatctccagtcctgctccctatccagtactccaggtccgaggcacttccatgtgcccgacactccaggtccgaggcactgatgctttcagctgcccaacccagcaatccgggttctctttcttcgtgagacacgttatgagggaagccctgattcacagggcccaggtaaaccaagctgcgctcctgacataccatgagaatgcggcactgacgggcaagtgacttctgcaagcctgcggctggtcccaatgccctgaatcacctctctcatggaagaaccaattaacaccaatgaatcaaccattaacgc

SEQ ID NO: 282053 - DNA, 784 bp, Homo sapiens
ctgctgcacacacagcctcacacaaccacacactcacagccacaaacccccagagtcatgcacatgccgacgcaccttgtggcacatgcacacacaaccacacttgtgtgcaaagtggcagacacaaccacacatgcatagaagcaagtctctggaccccttctgcatcccacagagggggctcccctgctgtgtttgattggttcttcgaagcggcctgccctgcctccctgcaggaggatccccccatcctgcggcagttccctccagacttcagggaccaggaagctatgcagatggtgcctaaattctgcttcccttttgatgtggaaagggagccccccagccccgccgtgcagcatttcaccttcgccctcacagaccttgccggcaaccgcagatttggtttctgccgcctgcgggcgggtacccagagctgtctctgcatcctcagccacctgccttggttcgaggtgttttacaagctattgaacacagtgggagacctcctagcccaggaccaagtcaccgaggcagaggaacttcttcaaaatctgtttcagcagtccctgtctgggccccaggcctcagtggggcttgagctgggcagcggagtgacggtctccagcgggcagggtatccccccccctacccgggggaatagcaagccgcttacctgctttcgtggaccccgggactccggccggctggccatcccatcccttgagaaacagggaacctaatcggaaactgggtgggaggacagtgacctgacgagaaccat

SEQ ID NO: 282054 - DNA, 2509 bp, Homo sapiens
taaaccattaacaactcttcccccttttattttttatttattatactcattttttgttggaatcctacccgcccccctccgccccgcccacggcccctttaaaattgacagccaagatttgctggcaaacattctttttgtccttggatgctacaattccaggttctgccttttatctcccaagctcagaagtttcctggggccaatttttgcagctcaaaattgtccgtgcgattttgttcttcaccgctttgaaacaggaacaccttgccctgttgctttgccactccccattttctttggggatgactgcctccaggaatactcattttatattagtcaaaggggtgaaagtttgcattgacttcttaggtggtgtatggggggtggtgaacgtatttgagacatgcagatggcaaaaaaaaaagctatcttaggggacagaaggctgagctctcaaatgcccaggatcccaccacccttgggtaattctctgtccactcctttataggccaagagtggcttgaagggggtgcagagccttctaatgtataaggtaagatcaactggccgggtgcagtggctcacccctgtaatcccagcactttgggaggccgaggcaggaggattgcttgagcccaggagtttgagaccagcttgggcaatatagtggggccttgtctctacaaaaaaatagttaaaaattatctgaatatggattgcttgagtctagaaggcggaggttgcagtaagctgagatagcgccactgtacaccagcctgggtgacagagagaccctgtctcaaaaaaaagaagactgtggctgggcacggtggctcacgcctgtaaccccagcactttgggaggccgaggagggtggatcacttgaggtcaggagttctagaccagcccgaccaacatggtgaaaccccatctctactaaaaatacagaattagctgggtatggtggcgcacgcctgtaatcccagctacttgggaagctgaggcatgagaatcgcttgaacctgggagtcagaggttgcagtgagccgagatggcaccactgcactccagcctgggcaacatgagtgaagcttcatttcaaacaacaaaaaaaaagactaactaaagaccaatggtagggggtggtggggagactctgtggcagaggttcccagttcactcttctcttcctaggatggggactctgtcctgcagagggggggctctctgagggccccagccctccccagccgctcagaccgcctgcagcaacgcctcccaatcactcagcactttggaaagctttgagaaccggccccttcgccccagcaggagacgccagctggaagagggaacttccgagcccccaggggcggggacacccccactgagccctgaggatgaggggtgcccgtgggcagaagaagctctggacagcagcttcttggggtctggagaagaactggatttgttgagcgagattctggacagtcttagcatgggagccaagagcgcaggcagcctgagaccgagccagagtttagactgctgtcacagaggagacctggacagctgcttcagcctgcccaacataccaagatggcaaccagacgataagaaactaccagagccggagccccagcccctttccctgccatccctgcaaaatgcctcgtctttggatgccaccagctcttcaaaggactccaggtcccagctgataccctcagagtccgaccaagaagtcacgtctccatcccagtcctcaacagcttctgcagacccaagcatctggggggaccccaaaccctctcctctcacagagcccctaattcttcatctcaccccttcccacaaggcagctgaagattctacagcccaggaaaaccccactccctggctctccactgcacccactgagcccagccctccagaaagcccccaaattctggcccccacaaagcccaactttgatatagcctggacgtcccagccccttgatccttcctcagaccccagttctctggaggaccccagagcccggcctcccaaagccctgctggcagagcgcgctcacctccagccacgggaggaaccaggagccctgaattcccctgctacacccaccagcaactgtcaaaagtcccagcccagcagccggcccagagtcgctgatcttaagaagtgctttgagggttaagaatcaggggtccaagagagaccccagtccctcaataaagccacaagagcccaaaaaagctggtttttttcctggtgaatttctctggtgccctcactctgctcggaaatccatcccacccacctctgtccctccaagggcagcctctctaactggctcctagcagggaattccaggaagcctcctggtcttctagaatcctggcaaccttacaattcctctcggcatttgtcacttccatctcagctaatgcacccaccagctcaaacacaccaataaagcttttgttacatctcaaaaaaaaat

SEQ ID NO: 282055 - DNA, 2746 bp, Homo sapiens
acacaggaagctgagccggcttggggcccagcatacacaggcccccaggacccctggggagagggccccgctgggctggccctgcagggaccatggaatccagagctgaatccccccatcctgcggcagttccctccagacttcagggaccaggaagctatgcagatggtgcctaaattctgcttcccttttgatgtggaaagggagccccccagccccgccgtgcagcatttcaccttcgccctcacagaccttgccggcaaccgcagatttggtttctgccgcctgcgggcgggtacccagagctgtctctgcatcctcagccacctgccttggttcgaggtgttttacaagctattgaacacagtgggagacctcctagcccaggaccaagtcaccgaggcagaggaacttcttcaaaatctgtttcagcagtccctgtctgggccccaggcctcagtggggcttgagctgggcagcggagtgacggtctccagcgggcagggtatccccccccctacccgggggaatagcaagccgctttcctgcttcgtggccccggactccggccgcctgccatccatccctgagaacaggaacctaacggagctggtggtggccgtgactgacgagaacatcgtggggctgttcgcggcgctcctggccgagagaagagtcctgctcaccgccagcaaactcagcaccctgacctcgtgcgtccacgcgtcctgcgcgctcctgtaccccatgcgctgggagcacgtgctgatccccacgctgcccccacacctgctggactactgctgcgcgcccatgccctacctcattggagtgcacgccagtctcgccgagagagtacgagaaaaagccctggaggacgtcgtggtgctgaacgtggacgccaataccttggagacgacctttaacgacgtgcaggcgctgcctccagacgtggtgtccctgctgaggctccggctcaggaaggtcgccctggcccccggggaaggggtgtcccgtctcttcctcaaagcccaggccctgctcttcggggggtaccgcgacgcactcgtctgcagcccgggccagccagtgaccttcagtgaggaagtcttcttggcccagaagcctggggcacctctgcaggccttccaccggcgggctgtgcacctgcagctgttcaaacagttcatcgaagcccggctggagaagctcaacaagggggagggcttctcagatcaattcgagcaggagatcactggctgcggggcctccccaggggcccttcgatcctatcagctctgggccgacaatctaaagaaaggtggtggcgccctcctgcactcagtcaaggccaagacccaaccagccgtcaagaacatgtaccgctcggccaagagtggcttgaagggggtgcagagccttctaatgtataaggatggggactctgtcctgcagagggggggctctctgagggccccagccctccccagccgctcagaccgcctgcagcaacgcctcccaatcactcagcactttggaaagctttgagaaccggccccttcgccccagcaggagacgccagctggaagagggaacttccgagcccccaggggcggggacacccccactgagccctgaggatgaggggtgcccgtgggcagaagaagctctggacagcagcttcttggggtctggagaagaactggatttgttgagcgagattctggacagtcttagcatgggagccaagagcgcaggcagcctgagaccgagccagagtttagactgctgtcacagaggagacctggacagctgcttcagcctgcccaacataccaagatggcaaccagacgataagaaactaccagagccggagccccagcccctttccctgccatccctgcaaaatgcctcgtctttggatgccaccagctcttcaaaggactccaggtcccagctgataccctcagagtccgaccaagaagtcacgtctccatcccagtcctcaacagcttctgcagacccaagcatctggggggaccccaaaccctctcctctcacagagcccctaattcttcatctcaccccttcccacaaggcagctgaagattctacagcccaggaaaaccccactccctggctctccactgcacccactgagcccagccctccagaaagcccccaaattctggcccccacaaagcccaactttgatatagcctggacgtcccagccccttgatccttcctcagaccccagttctctggaggaccccagagcccggcctcccaaagccctgctggcagagcgcgctcacctccagccacgggaggaaccaggagccctgaattcccctgctacacccaccagcaactgtcaaaagtcccagcccagcagccggcccagagtcgctgatcttaagaagtgctttgagggttaagaatcaggggtccaagagagaccccagtccctcaataaagccacaagagcccaaaaaagctggtttttttcctggtgaatttctctggtgccctcactctgctcggaaatccatcccacccacctctgtccctccaagggcagcctctctaactggctcctagcagggaattccaggaagcctcctggtcttctagaatcctggcaaccttacaattcctctcggcatttgtcacttccatctcagctaatgcacccaccagctcaaacacaccaataaagcttttgttacatctcaaaaaaaaat

SEQ ID NO: 282056 - DNA, 1238 bp, Homo sapiens
gaatcttctccgcctaggcacaggaaaagtttggaaaggacaagtccatcggctcatcccacaggagacgccagctggaagagggaacttccgagcccccaggggcggggacacccccactgagccctgaggatgaggggtgcccgtgggcagaagaagctctggacagcagcttcttggggtctggagaagaactggatttgttgagcgagattctggacagtcttagcatgggagccaagagcgcaggcagcctgagaccgagccagagtttagactgctgtcacagaggagacctggacagctgcttcagcctgcccaacataccaagatggcaaccagacgataagaaactaccagagccggagccccagcccctttccctgccatccctgcaaaatgcctcgtctttggatgccaccagctcttcaaaggactccaggtcccagctgataccctcagagtccgaccaagaagtcacgtctccatcccagtcctcaacagcttctgcagacccaagcatctggggggaccccaaaccctctcctctcacagagcccctaattcttcatctcaccccttcccacaaggcagctgaagattctacagcccaggaaaaccccactccctggctctccactgcacccactgagcccagccctccagaaagcccccaaattctggcccccacaaagcccaactttgatatagcctggacgtcccagccccttgatccttcctcagaccccagttctctggaggaccccagagcccggcctcccaaagccctgctggcagagcgcgctcacctccagccacgggaggaaccaggagccctgaattcccctgctacacccaccagcaactgtcaaaagtcccagcccagcagccggcccagagtcgctgatcttaagaagtgctttgagggttaagaatcaggggtccaagagagaccccagtccctcaataaagccacaagagcccaaaaaagctggtttttttcctggtgaatttctctggtgccctcactctgctcggaaatccatcccacccacctctgtccctccaagggcagcctctctaactggctcctagcagggaattccaggaagcctcctggtcttctagaatcctggcaaccttacaattcctctcggcatttgtcacttccatctcagctaatgcacccaccagctcaaacacaccaataaagcttttgttacatctcaaaaaaaaat

SEQ ID NO: 282057 - DNA, 1161 bp, Homo sapiens
ctagaggatctacagaggcacaaggaggcggggacacccccactgagccctgaggatgaggggtgcccgtgggcagaagaagctctggacagcagcttcttggggtctggagaagaactggatttgttgagcgagattctggacagtcttagcatgggagccaagagcgcaggcagcctgagaccgagccagagtttagactgctgtcacagaggagacctggacagctgcttcagcctgcccaacataccaagatggcaaccagacgataagaaactaccagagccggagccccagcccctttccctgccatccctgcaaaatgcctcgtctttggatgccaccagctcttcaaaggactccaggtcccagctgataccctcagagtccgaccaagaagtcacgtctccatcccagtcctcaacagcttctgcagacccaagcatctggggggaccccaaaccctctcctctcacagagcccctaattcttcatctcaccccttcccacaaggcagctgaagattctacagcccaggaaaaccccactccctggctctccactgcacccactgagcccagccctccagaaagcccccaaattctggcccccacaaagcccaactttgatatagcctggacgtcccagccccttgatccttcctcagaccccagttctctggaggaccccagagcccggcctcccaaagccctgctggcagagcgcgctcacctccagccacgggaggaaccaggagccctgaattcccctgctacacccaccagcaactgtcaaaagtcccagcccagcagccggcccagagtcgctgatcttaagaagtgctttgagggttaagaatcaggggtccaagagagaccccagtccctcaataaagccacaagagcccaaaaaagctggtttttttcctggtgaatttctctggtgccctcactctgctcggaaatccatcccacccacctctgtccctccaagggcagcctctctaactggctcctagcagggaattccaggaagcctcctggtcttctagaatcctggcaaccttacaattcctctcggcatttgtcacttccatctcagctaatgcacccaccagctcaaacacaccaataaagcttttgttacatctcaaaaaaaaat

SEQ ID NO: 282058 - DNA, 569 bp, Homo sapiens
cgactgctgcgttggacttttgacagttgctgtttgatatagcctggacgtcccagccccttgatccttcctcagaccccagttctctggaggaccccagagcccggcctcccaaagccctgctggcagagcgcgctcacctccagccacgggaggaaccaggagccctgaattcccctgctacacccaccagcaactgtcaaaagtcccagcccagcagccggcccagagtcgctgatcttaagaagtgctttgagggttaagaatcaggggtccaagagagaccccagtccctcaataaagccacaagagcccaaaaaagctggtttttttcctggtgaatttctctggtgccctcactctgctcggaaatccatcccacccacctctgtccctccaagggcagcctctctaactggctcctagcagggaattccaggaagcctcctggtcttctagaatcctggcaaccttacaattcctctcggcatttgtcacttccatctcagctaatgcacccaccagctcaaacacaccaataaagcttttgttacatctcaaaaaaaaat

SEQ ID NO: 282059 - DNA, 2403 bp, Homo sapiens
acacaggaagctgagccggcttggggcccagcatacacaggcccccaggacccctggggagagggccccgctgggctggccctgcagggaccatggaatccagagctgaagggggctcccctgctgtgtttgattggttcttcgaagcggcctgccctgcctccctgcaggaggatccccccatcctgcggcagttccctccagacttcagggaccaggaagctatgcagatggtgcctaaattctgcttcccttttgatgtggaaagggagccccccagccccgccgtgcagcatttcaccttcgccctcacagaccttgccggcaaccgcagatttggtttctgccgcctgcgggcgggtacccagagctgtctctgcatcctcagccacctgccttggttcgaggtgttttacaagctattgaacacagtgggagacctcctagcccaggaccaagtcaccgaggcagaggaacttcttcaaaatctgtttcagcagtccctgtctgggccccaggcctcagtggggcttgagctgggcagcggagtgacggtctccagcgggcagggtatccccccccctacccgggggaatagcaagccgctttcctgcttcgtggccccggactccggccgcctgccatccatccctgagaacaggaacctaacggagctggtggtggccgtgactgacgagaacatcgtggggctgttcgcggcgctcctggccgagagaagagtcctgctcaccgccagcaaactcagcaccctgacctcgtgcgtccacgcgtcctgcgcgctcctgtaccccatgcgctgggagcacgtgctgatccccacgctgcccccacacctgctggactactgctgcgcgcccatgccctacctcattggagtgcacgccagtctcgccgagagagtacgagaaaaagccctggaggacgtcgtggtgctgaacgtggacgccaataccttggagacgacctttaacgacgtgcaggcgctgcctccagacgtggtgtccctgctgaggctccggctcaggaaggtcgccctggcccccggggaaggggtgtcccgtctcttcctcaaagcccaggccctgctcttcggggggtaccgcgacgcactcgtctgcagcccgggccagccagtgaccttcagtgaggaagtcttcttggcccagaagcctggggcacctctgcaggccttccaccggcgggctgtgcacctgcagctgttcaaacagttcatcgaagcccggctggagaagctcaacaagggggagggcttctcagatcaattcgagcaggagatcactggctgcggggcctccccaggggcccttcgatcctatcagctctgggccgacaatctaaagaaaggtggtggcgccctcctgcactcagtcaaggccaagacccaaccagccgtcaagaacatgtaccgctcggccaagagtggcttgaagggggtgcagagccttctaatgtataaggtaagatcaactggccgggtgcagtggctcacccctgtaatcccagcactttgggaggccgaggcaggaggattgcttgagcccaggagtttgagaccagcttgggcaatatagtggggccttgtctctacaaaaaaatagttaaaaattatctgaatatggattgcttgagtctagaaggcggaggttgcagtaagctgagatagcgccactgtacaccagcctgggtgacagagagaccctgtctcaaaaaaaagaagactgtggctgggcacggtggctcacgcctgtaaccccagcactttgggaggccgaggagggtggatcacttgaggtcaggagttctagaccagcccgaccaacatggtgaaaccccatctctactaaaaatacagaattagctgggtatggtggcgcacgcctgtaatcccagctacttgggaagctgaggcatgagaatcgcttgaacctgggagtcagaggttgcagtgagccgagatggcaccactgcactccagcctgggcaacatgagtgaagcttcatttcaaacaacaaaaaaaaagactaactaaagaccaatggtagggggtggtggggagactctgtggcagaggttcccagttcactcttctcttcctaggatggggactctgtcctgcagagggggggctctctgagggccccagccctccccagccgctcagaccgcctgcagcaacgcctcccaatcactcagcactttggaaaggtgagagcgcccctccccccatgcacacacctggaattatcactgaatcctctacccatcccagtccccatccagacatctcacctccttcttcaactccccaaatatgtggcacccacttcacactcacccttctccagcaagcctcagccccc

SEQ ID NO: 282060 - DNA, 602 bp, Homo sapiens
cccctccccccatgcacacacctggaattatcactgaatcctctacccatcccagtccccatccagacatctcacctccttcttcaactccccaaatatgtggcacccacttcacactcacccttctccagcaagcctcagccccccgattctgcagtctcctgaggtcctatcgcccccaccctttgagaaccggccccttcgccccagcaggagacgccagctggaagagggaacttccgagcccccaggggcggggtaaggcaaaaagggaacagcagtgttgaaagtgggaggccaggactgatggggaggagggttcccaaactccagagcagcctgaccagggctgggggtcttgggcaaatatctgaggctgcccatcctcacccaggacacccccactgagccctgaggatgaggggtgcccgtgggcagaagaagctctggacagcagcttcttggggtctggagaagaactggatttgttgagcgagattctggacagtcttagcatgggagccaagagcgcaggcagcctgagaccgagccagagtttagactgctgtcacagaggagacctggacagctgcttcagcctg

SEQ ID NO: 282061 - DNA, 2811 bp, Homo sapiens
acacaggaagctgagccggcttggggcccagcatacacaggcccccaggacccctggggagagggccccgctgggctggccctgcagggaccatggaatccagagctgaagggggctcccctgctgtgtttgattggttcttcgaagcggcctgccctgcctccctgcaggaggatccccccatcctgcggcagttccctccagacttcagggaccaggaagctatgcagatggtgcctaaattctgcttcccttttgatgtggaaagggagccccccagccccgccgtgcagcatttcaccttcgccctcacagaccttgccggcaaccgcagatttggtttctgccgcctgcgggcgggtacccagagctgtctctgcatcctcagccacctgccttggttcgaggtgttttacaagctattgaacacagtgggagacctcctagcccaggaccaagtcaccgaggcagaggaacttcttcaaaatctgtttcagcagtccctgtctgggccccaggcctcagtggggcttgagctgggcagcggagtgacggtctccagcgggcagggtatccccccccctacccgggggaatagcaagccgctttcctgcttcgtggccccggactccggccgcctgccatccatccctgagaacaggaacctaacggagctggtggtggccgtgactgacgagaacatcgtggggctgttcgcggcgctcctggccgagagaagagtcctgctcaccgccagcaaactcagcaccctgacctcgtgcgtccacgcgtcctgcgcgctcctgtaccccatgcgctgggagcacgtgctgatccccacgctgcccccacacctgctggactactgctgcgcgcccatgccctacctcattggagtgcacgccagtctcgccgagagagtacgagaaaaagccctggaggacgtcgtggtgctgaacgtggacgccaataccttggagacgacctttaacgacgtgcaggcgctgcctccagacgtggtgtccctgctgaggctccggctcaggaaggtcgccctggcccccggggaaggggtgtcccgtctcttcctcaaagcccaggccctgctcttcggggggtaccgcgacgcactcgtctgcagcccgggccagccagtgaccttcagtgaggaagtcttcttggcccagaagcctggggcacctctgcaggccttccaccggcgggctgtgcacctgcagctgttcaaacagttcatcgaagcccggctggagaagctcaacaagggggagggcttctcagatcaattcgagcaggagatcactggctgcggggcctccccaggggcccttcgatcctatcagctctgggccgacaatctaaagaaaggtggtggcgccctcctgcactcagtcaaggccaagacccaaccagccgtcaagaacatgtaccgctcggccaagagtggcttgaagggggtgcagagccttctaatgtataaggatggggactctgtcctgcagagggggggctctctgagggccccagccctccccagccgctcagaccgcctgcagcaacgcctcccaatcactcagcactttggaaagctttgagaaccggccccttcgccccagcaggagacgccagctggaagagggaacttccgagcccccaggggcggggacacccccactgagccctgaggatgaggggtgcccgtgggcagaagaagctctggacagcagcttcttggggtctggagaagaactggatttgttgagcgagattctggacagtcttagcatgggagccaagagcgcaggcagcctgagaccgagccagagtttagactgctgtcacagaggagacctggacagctgcttcagcctgcccaacataccaagatggcaaccagacgataagaaactaccagagccggagccccagcccctttccctgccatccctgcaaaatgcctcgtctttggatgccaccagctcttcaaaggactccaggtcccagctgataccctcagagtccgaccaagaagtcacgtctccatcccagtcctcaacagcttctgcagacccaagcatctggggggaccccaaaccctctcctctcacagagcccctaattcttcatctcaccccttcccacaaggcagctgaagattctacagcccaggaaaaccccactccctggctctccactgcacccactgagcccagccctccagaaagcccccaaattctggcccccacaaagcccaactttgatatagcctggacgtcccagccccttgatccttcctcagaccccagttctctggaggaccccagagcccggcctcccaaagccctgctggcagagcgcgctcacctccagccacgggaggaaccaggagccctgaattcccctgctacacccaccagcaactgtcaaaagtcccagcccagcagccggcccagagtcgctgatcttaagaagtgctttgagggttaagaatcaggggtccaagagagaccccagtccctcaataaagccacaagagcccaaaaaagctggtttttttcctggtgaatttctctggtgccctcactctgctcggaaatccatcccacccacctctgtccctccaagggcagcctctctaactggctcctagcagggaattccaggaagcctcctggtcttctagaatcctggcaaccttacaattcctctcggcatttgtcacttccatctcagctaatgcacccaccagctcaaacacaccaataaagcttttgttacatctcaaaaaaaaat

SEQ ID NO: 282062 - DNA, 325 bp, Homo sapiens
actcagggtcctaggagctttgttggggagcggggacatcctcagacagctgggatgtccaggtctctctaacagcccttcccactccagggagccccccagccccgccgtgcagcatttcaccttcgccctcacagaccttgccggcaaccgcagatttggtttctgccgcctgcgggcgggtacccagagctgtctctgcatcctcagccacctgccttggttcgaggtgttttacaagctattgaacacagtgggagacctcctagcccaggaccaagtgagaccagcccctctctcactcctgtgggagtcccagccccca

SEQ ID NO: 282063 - DNA, 2509 bp, Homo sapiens
acaaggcgcgttctgcgtcatagctccacctctttcggggtggagtcagtggaggctcagtccttgctctacctgcatggggaagactcaggggtgttgcctattaactgcgccccttacagagagggatcaggacggtatgagtcctggcttcacccgcttaaagcactgtaagtggccaaattcctggtctccacatgatttctaaaggggttcgagttgtcactcattatccagcagtggatggggagggggaacaggagactggggacgtgggaaatgcagctggaagagacctcgcgctagagggtccaggccctgactccacgccccgccatcgctccccagctgacctcgtgcgtccacgcgtcctgcgcgctcctgtaccccatgcgctgggagcacgtgctgatccccacgctgcccccacacctgctggactactgctgcgcgcccatgccctacctcattggagtgcacgccagtctcgccgaggtgagcgtggatctacccagacgacggggacgtgagggttcccccttcctctacatccccagatgccctcctctgccaaggactcccgggctctgagcggccgaccccgcttttccgcagagagtacgagaaaaagccctggaggacgtcgtggtgctgaacgtggacgccaataccttggagacgacctttaacgacgtgcaggcgctgcctccagacgtggtgtccctgctgaggctccggctcaggaaggtcgccctggcccccggggaaggggtgtcccgtctcttcctcaaagcccaggccctgctcttcggggggtaccgcgacgcactcgtctgcagcccgggccagccagtgaccttcagtgaggaagtcttcttggcccagaagcctggggcacctctgcaggccttccaccggcgggctgtgcacctgcagctgttcaaacagttcatcgaagcccggctggagaagctcaacaagggggagggcttctcagatcaattcgagcaggagatcactggctgcggggcctccccaggggcccttcgatcctatcagctctgggccgacaatctaaagaaaggtggtggcgccctcctgcactcagtcaaggccaagacccaaccagccgtcaagaacatgtaccgctcggccaagagtggcttgaagggggtgcagagccttctaatgtataaggatggggactctgtcctgcagagggggggctctctgagggccccagccctccccagccgctcagaccgcctgcagcaacgcctcccaatcactcagcactttggaaagctttgagaaccggccccttcgccccagcaggagacgccagctggaagagggaacttccgagcccccaggggcggggacacccccactgagccctgaggatgaggggtgcccgtgggcagaagaagctctggacagcagcttcttggggtctggagaagaactggatttgttgagcgagattctggacagtcttagcatgggagccaagagcgcaggcagcctgagaccgagccagagtttagactgctgtcacagaggagacctggacagctgcttcagcctgcccaacataccaagatggcaaccagacgataagaaactaccagagccggagccccagcccctttccctgccatccctgcaaaatgcctcgtctttggatgccaccagctcttcaaaggactccaggtcccagctgataccctcagagtccgaccaagaagtcacgtctccatcccagtcctcaacagcttctgcagacccaagcatctggggggaccccaaaccctctcctctcacagagcccctaattcttcatctcaccccttcccacaaggcagctgaagattctacagcccaggaaaaccccactccctggctctccactgcacccactgagcccagccctccagaaagcccccaaattctggcccccacaaagcccaactttgatatagcctggacgtcccagccccttgatccttcctcagaccccagttctctggaggaccccagagcccggcctcccaaagccctgctggcagagcgcgctcacctccagccacgggaggaaccaggagccctgaattcccctgctacacccaccagcaactgtcaaaagtcccagcccagcagccggcccagagtcgctgatcttaagaagtgctttgagggttaagaatcaggggtccaagagagaccccagtccctcaataaagccacaagagcccaaaaaagctggtttttttcctggtgaatttctctggtgccctcactctgctcggaaatccatcccacccacctctgtccctccaagggcagcctctctaactggctcctagcagggaattccaggaagcctcctggtcttctagaatcctggcaaccttacaattcctctcggcatttgtcacttccatctcagctaatgcacccaccagctcaaacacaccaataaagcttttgttacatctcaaaaaaaaat

SEQ ID NO: 282064 - DNA, 1375 bp, Homo sapiens
tagctgggatcacaggcgcacaccaccacccccggctaatttttgtatttttagtagagacagggtttcaccatgttggccaggctggtctcgaactcctgacctcaggtgatccactcaccttggcctcccaaagtgctgggattacagtcgtgagccaccacgcccgacctttgagaaccggccccttcgccccagcaggagacgccagctggaagagggaacttccgagcccccaggggcggggacacccccactgagccctgaggatgaggggtgcccgtgggcagaagaagctctggacagcagcttcttggggtctggagaagaactggatttgttgagcgagattctggacagtcttagcatgggagccaagagcgcaggcagcctgagaccgagccagagtttagactgctgtcacagaggagacctggacagctgcttcagcctgcccaacataccaagatggcaaccagacgataagaaactaccagagccggagccccagcccctttccctgccatccctgcaaaatgcctcgtctttggatgccaccagctcttcaaaggactccaggtcccagctgataccctcagagtccgaccaagaagtcacgtctccatcccagtcctcaacagcttctgcagacccaagcatctggggggaccccaaaccctctcctctcacagagcccctaattcttcatctcaccccttcccacaaggcagctgaagattctacagcccaggaaaaccccactccctggctctccactgcacccactgagcccagccctccagaaagcccccaaattctggcccccacaaagcccaactttgatatagcctggacgtcccagccccttgatccttcctcagaccccagttctctggaggaccccagagcccggcctcccaaagccctgctggcagagcgcgctcacctccagccacgggaggaaccaggagccctgaattcccctgctacacccaccagcaactgtcaaaagtcccagcccagcagccggcccagagtcgctgatcttaagaagtgctttgagggttaagaatcaggggtccaagagagaccccagtccctcaataaagccacaagagcccaaaaaagctggtttttttcctggtgaatttctctggtgccctcactctgctcggaaatccatcccacccacctctgtccctccaagggcagcctctctaactggctcctagcagggaattccaggaagcctcctggtcttctagaatcctggcaaccttacaattcctctcggcatttgtcacttccatctcagctaatgcacccaccagctcaaacacaccaataaagcttttgttacatctcaaaaaaaaat

SEQ ID NO: 282065 - DNA, 2558 bp, Homo sapiens
acacaggaagctgagccggcttggggcccagcatacacaggcccccaggacccctggggagagggccccgctgggctggccctgcagggaccatggaatccagagctgaagggggctcccctgctgtgtttgattggttcttcgaagcggcctgccctgcctccctgcaggaggatccccccatcctgcggcagttccctccagacttcagggaccaggaagctatgcagatggtgcctaaattctgcttcccttttgatgtggaaagggagccccccagccccgccgtgcagcatttcaccttcgccctcacagaccttgccggcaaccgcagatttggtttctgccgcctgcgggcgggtacccagagctgtctctgcatcctcagccacctgccttggttcgaggtgttttacaagctattgaacacagtgggagacctcctagcccaggaccaagtcaccgaggcagaggaacttcttcaaaatctgtttcagcagtccctgtctgggccccaggcctcagtggggcttgagctgggcagcggagtgacggtctccagcgggcagggtatccccccccctacccgggggaatagcaagccgctttcctgcttcgtggccccggactccggccgcctgccatccatccctgagaacaggaacctaacggagctggtggtggccgtgactgacgagaacatcgtggggctgttcgcggcgctcctggccgagagaagagtcctgctcaccgccagcaaactcagcaccctgacctcgtgcgtccacgcgtcctgcgcgctcctgtaccccatgcgctgggagcacgtgctgatccccacgctgcccccacacctgctggactactgctgcgcgcccatgccctacctcattggagtgcacgccagtctcgccgagagagtacgagaaaaagccctggaggacgtcgtggtgctgaacgtggacgccaataccttggagacgacctttaacgacgtgcaggcgctgcctccagacgtggtgtccctgctgaggctccggctcaggaaggtcgccctggcccccggggaaggggtgtcccgtctcttcctcaaagcccaggccctgctcttcggggggtaccgcgacgcactcgtctgcagcccgggccagccagtgaccttcagtgaggaagtcttcttggcccagaagcctggggcacctctgcaggccttccaccggcgggctgtgcacctgcagctgttcaaacagttcatcgaagcccggctggagaagctcaacaagggggagggcttctcagatcaattcgagcaggagatcactggctgcggggcctccccaggggcccttcgatcctatcagctctgggccgacaatctaaagaaaggtggtggcgccctcctgcactcagtcaaggccaagacccaaccagccgtcaagaacatgtaccgctcggccaagagtggcttgaagggggtgcagagccttctaatgtataaggatggggactctgtcctgcagagggggggctctctgagggccccagccctccccagccgctcagaccgcctgcagcaacgcctcccaatcactcagcactttggaaagctttgagaaccggccccttcgccccagcaggagacgccagctggaagagggaacttccgagcccccaggggcggggacacccccactgagccctgaggatgaggggtgcccgtgggcagaagaagctctggacagcagcttcttggggtctggagaagaactggatttgttgagcgagattctggacagtcttagcatgggagccaagagcgcaggcagcctgagaccgagccagagtttagactgctgtcacagaggagacctggacagctgcttcagcctgcccaacataccaagatggcaaccagacgataagaaactaccagagccggagccccagcccctttccctgccatccctgcaaaatgcctcgtctttggatgccaccagctcttcaaaggactccaggtcccagctgataccctcagagtccgaccaagaagtcacgtctccatcccagtcctcaacagcttctgcagacccaagcatctggggggaccccaaaccctctcctctcacagagcccctaattcttcatctcaccccttcccacaaggcagctgaagattctacagcccaggaaaaccccactccctggctctccactgcacccactgagcccagccctccagaaagcccccaaattctggcccccacaaagcccaactttgatatagcctggacgtcccagccccttgatccttcctcagaccccagttctctggaggaccccagagcccggcctcccaaagccctgctggcagagcgcgctcacctccagccacgggaggaaccaggagccctgaattcccctgctacacccaccagcaactgtcaaaagtcccagcccagcagccggcccagagtcgctgatcttaagaagtgctttgagggttaagaatcaggggtccaagagagaccccagtccctcaataaagccacaagagccca

SEQ ID NO: 282066 - DNA, 1482 bp, Homo sapiens
acacaggaagctgagccggcttggggcccagcatacacaggcccccaggacccctggggagagggccccgctgggctggccctgcagggaccatggaatccagagctgaagggggctcccctgctgtgtttgattggttcttcgaagcggcctgccctgcctccctgcaggaggatccccccatcctgcggcagttccctccagacttcagggaccaggaagctatgcagatggtgcctaaattctgcttcccttttgatgtggaaagggagccccccagccccgccgtgcagcatttcaccttcgccctcacagaccttgccggcaaccgcagatttggtttctgccgcctgcgggcgggtacccagagctgtctctgcatcctcagccacctgccttggttcgaggtgttttacaagctattgaacacagtgggagacctcctagcccaggaccaagtcaccgaggcagaggaacttcttcaaaatctgtttcagcagtccctgtctgggccccaggcctcagtggggcttgagctgggcagcggagtgacggtctccagcgggcagggtatccccccccctacccgggggaatagcaagccgctttcctgcttcgtggccccggactccggccgcctgccatccatccctgagaacaggaacctaacggagctggtggtggccgtgactgacgagaacatcgtggggctgttcgcggcgctcctggccgagagaagagtcctgctcaccgccagcaaactcagcaccctgacctcgtgcgtccacgcgtcctgcgcgctcctgtaccccatgcgctgggagcacgtgctgatccccacgctgcccccacacctgctggactactgctgcgcgcccatgccctacctcattggagtgcacgccagtctcgccgagagagtacgagaaaaagccctggaggacgtcgtggtgctgaacgtggacgccaataccttggagacgacctttaacgacgtgcaggcgctgcctccagacgtggtgtccctgctgaggctccggctcaggaaggtcgccctggcccccggggaaggggtgtcccgtctcttcctcaaagcccaggccctgctcttcggggggtaccgcgacgcactcgtctgcagcccgggccagccagtgaccttcagtgaggaagtcttcttggcccagaagcctggggcacctctgcaggccttccaccggcgggctgtgcacctgcagctgttcaaacagttcatcgaagcccggctggagaagctcaacaagggggagggcttctcagatcaattcgagcaggagatcactggctgcggggcctcaaaggtggtggcgccctcctgcactcagtcaaggccaagacccaaccagccgtcaagaacatgtaccgctcggcaagagtggttgaagggggtgcagagcttctaatgttacggggggggaccgctggaaagggggggcctaggcc

SEQ ID NO: 282067 - DNA, 470 bp, Homo sapiens
aggccagagatggcttctacatcttgacagcaggcaggcttcgaagtgctggcattcagatgtgtctcctgctgtttctgatttactgtcccccaccccagttcatcgaagcccggctggagaagctcaacaagggggagggcttctcagatcaattcgagcaggagatcactggctgcggggcctccaggtgagccctgagtccagcccctgggtcccccactacccgccaccagcacccccagcctcagccagccttcggtgaccaccacactctctccttaccccaggggcccttcgatcctatcagctctgggccgacaatctaaaggtaagaccaccagaacaataggccgtgggcgttggcttaggcctgtaatcccaacacattaggaggtggagatagaaggattgctgcgaccagaagtttgagaccggttagggcaacgtgacgaaaccccatctctact

SEQ ID NO: 282068 - DNA, 473 bp, Homo sapiens
aatcccagagctcttgtgaagttactttcatctatggatggttattaaattggtgttttcagcttacagtgaaagatcttcagaacaccaattcagttgccttcagggttaaaccataatatcaacacaaaatggatcaagagccagtcatcctaaaaagaccacatgcatggcccctgatctagcaaaagtagtcacaaatgcagctgaatgtgtggaaacctctaagagaaaatgtgtgaatcacagaaagagtggctccagtcatggaacgtggagaaagctgccacagaagcaaaggctgcctatgctcatgccagcactgacagggagaactctccgccctctaccttgggtattctggctccaatgacagggctgtctctggaatgaagttctggatcatagtcctgagagaaattccaagactcatcttttttcatccagatttctacactccagaagggtaaaga

SEQ ID NO: 282069 - DNA, 163 bp, Homo sapiens
atggattaaagtgctgccctcccccacccccagcagctggtgacagtgacgataatcaccaaaacagctgctaagatcggtgtctgtcacaccaacagggatacatacaggacttcctctgacaacctccacagtcaagcatccaccaggaaacttagtgaat

SEQ ID NO: 282070 - DNA, 470 bp, Homo sapiens
gtggcttgggtcaatagtcccagcagagctgagccttcaagtcttcctagcccaggcaccagagatgggagagaggaactctccagggagaaaaagtaaacatagacaggtcgtcagccagggttcatcgggaggctgcggttttcccagctgtggagtggccacctcctcccagcctccctgagtcagccatggactccagcggggacacactgtgggaaacgtcgtgggaaaacagcaaacccagggagcgaaagaaaataaagaccagcagtgacccctccactcagagagacctgtggacaccatttgcggcgtttatccagcagttttttctttctaccggtgtgtgcatgtatgcatgcctttgtgtacatagacttgtgtattacagcgttgtgcaacatggatattcatttgacgatactgtgaatgtttttccatatcattaaatgttcttacatcacata

SEQ ID NO: 282071 - DNA, 2156 bp, Homo sapiens
atgatataaattatgcatagattccctggaaagccctcaaaagtctgctaaattcctgttgccaccaaatattgtttctttggggaaatatattctgattcctaacaaccaacaataatcataagttttaaatctctcctctctcctctcatgcagtttatgaaacgggctgcttttctgtttgtagctgaggccacaggagctggagggattgcaaagacctttattagagcatccatctggtgaccctggcagggaaacttaggatctaaccctaggatctggctagggctctgtaactgactgttagccagccctgcctctccaggataattatatttatagtggctttgcctcaggaggtttctggaggttgatgaccatgccaattattaactccttagcttcctaatgtagaacatttaggagtgacaggagttgttttctttgcttctcaacaggtgcctacctattgggccgcctttgtaccttgagttttcagttagcaaaatgtgaattgtatgaactaattcttccttgacctcacaggtggtggtaaggattcttgaaaagtgggtaagatccttagaaaaaagatgttcataaagtgtgactcctaggacaggatacaagataaattctgtcccacaaagcacctcatattttgtataattaactatcttcatggcatttgcattttctacagttcactgattttacctcttcagctttatttactatgctgcttttttgtgttaaagtgaattagtgtgtcagcttaaaacacttgtggtgaataattcatatcattcaataagcattaactcttaaatgtgaagtcttatcagccagggctgtgaaatataattgtcaatggtgataaacaattatgctttggtttttagtgaatgaaaaaattaagaatgagggaaccttaacatttttaacctaaaagattgtattttgccaactttccttgggcaatttgtgaatactgcaaatctcaggcatatgtcatcagtgattctaaagggattgtatttgttcctgcatttgttcttgagggtaaaatagcttttcatttgaatgatgcttttgagttggcagcaggacagggatcagataatttgttgttgtttacagattatgttttactttattgtgatgtaattatagatcataattctcatgtttgtccttctcttttttcccttcctttttctagtacttcctcctgtgctggttccaagacacagcgaatataatcctcagcacagcctcttagctcagttccgtaacttaggacaaaatgagcctcacatgccactcaacgccacttttccagattctttccagcaacccaacagccacccgtttcctcactctcccaatagcagttacccaaactctcctgggagcagcagcagcacctaccctcactctcccaccagctcagacccaggaagccctttccagatgccaggtaggttggaatgttcagtgatgttctgtagtcatatcagacagtgttatcacagtgtcacggaaaagctgggtcaacctgcagtggagggaggttttcagccctggtatatgacatagtgctctcgcacttttaggatacaacttttggtgaaaggagacctcatagtcaagtaagcaaatgtcttattttatttgtcaggcacagatgcttgaataagctatattttccccttgtttttaaaaggttttgaaacagctgcatccttctgggagtggcataattgttacagtctttactcttgataaaaagaaaaataccgtgttacacacatttgctcttatgagaacacaacctcaatcagcatcgttttcatacatggaaaaaactcctgttgcaagtgcaacctcagaaaaaatatttcctgagggatcccaccccctacttaattaaattcattcaaatgatgatgtaatcccaagaaacgtatactttaacaacaaaggaattacaacagaagtactggaaaccatctgcttgttcaacttagcaaagacaaaaaacaattatcctctttttctagacataactgttggtgtaatggttatcaaaataaatgattaataaggacattatatatttttaagttacaggttaatgagcaagcatctcc

SEQ ID NO: 282072 - DNA, 3102 bp, Homo sapiens
agcgtgtgagcgggcgggcaggcaggcgagtgcgccgggtattggcagctgaggagtggaggctgggcagctccgactccctgacgccagcgcgaccagatcaatccaggctccaggagaaagcaggcgggcgggcggagaaaggagaggccgagcggctcaacccgggccgaggctcggggagcggagagtggcgcagcgcccggccgtccggacccgggccgcgagaccccgctcgcccggccactcgtgctcccgcacggacgggcgcgccgccaacccggtgctgactgggttacttttttaaacactaggaatggtaatttctactcttctggacttcaaactaagaagttaaagagacttctctgtaaataaacaaatctcttctgctgtccttttgcatttggagacagctttatttcaccatatccaaggagtataactagtgctgtcattatgaatgtgacaagtttattttcctttacaagtccagctgtgaagagacttcttgggtggaaacagggcgatgaagaagaaaaatgggcagagaaagctgttgatgctttggtgaaaaaactgaagaaaaagaaaggtgccatggaggaactggaaaaggccttgagctgcccagggcaaccgagtaactgtgtcaccattccccgctctctggatggcaggctgcaagtctcccaccggaagggactgcctcatgtcatttactgccgtgtgtggcgctggcccgatcttcagagccaccatgaactaaaaccactggaatgctgtgagtttccttttggttccaagcagaaggaggtctgcatcaatccctaccactataagagagtagaaagccctgtacttcctcctgtgctggttccaagacacagcgaatataatcctcagcacagcctcttagctcagttccgtaacttaggacaaaatgagcctcacatgccactcaacgccacttttccagattctttccagcaacccaacagccacccgtttcctcactctcccaatagcagttacccaaactctcctgggagcagcagcagcacctaccctcactctcccaccagctcagacccaggaagccctttccagatgccagctgatacgcccccacctgcttacctgcctcctgaagaccccatgacccaggatggctctcagccgatggacacaaacatgatggcgcctcccctgccctcagaaatcaacagaggagatgttcaggcggttgcttatgaggaaccaaaacactggtgctctattgtctactatgagctcaacaatcgtgtgggtgaagcgttccatgcctcctccacaagtgtgttggtggatggtttcactgatccttccaacaataagaaccgtttctgccttgggctgctctccaatgttaaccggaattccactattgaaaacaccaggcggcatattggaaaaggagttcatctttattatgttggaggggaggtgtatgccgaatgccttagtgacagtagcatctttgtgcaaagtcggaactgcaactaccatcatggatttcatcctactactgtttgcaagatccctagtgggtgtagtctgaaaatttttaacaaccaagaatttgctcagttattggcacagtctgtgaaccatggatttgagacagtctatgagcttacaaaaatgtgtactatacgtatgagctttgtgaagggctggggagcagaataccaccgccaggatgttactagcaccccctgctggattgagatacatctgcacggccccctccagtggctggataaagttcttactcaaatgggttcacctcataatcctatttcatctgtatcttaaatggccccaggcatctgcctctggaaaactattgagccttgcatgtacttgaaggatggatgagtcagacacgattgagaactgacaaaggagccttgataatacttgacctctgtgaccaactgttggattcagaaatttaaacaaaaaaaaaaaaaaacacacacaccttggtaacatactgttgatatcaagaacctgtttagtttacattgtaacattctattgtaaaatcaactaaaattcagacttttagcaggactttgtgtacagttaaaggagagatggccaagccagggacaaattgtctattagaaaacggtcctaagagattctttggtgtttggcactttaaggtcatcgttgggcagaagtttagcattaatagttgttctgaaacgtgttttatcaggtttagagcccatgttgagtcttcttttcatgggttttcataatattttaaaactatttgtttagcgatggttttgttcgtttaagtaaaggttaatcttgatgatatacataataatctttctaaaattgtatgctgaccatacttgctgtcagaataatgctaggcatatgctttttgctaaatatgtatgtacagagtatttggaagttaagaattgattagactagtgaatttaggagtatttgaggtgggtggggggaagagggaaatgacaactgcaaatgtagactatactgtaaaaattcagtttgttgctttaaagaaacaaactgatacctgaattttgctgtgtttccattttttagagatttttatcatttttttctctctcggcattcttttttctcatactcttcaaaaagcagttctgcagctggttaattcatgtaactgtgagagcaaatgaataattcctgctattctgaaattgcctacatgtttcaataccagttatatggagtgcttgaatttaataagcagtttttacggagtttacagtacagaaataggctttaattttcaagtgaattttttgccaaacttagtaactctgttaaatatttggaggatttaaagaacatcccagtttgaattcatttcaaactttttaaatttttttgtactatgtttggttttattttccttctgttaatcttttgtattcacttatgctctcgtacattgagtacttttattccaaaactagtgggttttctctactggaaattttcaataaacctgtcattattgcttactttgattaaaaattt

SEQ ID NO: 282073 - DNA, 3195 bp, Homo sapiens
cccccgcgccggcggggcgacccctgcgggagctggaggacgaccgctggcgctgctctccaaggcgcctggtggagcgggtctcgcgggcgggggaccccggcgccccgggcccctccacatcccgcacgggttttcttctcggccccagcaagcctctttggggtcgaggtcaaggaaagttcgcaccgagatcccctctaatttattcaaaggtttggcggcggcgcgtaattttttccccctcttccgcctacacccgctgcgtctcctggtgtctcgttcctttccctttaccggagtcgattgcctcactgcatgtgtattcgtgagttcgcggttgaacaactgttcctttactctgctccctgtctttgtgctgactgggttacttttttaaacactaggaatggtaatttctactcttctggacttcaaactaagaagttaaagagacttctctgtaaataaacaaatctcttctgctgtccttttgcatttggagacagctttatttcaccatatccaaggagtataactagtgctgtcattatgaatgtgacaagtttattttcctttacaagtccagctgtgaagagacttcttgggtggaaacagggcgatgaagaagaaaaatgggcagagaaagctgttgatgctttggtgaaaaaactgaagaaaaagaaaggtgccatggaggaactggaaaaggccttgagctgcccagggcaaccgagtaactgtgtcaccattccccgctctctggatggcaggctgcaagtctcccaccggaagggactgcctcatgtcatttactgccgtgtgtggcgctggcccgatcttcagagccaccatgaactaaaaccactggaatgctgtgagtttccttttggttccaagcagaaggaggtctgcatcaatccctaccactataagagagtagaaagccctgtacttcctcctgtgctggttccaagacacagcgaatataatcctcagcacagcctcttagctcagttccgtaacttaggacaaaatgagcctcacatgccactcaacgccacttttccagattctttccagcaacccaacagccacccgtttcctcactctcccaatagcagttacccaaactctcctgggagcagcagcagcacctaccctcactctcccaccagctcagacccaggaagccctttccagatgccagctgatacgcccccacctgcttacctgcctcctgaagaccccatgacccaggatggctctcagccgatggacacaaacatgatggcgcctcccctgccctcagaaatcaacagaggagatgttcaggcggttgcttatgaggaaccaaaacactggtgctctattgtctactatgagctcaacaatcgtgtgggtgaagcgttccatgcctcctccacaagtgtgttggtggatggtttcactgatccttccaacaataagaaccgtttctgccttgggctgctctccaatgttaaccggaattccactattgaaaacaccaggcggcatattggaaaaggagttcatctttattatgttggaggggaggtgtatgccgaatgccttagtgacagtagcatctttgtgcaaagtcggaactgcaactaccatcatggatttcatcctactactgtttgcaagatccctagtgggtgtagtctgaaaatttttaacaaccaagaatttgctcagttattggcacagtctgtgaaccatggatttgagacagtctatgagcttacaaaaatgtgtactatacgtatgagctttgtgaagggctggggagcagaataccaccgccaggatgttactagcaccccctgctggattgagatacatctgcacggccccctccagtggctggataaagttcttactcaaatgggttcacctcataatcctatttcatctgtatcttaaatggccccaggcatctgcctctggaaaactattgagccttgcatgtacttgaaggatggatgagtcagacacgattgagaactgacaaaggagccttgataatacttgacctctgtgaccaactgttggattcagaaatttaaacaaaaaaaaaaaaaaacacacacaccttggtaacatactgttgatatcaagaacctgtttagtttacattgtaacattctattgtaaaatcaactaaaattcagacttttagcaggactttgtgtacagttaaaggagagatggccaagccagggacaaattgtctattagaaaacggtcctaagagattctttggtgtttggcactttaaggtcatcgttgggcagaagtttagcattaatagttgttctgaaacgtgttttatcaggtttagagcccatgttgagtcttcttttcatgggttttcataatattttaaaactatttgtttagcgatggttttgttcgtttaagtaaaggttaatcttgatgatatacataataatctttctaaaattgtatgctgaccatacttgctgtcagaataatgctaggcatatgctttttgctaaatatgtatgtacagagtatttggaagttaagaattgattagactagtgaatttaggagtatttgaggtgggtggggggaagagggaaatgacaactgcaaatgtagactatactgtaaaaattcagtttgttgctttaaagaaacaaactgatacctgaattttgctgtgtttccattttttagagatttttatcatttttttctctctcggcattcttttttctcatactcttcaaaaagcagttctgcagctggttaattcatgtaactgtgagagcaaatgaataattcctgctattctgaaattgcctacatgtttcaataccagttatatggagtgcttgaatttaataagcagtttttacggagtttacagtacagaaataggctttaattttcaagtgaattttttgccaaacttagtaactctgttaaatatttggaggatttaaagaacatcccagtttgaattcatttcaaactttttaaatttttttgtactatgtttggttttattttccttctgttaatcttttgtattcacttatgctctcgtacattgagtacttttattccaaaactagtgggttttctctactggaaattttcaataaacctgtcattattgcttactttgattaaaaattt

SEQ ID NO: 282074 - DNA, 3334 bp, Homo sapiens
agcgtgtgagcgggcgggcaggcaggcgagtgcgccgggtattggcagctgaggagtggaggctgggcagctccgactccctgacgccagcgcgaccagatcaatccaggctccaggagaaagcaggcgggcgggcggagaaaggagaggccgagcggctcaacccgggccgaggctcggggagcggagagtggcgcagcgcccggccgtccggacccgggccgcgagaccccgctcgcccggccactcgtgctcccgcacggacgggcgcgccgccaacccggtgctgactgggttacttttttaaacactaggaatggtaatttctactcttctggacttcaaactaagaagttaaagagacttctctgtaaataaacaaatctcttctgctgtccttttgcatttggagacagctttatttcaccatatccaaggagtataactagtgctgtcattatgaatgtgacaagtttattttcctttacaagtccagctgtgaagagacttcttgggtggaaacagggcgatgaagaagaaaaatgggcagagaaagctgttgatgctttggtgaaaaaactgaagaaaaagaaaggtgccatggaggaactggaaaaggccttgagctgcccagggcaaccgagtaactgtgtcaccattccccgctctctggatggcaggctgcaagtctcccaccggaagggactgcctcatgtcatttactgccgtgtgtggcgctggcccgatcttcagagccaccatgaactaaaaccactggaatgctgtgagtttccttttggttccaagcagaaggaggtctgcatcaatccctaccactataagagagtagaaagccctgtacttcctcctgtgctggttccaagacacagcgaatataatcctcagcacagcctcttagctcagttccgtaacttaggacaaaatgagcctcacatgccactcaacgccacttttccagattctttccagcaacccaacagccacccgtttcctcactctcccaatagcagttacccaaactctcctgggagcagcagcagcacctaccctcactctcccaccagctcagacccaggaagccctttccagatgccagctgatacgcccccacctgcttacctgcctcctgaagaccccatgacccaggatggctctcagccgatggacacaaacatgatggcgcctcccctgccctcagaaatcaacagaggagatgttcaggcggttgcttatgaggaaccaaaacactggtgctctattgtctactatgagctcaacaatcgtgtgggtgaagcgttccatgcctcctccacaagtgtgttggtggatggtttcactgatccttccaacaataagaaccgtttctgccttgggctgctctccaatgttaaccggaattccactattgaaaacaccaggcggcatattggaaaagactgggagatcaaaattatcatcaccaatgagagacagatgggtatcatatacctccagatgtcataccctgagaaggccataacatcacctacgcaggattccagctgagaatgcaaatccgaatctaatcctgaggaaatatcagacagactcaaagcaagaaacattctattaaaaagggtgaagaagggggagtaattctttcaaaatatcaatgtgaaaagacaaaggagttcatctttattatgttggaggggaggtgtatgccgaatgccttagtgacagtagcatctttgtgcaaagtcggaactgcaactaccatcatggatttcatcctactactgtttgcaagatccctagtgggtgtagtctgaaaatttttaacaaccaagaatttgctcagttattggcacagtctgtgaaccatggatttgagacagtctatgagcttacaaaaatgtgtactatacgtatgagctttgtgaagggctggggagcagaataccaccgccaggatgttactagcaccccctgctggattgagatacatctgcacggccccctccagtggctggataaagttcttactcaaatgggttcacctcataatcctatttcatctgtatcttaaatggccccaggcatctgcctctggaaaactattgagccttgcatgtacttgaaggatggatgagtcagacacgattgagaactgacaaaggagccttgataatacttgacctctgtgaccaactgttggattcagaaatttaaacaaaaaaaaaaaaaaacacacacaccttggtaacatactgttgatatcaagaacctgtttagtttacattgtaacattctattgtaaaatcaactaaaattcagacttttagcaggactttgtgtacagttaaaggagagatggccaagccagggacaaattgtctattagaaaacggtcctaagagattctttggtgtttggcactttaaggtcatcgttgggcagaagtttagcattaatagttgttctgaaacgtgttttatcaggtttagagcccatgttgagtcttcttttcatgggttttcataatattttaaaactatttgtttagcgatggttttgttcgtttaagtaaaggttaatcttgatgatatacataataatctttctaaaattgtatgctgaccatacttgctgtcagaataatgctaggcatatgctttttgctaaatatgtatgtacagagtatttggaagttaagaattgattagactagtgaatttaggagtatttgaggtgggtggggggaagagggaaatgacaactgcaaatgtagactatactgtaaaaattcagtttgttgctttaaagaaacaaactgatacctgaattttgctgtgtttccattttttagagatttttatcatttttttctctctcggcattcttttttctcatactcttcaaaaagcagttctgcagctggttaattcatgtaactgtgagagcaaatgaataattcctgctattctgaaattgcctacatgtttcaataccagttatatggagtgcttgaatttaataagcagtttttacggagtttacagtacagaaataggctttaattttcaagtgaattttttgccaaacttagtaactctgttaaatatttggaggatttaaagaacatcccagtttgaattcatttcaaactttttaaatttttttgtactatgtttggttttattttccttctgttaatcttttgtattcacttatgctctcgtacattgagtacttttattccaaaactagtgggttttctctactggaaattttcaataaacctgtcattattgcttactttgattaaaaattt

SEQ ID NO: 282075 - DNA, 3205 bp, Homo sapiens
agcgtgtgagcgggcgggcaggcaggcgagtgcgccgggtattggcagctgaggagtggaggctgggcagctccgactccctgacgccagcgcgaccagatcaatccaggctccaggagaaagcaggcgggcgggcggagaaaggagaggccgagcggctcaacccgggccgaggctcggggagcggagagtggcgcagcgcccggccgtccggacccgggccgcgagaccccgctcgcccggccactcgtgctcccgcacggacgggcgcgccgccaacccgcatgcaatttttaaatacacggtgcaagataaccagtaaaggcgcgttccttctgaaaattgaggccggtctcagaaccatctcctgagaaagcatccttttcgtgctgactgggttacttttttaaacactaggaatggtaatttctactcttctggacttcaaactaagaagttaaagagacttctctgtaaataaacaaatctcttctgctgtccttttgcatttggagacagctttatttcaccatatccaaggagtataactagtgctgtcattatgaatgtgacaagtttattttcctttacaagtccagctgtgaagagacttcttgggtggaaacagggcgatgaagaagaaaaatgggcagagaaagctgttgatgctttggtgaaaaaactgaagaaaaagaaaggtgccatggaggaactggaaaaggccttgagctgcccagggcaaccgagtaactgtgtcaccattccccgctctctggatggcaggctgcaagtctcccaccggaagggactgcctcatgtcatttactgccgtgtgtggcgctggcccgatcttcagagccaccatgaactaaaaccactggaatgctgtgagtttccttttggttccaagcagaaggaggtctgcatcaatccctaccactataagagagtagaaagccctgtacttcctcctgtgctggttccaagacacagcgaatataatcctcagcacagcctcttagctcagttccgtaacttaggacaaaatgagcctcacatgccactcaacgccacttttccagattctttccagcaacccaacagccacccgtttcctcactctcccaatagcagttacccaaactctcctgggagcagcagcagcacctaccctcactctcccaccagctcagacccaggaagccctttccagatgccagctgatacgcccccacctgcttacctgcctcctgaagaccccatgacccaggatggctctcagccgatggacacaaacatgatggcgcctcccctgccctcagaaatcaacagaggagatgttcaggcggttgcttatgaggaaccaaaacactggtgctctattgtctactatgagctcaacaatcgtgtgggtgaagcgttccatgcctcctccacaagtgtgttggtggatggtttcactgatccttccaacaataagaaccgtttctgccttgggctgctctccaatgttaaccggaattccactattgaaaacaccaggcggcatattggaaaaggagttcatctttattatgttggaggggaggtgtatgccgaatgccttagtgacagtagcatctttgtgcaaagtcggaactgcaactaccatcatggatttcatcctactactgtttgcaagatccctagtgggtgtagtctgaaaatttttaacaaccaagaatttgctcagttattggcacagtctgtgaaccatggatttgagacagtctatgagcttacaaaaatgtgtactatacgtatgagctttgtgaagggctggggagcagaataccaccgccaggatgttactagcaccccctgctggattgagatacatctgcacggccccctccagtggctggataaagttcttactcaaatgggttcacctcataatcctatttcatctgtatcttaaatggccccaggcatctgcctctggaaaactattgagccttgcatgtacttgaaggatggatgagtcagacacgattgagaactgacaaaggagccttgataatacttgacctctgtgaccaactgttggattcagaaatttaaacaaaaaaaaaaaaaaacacacacaccttggtaacatactgttgatatcaagaacctgtttagtttacattgtaacattctattgtaaaatcaactaaaattcagacttttagcaggactttgtgtacagttaaaggagagatggccaagccagggacaaattgtctattagaaaacggtcctaagagattctttggtgtttggcactttaaggtcatcgttgggcagaagtttagcattaatagttgttctgaaacgtgttttatcaggtttagagcccatgttgagtcttcttttcatgggttttcataatattttaaaactatttgtttagcgatggttttgttcgtttaagtaaaggttaatcttgatgatatacataataatctttctaaaattgtatgctgaccatacttgctgtcagaataatgctaggcatatgctttttgctaaatatgtatgtacagagtatttggaagttaagaattgattagactagtgaatttaggagtatttgaggtgggtggggggaagagggaaatgacaactgcaaatgtagactatactgtaaaaattcagtttgttgctttaaagaaacaaactgatacctgaattttgctgtgtttccattttttagagatttttatcatttttttctctctcggcattcttttttctcatactcttcaaaaagcagttctgcagctggttaattcatgtaactgtgagagcaaatgaataattcctgctattctgaaattgcctacatgtttcaataccagttatatggagtgcttgaatttaataagcagtttttacggagtttacagtacagaaataggctttaattttcaagtgaattttttgccaaacttagtaactctgttaaatatttggaggatttaaagaacatcccagtttgaattcatttcaaactttttaaatttttttgtactatgtttggttttattttccttctgttaatcttttgtattcacttatgctctcgtacattgagtacttttattccaaaactagtgggttttctctactggaaattttcaataaacctgtcattattgcttactttgattaaaaattt

SEQ ID NO: 282076 - DNA, 2902 bp, Homo sapiens
accgagtaactgtgtcaccattccccgctctctggatggcaggctgcaagtgctcccgcacggacgggcgcgccgccaacccggtgctgactgggttacttttttaaacactaggaatggtaatttctactcttctggacttcaaactaagaagttaaagagacttctctgtaaataaacaaatctcttctgctgtccttttgcatttggagacagctttatttcaccatatccaaggagtataactagtgctgtcattatgaatgtgacaagtttattttcctttacaagtccagctgtgaagagacttcttgggtggaaacagggcgatgaagaagaaaaatgggcagagaaagctgttgatgctttggtgaaaaaactgaagaaaaagaaaggtgccatggaggaactggaaaaggccttgagctgcccagggcaaccgagtaactgtgtcaccattccccgctctctggatggcaggctgcaagtctcccaccggaagggactgcctcatgtcatttactgccgtgtgtggcgctggcccgatcttcagagccaccatgaactaaaaccactggaatgctgtgagtttccttttggttccaagcagaaggaggtctgcatcaatccctaccactataagagagtagaaagccctgtacttcctcctgtgctggttccaagacacagcgaatataatcctcagcacagcctcttagctcagttccgtaacttaggacaaaatgagcctcacatgccactcaacgccacttttccagattctttccagcaacccaacagccacccgtttcctcactctcccaatagcagttacccaaactctcctgggagcagcagcagcacctaccctcactctcccaccagctcagacccaggaagccctttccagatgccagctgatacgcccccacctgcttacctgcctcctgaagaccccatgacccaggatggctctcagccgatggacacaaacatgatggcgcctcccctgccctcagaaatcaacagaggagatgttcaggcggttgcttatgaggaaccaaaacactggtgctctattgtctactatgagctcaacaatcgtgtgggtgaagcgttccatgcctcctccacaagtgtgttggtggatggtttcactgatccttccaacaataagaaccgtttctgccttgggctgctctccaatgttaaccggaattccactattgaaaacaccaggcggcatattggaaaaggagttcatctttattatgttggaggggaggtgtatgccgaatgccttagtgacagtagcatctttgtgcaaagtcggaactgcaactaccatcatggatttcatcctactactgtttgcaagatccctagtgggtgtagtctgaaaatttttaacaaccaagaatttgctcagttattggcacagtctgtgaaccatggatttgagacagtctatgagcttacaaaaatgtgtactatacgtatgagctttgtgaagggctggggagcagaataccaccgccaggatgttactagcaccccctgctggattgagatacatctgcacggccccctccagtggctggataaagttcttactcaaatgggttcacctcataatcctatttcatctgtatcttaaatggccccaggcatctgcctctggaaaactattgagccttgcatgtacttgaaggatggatgagtcagacacgattgagaactgacaaaggagccttgataatacttgacctctgtgaccaactgttggattcagaaatttaaacaaaaaaaaaaaaaaacacacacaccttggtaacatactgttgatatcaagaacctgtttagtttacattgtaacattctattgtaaaatcaactaaaattcagacttttagcaggactttgtgtacagttaaaggagagatggccaagccagggacaaattgtctattagaaaacggtcctaagagattctttggtgtttggcactttaaggtcatcgttgggcagaagtttagcattaatagttgttctgaaacgtgttttatcaggtttagagcccatgttgagtcttcttttcatgggttttcataatattttaaaactatttgtttagcgatggttttgttcgtttaagtaaaggttaatcttgatgatatacataataatctttctaaaattgtatgctgaccatacttgctgtcagaataatgctaggcatatgctttttgctaaatatgtatgtacagagtatttggaagttaagaattgattagactagtgaatttaggagtatttgaggtgggtggggggaagagggaaatgacaactgcaaatgtagactatactgtaaaaattcagtttgttgctttaaagaaacaaactgatacctgaattttgctgtgtttccattttttagagatttttatcatttttttctctctcggcattcttttttctcatactcttcaaaaagcagttctgcagctggttaattcatgtaactgtgagagcaaatgaataattcctgctattctgaaattgcctacatgtttcaataccagttatatggagtgcttgaatttaataagcagtttttacggagtttacagtacagaaataggctttaattttcaagtgaattttttgccaaacttagtaactctgttaaatatttggaggatttaaagaacatcccagtttgaattcatttcaaactttttaaatttttttgtactatgtttggttttattttccttctgttaatcttttgtattcacttatgctctcgtacattgagtacttttattccaaaactagtgggttttctctactggaaattttcaataaacctgtcattattgcttactttgattaaaaattt

SEQ ID NO: 282077 - DNA, 3084 bp, Homo sapiens
agcgtgtgagcgggcgggcaggcaggcgagtgcgccgggtattggcagctgaggagtggaggctgggcagctccgactccctgacgccagcgcgaccagatcaatccaggctccaggagaaagcaggcgggcgggcggagaaaggagaggccgagcggctcaacccgggccgaggctcggggagcggagagtggcgcagcgcccggccgtccggacccgggccgcgagaccccgctcgcccggccactcgtgctcccgcacggacgggcgcgccgccaacccggtgctgactgggttacttttttaaacactaggaatggtaatttctactcttctggacttcaaactaagaagttaaagagacttctctgtaaataaacaaatctcttctgctgtccttttgcatttggagacagctttatttcaccatatccaaggagtataactagtgctgtcattatgaatgtgacaagtttattttcctttacaagtccagctgtgaagagacttcttgggtggaaacagggcgatgaagaagaaaaatgggcagagaaagctgttgatgctttggtgaaaaaactgaagaaaaagaaaggtgccatggaggaactggaaaaggccttgagctgcccagggcaaccgagtaactgtgtcaccattccccgctctctggatggcaggctgcaagtctcccaccggaagggactgcctcatgtcatttactgccgtgtgtggcgctggcccgatcttcagagccaccatgaatgtgagtttccttttggttccaagcagaaggaggtctgcatcaatccctaccactataagagagtagaaagccctgtacttcctcctgtgctggttccaagacacagcgaatataatcctcagcacagcctcttagctcagttccgtaacttaggacaaaatgagcctcacatgccactcaacgccacttttccagattctttccagcaacccaacagccacccgtttcctcactctcccaatagcagttacccaaactctcctgggagcagcagcagcacctaccctcactctcccaccagctcagacccaggaagccctttccagatgccagctgatacgcccccacctgcttacctgcctcctgaagaccccatgacccaggatggctctcagccgatggacacaaacatgatggcgcctcccctgccctcagaaatcaacagaggagatgttcaggcggttgcttatgaggaaccaaaacactggtgctctattgtctactatgagctcaacaatcgtgtgggtgaagcgttccatgcctcctccacaagtgtgttggtggatggtttcactgatccttccaacaataagaaccgtttctgccttgggctgctctccaatgttaaccggaattccactattgaaaacaccaggcggcatattggaaaaggagttcatctttattatgttggaggggaggtgtatgccgaatgccttagtgacagtagcatctttgtgcaaagtcggaactgcaactaccatcatggatttcatcctactactgtttgcaagatccctagtgggtgtagtctgaaaatttttaacaaccaagaatttgctcagttattggcacagtctgtgaaccatggatttgagacagtctatgagcttacaaaaatgtgtactatacgtatgagctttgtgaagggctggggagcagaataccaccgccaggatgttactagcaccccctgctggattgagatacatctgcacggccccctccagtggctggataaagttcttactcaaatgggttcacctcataatcctatttcatctgtatcttaaatggccccaggcatctgcctctggaaaactattgagccttgcatgtacttgaaggatggatgagtcagacacgattgagaactgacaaaggagccttgataatacttgacctctgtgaccaactgttggattcagaaatttaaacaaaaaaaaaaaaaaacacacacaccttggtaacatactgttgatatcaagaacctgtttagtttacattgtaacattctattgtaaaatcaactaaaattcagacttttagcaggactttgtgtacagttaaaggagagatggccaagccagggacaaattgtctattagaaaacggtcctaagagattctttggtgtttggcactttaaggtcatcgttgggcagaagtttagcattaatagttgttctgaaacgtgttttatcaggtttagagcccatgttgagtcttcttttcatgggttttcataatattttaaaactatttgtttagcgatggttttgttcgtttaagtaaaggttaatcttgatgatatacataataatctttctaaaattgtatgctgaccatacttgctgtcagaataatgctaggcatatgctttttgctaaatatgtatgtacagagtatttggaagttaagaattgattagactagtgaatttaggagtatttgaggtgggtggggggaagagggaaatgacaactgcaaatgtagactatactgtaaaaattcagtttgttgctttaaagaaacaaactgatacctgaattttgctgtgtttccattttttagagatttttatcatttttttctctctcggcattcttttttctcatactcttcaaaaagcagttctgcagctggttaattcatgtaactgtgagagcaaatgaataattcctgctattctgaaattgcctacatgtttcaataccagttatatggagtgcttgaatttaataagcagtttttacggagtttacagtacagaaataggctttaattttcaagtgaattttttgccaaacttagtaactctgttaaatatttggaggatttaaagaacatcccagtttgaattcatttcaaactttttaaatttttttgtactatgtttggttttattttccttctgttaatcttttgtattcacttatgctctcgtacattgagtacttttattccaaaactagtgggttttctctactggaaattttcaataaacctgtcattattgcttactttgattaaaaattt

SEQ ID NO: 282078 - DNA, 2841 bp, Homo sapiens
agcgtgtgagcgggcgggcaggcaggcgagtgcgccgggtattggcagctgaggagtggaggctgggcagctccgactccctgacgccagcgcgaccagatcaatccaggctccaggagaaagcaggcgggcgggcggagaaaggagaggccgagcggctcaacccgggccgaggctcggggagcggagagtggcgcagcgcccggccgtccggacccgggccgcgagaccccgctcgcccggccactcgtgctcccgcacggacgggcgcgccgccaacccggtgctgactgggttacttttttaaacactaggaatggtaatttctactcttctggacttcaaactaagaagttaaagagacttctctgtaaataaacaaatctcttctgctgtccttttgcatttggagacagctttatttcaccatatccaaggagtataactagtgctgtcattatgaatgtgacaagtttattttcctttacaagtccagctgtgaagagacttcttgggtggaaacagggcgatgaagaagaaaaatggcagaaggaggtctgcatcaatccctaccactataagagagtagaaagccctgtacttcctcctgtgctggttccaagacacagcgaatataatcctcagcacagcctcttagctcagttccgtaacttaggacaaaatgagcctcacatgccactcaacgccacttttccagattctttccagcaacccaacagccacccgtttcctcactctcccaatagcagttacccaaactctcctgggagcagcagcagcacctaccctcactctcccaccagctcagacccaggaagccctttccagatgccagctgatacgcccccacctgcttacctgcctcctgaagaccccatgacccaggatggctctcagccgatggacacaaacatgatggcgcctcccctgccctcagaaatcaacagaggagatgttcaggcggttgcttatgaggaaccaaaacactggtgctctattgtctactatgagctcaacaatcgtgtgggtgaagcgttccatgcctcctccacaagtgtgttggtggatggtttcactgatccttccaacaataagaaccgtttctgccttgggctgctctccaatgttaaccggaattccactattgaaaacaccaggcggcatattggaaaaggagttcatctttattatgttggaggggaggtgtatgccgaatgccttagtgacagtagcatctttgtgcaaagtcggaactgcaactaccatcatggatttcatcctactactgtttgcaagatccctagtgggtgtagtctgaaaatttttaacaaccaagaatttgctcagttattggcacagtctgtgaaccatggatttgagacagtctatgagcttacaaaaatgtgtactatacgtatgagctttgtgaagggctggggagcagaataccaccgccaggatgttactagcaccccctgctggattgagatacatctgcacggccccctccagtggctggataaagttcttactcaaatgggttcacctcataatcctatttcatctgtatcttaaatggccccaggcatctgcctctggaaaactattgagccttgcatgtacttgaaggatggatgagtcagacacgattgagaactgacaaaggagccttgataatacttgacctctgtgaccaactgttggattcagaaatttaaacaaaaaaaaaaaaaaacacacacaccttggtaacatactgttgatatcaagaacctgtttagtttacattgtaacattctattgtaaaatcaactaaaattcagacttttagcaggactttgtgtacagttaaaggagagatggccaagccagggacaaattgtctattagaaaacggtcctaagagattctttggtgtttggcactttaaggtcatcgttgggcagaagtttagcattaatagttgttctgaaacgtgttttatcaggtttagagcccatgttgagtcttcttttcatgggttttcataatattttaaaactatttgtttagcgatggttttgttcgtttaagtaaaggttaatcttgatgatatacataataatctttctaaaattgtatgctgaccatacttgctgtcagaataatgctaggcatatgctttttgctaaatatgtatgtacagagtatttggaagttaagaattgattagactagtgaatttaggagtatttgaggtgggtggggggaagagggaaatgacaactgcaaatgtagactatactgtaaaaattcagtttgttgctttaaagaaacaaactgatacctgaattttgctgtgtttccattttttagagatttttatcatttttttctctctcggcattcttttttctcatactcttcaaaaagcagttctgcagctggttaattcatgtaactgtgagagcaaatgaataattcctgctattctgaaattgcctacatgtttcaataccagttatatggagtgcttgaatttaataagcagtttttacggagtttacagtacagaaataggctttaattttcaagtgaattttttgccaaacttagtaactctgttaaatatttggaggatttaaagaacatcccagtttgaattcatttcaaactttttaaatttttttgtactatgtttggttttattttccttctgttaatcttttgtattcacttatgctctcgtacattgagtacttttattccaaaactagtgggttttctctactggaaattttcaataaacctgtcattattgcttactttgattaaaaattt

SEQ ID NO: 282079 - DNA, 2339 bp, Homo sapiens
cattgccctcagtcctcaacaggatttctctagcactgaagcctgaccataatactcaattgcaggtctgctccacataaaactatgtaactagagtacttcctcctgtgctggttccaagacacagcgaatataatcctcagcacagcctcttagctcagttccgtaacttaggacaaaatgagcctcacatgccactcaacgccacttttccagattctttccagcaacccaacagccacccgtttcctcactctcccaatagcagttacccaaactctcctgggagcagcagcagcacctaccctcactctcccaccagctcagacccaggaagccctttccagatgccagctgatacgcccccacctgcttacctgcctcctgaagaccccatgacccaggatggctctcagccgatggacacaaacatgatggcgcctcccctgccctcagaaatcaacagaggagatgttcaggcggttgcttatgaggaaccaaaacactggtgctctattgtctactatgagctcaacaatcgtgtgggtgaagcgttccatgcctcctccacaagtgtgttggtggatggtttcactgatccttccaacaataagaaccgtttctgccttgggctgctctccaatgttaaccggaattccactattgaaaacaccaggcggcatattggaaaaggagttcatctttattatgttggaggggaggtgtatgccgaatgccttagtgacagtagcatctttgtgcaaagtcggaactgcaactaccatcatggatttcatcctactactgtttgcaagatccctagtgggtgtagtctgaaaatttttaacaaccaagaatttgctcagttattggcacagtctgtgaaccatggatttgagacagtctatgagcttacaaaaatgtgtactatacgtatgagctttgtgaagggctggggagcagaataccaccgccaggatgttactagcaccccctgctggattgagatacatctgcacggccccctccagtggctggataaagttcttactcaaatgggttcacctcataatcctatttcatctgtatcttaaatggccccaggcatctgcctctggaaaactattgagccttgcatgtacttgaaggatggatgagtcagacacgattgagaactgacaaaggagccttgataatacttgacctctgtgaccaactgttggattcagaaatttaaacaaaaaaaaaaaaaaacacacacaccttggtaacatactgttgatatcaagaacctgtttagtttacattgtaacattctattgtaaaatcaactaaaattcagacttttagcaggactttgtgtacagttaaaggagagatggccaagccagggacaaattgtctattagaaaacggtcctaagagattctttggtgtttggcactttaaggtcatcgttgggcagaagtttagcattaatagttgttctgaaacgtgttttatcaggtttagagcccatgttgagtcttcttttcatgggttttcataatattttaaaactatttgtttagcgatggttttgttcgtttaagtaaaggttaatcttgatgatatacataataatctttctaaaattgtatgctgaccatacttgctgtcagaataatgctaggcatatgctttttgctaaatatgtatgtacagagtatttggaagttaagaattgattagactagtgaatttaggagtatttgaggtgggtggggggaagagggaaatgacaactgcaaatgtagactatactgtaaaaattcagtttgttgctttaaagaaacaaactgatacctgaattttgctgtgtttccattttttagagatttttatcatttttttctctctcggcattcttttttctcatactcttcaaaaagcagttctgcagctggttaattcatgtaactgtgagagcaaatgaataattcctgctattctgaaattgcctacatgtttcaataccagttatatggagtgcttgaatttaataagcagtttttacggagtttacagtacagaaataggctttaattttcaagtgaattttttgccaaacttagtaactctgttaaatatttggaggatttaaagaacatcccagtttgaattcatttcaaactttttaaatttttttgtactatgtttggttttattttccttctgttaatcttttgtattcacttatgctctcgtacattgagtacttttattccaaaactagtgggttttctctactggaaattttcaataaacctgtcattattgcttactttgattaaaaattt

SEQ ID NO: 282080 - DNA, 2110 bp, Homo sapiens
aaggattaatcagaacttcacattcattgtccaccctcaccaatgagtttttgatctttgcagtagcagttacttttctctttttcatagtgactttattctatggaactgtattgtcttaatgcactaattctgccaagctaccttcttgtacaaatgaatgatagaatgtattgattcatggcaatggctaggtgtcaataatagctttttggatacttgaatgtactcctgcccgttttgctcagagattgaaagatcaagagctgtgtgttgatagggggaccttcagtggctgaatagggaagaaattgaatgtcattctgtctagcatagcttttttgttttattttcttgatgataaaatgagaatttaataatagctattacattactatcagtaatgggcaattaaaagttttaaagtgtctttattaagataactttataatgtattttaaaaccttcattcctcaagaccagcaattcttattggaatccatggatggaccctggggagctaacatccatcccttgaaattgcctgcgaaattatgtgtgcgtttgtgcatgtgtgtttttttctccccaggggcgggggggtcagggaggaaagatgcatagctttaatcagagtctttggttatgtgaactcttcttacttaataagtttaaccactgagttaaacaagttaaatgacctccagtatgtttttcctagggctggggagcagaataccaccgccaggatgttactagcaccccctgctggattgagatacatctgcacggccccctccagtggctggataaagttcttactcaaatgggttcacctcataatcctatttcatctgtatcttaaatggccccaggcatctgcctctggaaaactattgagccttgcatgtacttgaaggatggatgagtcagacacgattgagaactgacaaaggagccttgataatacttgacctctgtgaccaactgttggattcagaaatttaaacaaaaaaaaaaaaaaacacacacaccttggtaacatactgttgatatcaagaacctgtttagtttacattgtaacattctattgtaaaatcaactaaaattcagacttttagcaggactttgtgtacagttaaaggagagatggccaagccagggacaaattgtctattagaaaacggtcctaagagattctttggtgtttggcactttaaggtcatcgttgggcagaagtttagcattaatagttgttctgaaacgtgttttatcaggtttagagcccatgttgagtcttcttttcatgggttttcataatattttaaaactatttgtttagcgatggttttgttcgtttaagtaaaggttaatcttgatgatatacataataatctttctaaaattgtatgctgaccatacttgctgtcagaataatgctaggcatatgctttttgctaaatatgtatgtacagagtatttggaagttaagaattgattagactagtgaatttaggagtatttgaggtgggtggggggaagagggaaatgacaactgcaaatgtagactatactgtaaaaattcagtttgttgctttaaagaaacaaactgatacctgaattttgctgtgtttccattttttagagatttttatcatttttttctctctcggcattcttttttctcatactcttcaaaaagcagttctgcagctggttaattcatgtaactgtgagagcaaatgaataattcctgctattctgaaattgcctacatgtttcaataccagttatatggagtgcttgaatttaataagcagtttttacggagtttacagtacagaaataggctttaattttcaagtgaattttttgccaaacttagtaactctgttaaatatttggaggatttaaagaacatcccagtttgaattcatttcaaactttttaaatttttttgtactatgtttggttttattttccttctgttaatcttttgtattcacttatgctctcgtacattgagtacttttattccaaaactagtgggttttctctactggaaattttcaataaacctgtcattattgcttactttgattaaaaattt

SEQ ID NO: 282081 - DNA, 3048 bp, Homo sapiens
agcgtgtgagcgggcgggcaggcaggcgagtgcgccgggtattggcagctgaggagtggaggctgggcagctccgactccctgacgccagcgcgaccagatcaatccaggctccaggagaaagcaggcgggcgggcggagaaaggagaggccgagcggctcaacccgggccgaggctcggggagcggagagtggcgcagcgcccggccgtccggacccgggccgcgagaccccgctcgcccggccactcgtgctcccgcacggacgggcgcgccgccaacccggtgctgactgggttacttttttaaacactaggaatggtaatttctactcttctggacttcaaactaagaagttaaagagacttctctgtaaataaacaaatctcttctgctgtccttttgcatttggagacagctttatttcaccatatccaaggagtataactagtgctgtcattatgaatgtgacaagtttattttcctttacaagtccagctgtgaagagacttcttgggtggaaacagggcgatgaagaagaaaaatgggcagagaaagctgttgatgctttggtgaaaaaactgaagaaaaagaaaggtgccatggaggaactggaaaaggccttgagctgcccagggcaaccgagtaactgtgtcaccattccccgctctctggatggcaggctgcaagtctcccaccggaagggactgcctcatgtcatttactgccgtgtgtggcgctggcccgatcttcagagccaccatgaactaaaaccactggaatgctgtgagtttccttttggttccaagcagaaggaggtctgcatcaatccctaccactataagagagtagaaagccctgtacttcctcctgtgctggttccaagacacagcgaatataatcctcagcacagcctcttagctcagttccgtaacttaggacaaaatgagcctcacatgccactcaacgccacttttccagattctttccagcaacccaacagccacccgtttcctcactctcccaatagcagttacccaaactctcctgggagcagcagcagcacctaccctcactctcccaccagctcagacccaggaagccctttccagatgccagctgatacgcccccacctgcttacctgcctcctgaagaccccatgacccaggatggctctcagccgatggacacaaacatgatggcgcctcccctgccctcagaaatcaacagaggagatgttcaggcggttgcttatgaggaaccaaaacactggtgctctattgtctactatgagctcaacaatcgtgtgggtgaagcgttccatgcctcctccacaagtgtgttggtggatggtttcactgatccttccaacaataagaaccgtttctgccttgggctgctctccaatgttaaccggaattccactattgaaaacaccaggcggcatattggaaaaggagttcatctttattatgttggaggggaggtgtatgccgaatgccttagtgacagtagcatctttgtgcaaagtcggaactgcaactaccatcatggatttcatcctactactgtttgcaagatccctagtgggtgtagtctgaaaatttttaacaaccaagaatttgctcagttattggcacagtctgtgaaccatggatttgagacagtctatgagcttacaaaaatgtgtactatacgtatgagctttgtgaagggctggggagcagaataccaccgccaggatgttactagcaccccctgctggattgagatacatctgcacggccccctccagtggctggataaagttcttactcaaatgggttcacctcataatcctatttcatctgtatcttaaatggccccaggcatctgcctctggaaaactattgagccttgcatgtacttgaaggatggatgagtcagacacgattgagaactgacaaaggagccttgataatacttgacctctgtgaccaactgttggattcagaaatttaaacaaaaaaaaaaaaaaacacacacaccttggtaacatactgttgatatcaagaacctgtttagtttacattgtaacattctattgtaaaatcaactaaaattcagacttttagcaggactttgtgtacagttaaaggagagatggccaagccagggacaaattgtctattagaaaacggtcctaagagattctttggtgtttggcactttaaggtcatcgttgggcagaagtttagcattaatagttgttctgaaacgtgttttatcaggtttagagcccatgttgagtcttcttttcatgggttttcataatattttaaaactatttgtttagcgatggttttgttcgtttaagtaaaggttaatcttgatgatatacataataatcttttttgctaaatatgtatgtacagagtatttggaagttaagaattgattagactagtgaatttaggagtatttgaggtgggtggggggaagagggaaatgacaactgcaaatgtagactatactgtaaaaattcagtttgttgctttaaagaaacaaactgatacctgaattttgctgtgtttccattttttagagatttttatcatttttttctctctcggcattcttttttctcatactcttcaaaaagcagttctgcagctggttaattcatgtaactgtgagagcaaatgaataattcctgctattctgaaattgcctacatgtttcaataccagttatatggagtgcttgaatttaataagcagtttttacggagtttacagtacagaaataggctttaattttcaagtgaattttttgccaaacttagtaactctgttaaatatttggaggatttaaagaacatcccagtttgaattcatttcaaactttttaaatttttttgtactatgtttggttttattttccttctgttaatcttttgtattcacttatgctctcgtacattgagtacttttattccaaaactagtgggttttctctactggaaattttcaataaacctgtcattattgcttactttgattaaaaattt

SEQ ID NO: 282082 - DNA, 3147 bp, Homo sapiens
cccccgcgccggcggggcgacccctgcgggagctggaggacgaccgctggcgctgctctccaaggcgcctggtggagcgggtctcgcgggcgggggaccccggcgccccgggcccctccacatcccgcacgggttttcttctcggccccagcaagcctctttggggtcgaggtcaaggaaagttcgcaccgagatcccctctaatttattcaaaggtttggcggcggcgcgtaattttttccccctcttccgcctacacccgctgcgtctcctggtgtctcgttcctttccctttaccggagtcgattgcctcactgcatgtgtattcgtgctgactgggttacttttttaaacactaggaatggtaatttctactcttctggacttcaaactaagaagttaaagagacttctctgtaaataaacaaatctcttctgctgtccttttgcatttggagacagctttatttcaccatatccaaggagtataactagtgctgtcattatgaatgtgacaagtttattttcctttacaagtccagctgtgaagagacttcttgggtggaaacagggcgatgaagaagaaaaatgggcagagaaagctgttgatgctttggtgaaaaaactgaagaaaaagaaaggtgccatggaggaactggaaaaggccttgagctgcccagggcaaccgagtaactgtgtcaccattccccgctctctggatggcaggctgcaagtctcccaccggaagggactgcctcatgtcatttactgccgtgtgtggcgctggcccgatcttcagagccaccatgaactaaaaccactggaatgctgtgagtttccttttggttccaagcagaaggaggtctgcatcaatccctaccactataagagagtagaaagccctgtacttcctcctgtgctggttccaagacacagcgaatataatcctcagcacagcctcttagctcagttccgtaacttaggacaaaatgagcctcacatgccactcaacgccacttttccagattctttccagcaacccaacagccacccgtttcctcactctcccaatagcagttacccaaactctcctgggagcagcagcagcacctaccctcactctcccaccagctcagacccaggaagccctttccagatgccagctgatacgcccccacctgcttacctgcctcctgaagaccccatgacccaggatggctctcagccgatggacacaaacatgatggcgcctcccctgccctcagaaatcaacagaggagatgttcaggcggttgcttatgaggaaccaaaacactggtgctctattgtctactatgagctcaacaatcgtgtgggtgaagcgttccatgcctcctccacaagtgtgttggtggatggtttcactgatccttccaacaataagaaccgtttctgccttgggctgctctccaatgttaaccggaattccactattgaaaacaccaggcggcatattggaaaaggagttcatctttattatgttggaggggaggtgtatgccgaatgccttagtgacagtagcatctttgtgcaaagtcggaactgcaactaccatcatggatttcatcctactactgtttgcaagatccctagtgggtgtagtctgaaaatttttaacaaccaagaatttgctcagttattggcacagtctgtgaaccatggatttgagacagtctatgagcttacaaaaatgtgtactatacgtatgagctttgtgaagggctggggagcagaataccaccgccaggatgttactagcaccccctgctggattgagatacatctgcacggccccctccagtggctggataaagttcttactcaaatgggttcacctcataatcctatttcatctgtatcttaaatggccccaggcatctgcctctggaaaactattgagccttgcatgtacttgaaggatggatgagtcagacacgattgagaactgacaaaggagccttgataatacttgacctctgtgaccaactgttggattcagaaatttaaacaaaaaaaaaaaaaaacacacacaccttggtaacatactgttgatatcaagaacctgtttagtttacattgtaacattctattgtaaaatcaactaaaattcagacttttagcaggactttgtgtacagttaaaggagagatggccaagccagggacaaattgtctattagaaaacggtcctaagagattctttggtgtttggcactttaaggtcatcgttgggcagaagtttagcattaatagttgttctgaaacgtgttttatcaggtttagagcccatgttgagtcttcttttcatgggttttcataatattttaaaactatttgtttagcgatggttttgttcgtttaagtaaaggttaatcttgatgatatacataataatctttctaaaattgtatgctgaccatacttgctgtcagaataatgctaggcatatgctttttgctaaatatgtatgtacagagtatttggaagttaagaattgattagactagtgaatttaggagtatttgaggtgggtggggggaagagggaaatgacaactgcaaatgtagactatactgtaaaaattcagtttgttgctttaaagaaacaaactgatacctgaattttgctgtgtttccattttttagagatttttatcatttttttctctctcggcattcttttttctcatactcttcaaaaagcagttctgcagctggttaattcatgtaactgtgagagcaaatgaataattcctgctattctgaaattgcctacatgtttcaataccagttatatggagtgcttgaatttaataagcagtttttacggagtttacagtacagaaataggctttaattttcaagtgaattttttgccaaacttagtaactctgttaaatatttggaggatttaaagaacatcccagtttgaattcatttcaaactttttaaatttttttgtactatgtttggttttattttccttctgttaatcttttgtattcacttatgctctcgtacattgagtacttttattccaaaactagtgggttttctctactggaaattttcaataaacctgtcattattgcttactttgattaaaaattt

SEQ ID NO: 282083 - DNA, 3005 bp, Homo sapiens
gatgtgctttaggaggggaggaggaacaaatgcctgccagatctcacagctacagtagctgagcttttgtttattttgaagagcatgcaatttttaaatacacggtgcaagataaccagtaaaggcgcgttccttctgaaaattgaggccggtctcagaaccatctcctgagaaagcatccttttcgtgctgactgggttacttttttaaacactaggaatggtaatttctactcttctggacttcaaactaagaagttaaagagacttctctgtaaataaacaaatctcttctgctgtccttttgcatttggagacagctttatttcaccatatccaaggagtataactagtgctgtcattatgaatgtgacaagtttattttcctttacaagtccagctgtgaagagacttcttgggtggaaacagggcgatgaagaagaaaaatgggcagagaaagctgttgatgctttggtgaaaaaactgaagaaaaagaaaggtgccatggaggaactggaaaaggccttgagctgcccagggcaaccgagtaactgtgtcaccattccccgctctctggatggcaggctgcaagtctcccaccggaagggactgcctcatgtcatttactgccgtgtgtggcgctggcccgatcttcagagccaccatgaactaaaaccactggaatgctgtgagtttccttttggttccaagcagaaggaggtctgcatcaatccctaccactataagagagtagaaagccctgtacttcctcctgtgctggttccaagacacagcgaatataatcctcagcacagcctcttagctcagttccgtaacttaggacaaaatgagcctcacatgccactcaacgccacttttccagattctttccagcaacccaacagccacccgtttcctcactctcccaatagcagttacccaaactctcctgggagcagcagcagcacctaccctcactctcccaccagctcagacccaggaagccctttccagatgccagctgatacgcccccacctgcttacctgcctcctgaagaccccatgacccaggatggctctcagccgatggacacaaacatgatggcgcctcccctgccctcagaaatcaacagaggagatgttcaggcggttgcttatgaggaaccaaaacactggtgctctattgtctactatgagctcaacaatcgtgtgggtgaagcgttccatgcctcctccacaagtgtgttggtggatggtttcactgatccttccaacaataagaaccgtttctgccttgggctgctctccaatgttaaccggaattccactattgaaaacaccaggcggcatattggaaaaggagttcatctttattatgttggaggggaggtgtatgccgaatgccttagtgacagtagcatctttgtgcaaagtcggaactgcaactaccatcatggatttcatcctactactgtttgcaagatccctagtgggtgtagtctgaaaatttttaacaaccaagaatttgctcagttattggcacagtctgtgaaccatggatttgagacagtctatgagcttacaaaaatgtgtactatacgtatgagctttgtgaagggctggggagcagaataccaccgccaggatgttactagcaccccctgctggattgagatacatctgcacggccccctccagtggctggataaagttcttactcaaatgggttcacctcataatcctatttcatctgtatcttaaatggccccaggcatctgcctctggaaaactattgagccttgcatgtacttgaaggatggatgagtcagacacgattgagaactgacaaaggagccttgataatacttgacctctgtgaccaactgttggattcagaaatttaaacaaaaaaaaaaaaaaacacacacaccttggtaacatactgttgatatcaagaacctgtttagtttacattgtaacattctattgtaaaatcaactaaaattcagacttttagcaggactttgtgtacagttaaaggagagatggccaagccagggacaaattgtctattagaaaacggtcctaagagattctttggtgtttggcactttaaggtcatcgttgggcagaagtttagcattaatagttgttctgaaacgtgttttatcaggtttagagcccatgttgagtcttcttttcatgggttttcataatattttaaaactatttgtttagcgatggttttgttcgtttaagtaaaggttaatcttgatgatatacataataatctttctaaaattgtatgctgaccatacttgctgtcagaataatgctaggcatatgctttttgctaaatatgtatgtacagagtatttggaagttaagaattgattagactagtgaatttaggagtatttgaggtgggtggggggaagagggaaatgacaactgcaaatgtagactatactgtaaaaattcagtttgttgctttaaagaaacaaactgatacctgaattttgctgtgtttccattttttagagatttttatcatttttttctctctcggcattcttttttctcatactcttcaaaaagcagttctgcagctggttaattcatgtaactgtgagagcaaatgaataattcctgctattctgaaattgcctacatgtttcaataccagttatatggagtgcttgaatttaataagcagtttttacggagtttacagtacagaaataggctttaattttcaagtgaattttttgccaaacttagtaactctgttaaatatttggaggatttaaagaacatcccagtttgaattcatttcaaactttttaaatttttttgtactatgtttggttttattttccttctgttaatcttttgtattcacttatgctctcgtacattgagtacttttattccaaaactagtgggttttctctactggaaattttcaataaacctgtcattattgcttactttgattaaaaattt

SEQ ID NO: 282084 - DNA, 2908 bp, Homo sapiens
ccggccgcgctgcgctcacgccggccgggccgggaatttggagaggatccctggtcgcgcggcagcggcggcggcgcgcgggtgagcgggtgctgactgggttacttttttaaacactaggaatggtaatttctactcttctggacttcaaactaagaagttaaagagacttctctgtaaataaacaaatctcttctgctgtccttttgcatttggagacagctttatttcaccatatccaaggagtataactagtgctgtcattatgaatgtgacaagtttattttcctttacaagtccagctgtgaagagacttcttgggtggaaacagggcgatgaagaagaaaaatgggcagagaaagctgttgatgctttggtgaaaaaactgaagaaaaagaaaggtgccatggaggaactggaaaaggccttgagctgcccagggcaaccgagtaactgtgtcaccattccccgctctctggatggcaggctgcaagtctcccaccggaagggactgcctcatgtcatttactgccgtgtgtggcgctggcccgatcttcagagccaccatgaactaaaaccactggaatgctgtgagtttccttttggttccaagcagaaggaggtctgcatcaatccctaccactataagagagtagaaagccctgtacttcctcctgtgctggttccaagacacagcgaatataatcctcagcacagcctcttagctcagttccgtaacttaggacaaaatgagcctcacatgccactcaacgccacttttccagattctttccagcaacccaacagccacccgtttcctcactctcccaatagcagttacccaaactctcctgggagcagcagcagcacctaccctcactctcccaccagctcagacccaggaagccctttccagatgccagctgatacgcccccacctgcttacctgcctcctgaagaccccatgacccaggatggctctcagccgatggacacaaacatgatggcgcctcccctgccctcagaaatcaacagaggagatgttcaggcggttgcttatgaggaaccaaaacactggtgctctattgtctactatgagctcaacaatcgtgtgggtgaagcgttccatgcctcctccacaagtgtgttggtggatggtttcactgatccttccaacaataagaaccgtttctgccttgggctgctctccaatgttaaccggaattccactattgaaaacaccaggcggcatattggaaaaggagttcatctttattatgttggaggggaggtgtatgccgaatgccttagtgacagtagcatctttgtgcaaagtcggaactgcaactaccatcatggatttcatcctactactgtttgcaagatccctagtgggtgtagtctgaaaatttttaacaaccaagaatttgctcagttattggcacagtctgtgaaccatggatttgagacagtctatgagcttacaaaaatgtgtactatacgtatgagctttgtgaagggctggggagcagaataccaccgccaggatgttactagcaccccctgctggattgagatacatctgcacggccccctccagtggctggataaagttcttactcaaatgggttcacctcataatcctatttcatctgtatcttaaatggccccaggcatctgcctctggaaaactattgagccttgcatgtacttgaaggatggatgagtcagacacgattgagaactgacaaaggagccttgataatacttgacctctgtgaccaactgttggattcagaaatttaaacaaaaaaaaaaaaaaacacacacaccttggtaacatactgttgatatcaagaacctgtttagtttacattgtaacattctattgtaaaatcaactaaaattcagacttttagcaggactttgtgtacagttaaaggagagatggccaagccagggacaaattgtctattagaaaacggtcctaagagattctttggtgtttggcactttaaggtcatcgttgggcagaagtttagcattaatagttgttctgaaacgtgttttatcaggtttagagcccatgttgagtcttcttttcatgggttttcataatattttaaaactatttgtttagcgatggttttgttcgtttaagtaaaggttaatcttgatgatatacataataatctttctaaaattgtatgctgaccatacttgctgtcagaataatgctaggcatatgctttttgctaaatatgtatgtacagagtatttggaagttaagaattgattagactagtgaatttaggagtatttgaggtgggtggggggaagagggaaatgacaactgcaaatgtagactatactgtaaaaattcagtttgttgctttaaagaaacaaactgatacctgaattttgctgtgtttccattttttagagatttttatcatttttttctctctcggcattcttttttctcatactcttcaaaaagcagttctgcagctggttaattcatgtaactgtgagagcaaatgaataattcctgctattctgaaattgcctacatgtttcaataccagttatatggagtgcttgaatttaataagcagtttttacggagtttacagtacagaaataggctttaattttcaagtgaattttttgccaaacttagtaactctgttaaatatttggaggatttaaagaacatcccagtttgaattcatttcaaactttttaaatttttttgtactatgtttggttttattttccttctgttaatcttttgtattcacttatgctctcgtacattgagtacttttattccaaaactagtgggttttctctactggaaattttcaataaacctgtcattattgcttactttgattaaaaattt

SEQ ID NO: 282085 - DNA, 3187 bp, Homo sapiens
agcgtgtgagcgggcgggcaggcaggcgagtgcgccgggtattggcagctgaggagtggaggctgggcagctccgactccctgacgccagcgcgaccagatcaatccaggctccaggagaaagcaggcgggcgggcggagaaaggagaggccgagcggctcaacccgggccgaggctcggggagcggagagtggcgcagcgcccggccgtccggacccgggccgcgagaccccgctcgcccggccactcgtgctcccgcacggacgggcgcgccgccaacccgcatgcaatttttaaatacacggtgcaagataaccagtaaaggcgcgttccttctgaaaattgaggccggtctcagaaccatctcctgagaaagcatccttttcgtgctgactgggttacttttttaaacactaggaatggtaatttctactcttctggacttcaaactaagaagttaaagagacttctctgtaaataaacaaatctcttctgctgtccttttgcatttggagacagctttatttcaccatatccaaggagtataactagtgctgtcattatgaatgtgacaagtttattttcctttacaagtccagctgtgaagagacttcttgggtggaaacagggcgatgaagaagaaaaatgggcagagaaagctgttgatgctttggtgaaaaaactgaagaaaaagaaaggtgccatggaggaactggaaaaggccttgagctgcccagggcaaccgagtaactgtgtcaccattccccgctctctggatggcaggctgcaagtctcccaccggaagggactgcctcatgtcatttactgccgtgtgtggcgctggcccgatcttcagagccaccatgaatgtgagtttccttttggttccaagcagaaggaggtctgcatcaatccctaccactataagagagtagaaagccctgtacttcctcctgtgctggttccaagacacagcgaatataatcctcagcacagcctcttagctcagttccgtaacttaggacaaaatgagcctcacatgccactcaacgccacttttccagattctttccagcaacccaacagccacccgtttcctcactctcccaatagcagttacccaaactctcctgggagcagcagcagcacctaccctcactctcccaccagctcagacccaggaagccctttccagatgccagctgatacgcccccacctgcttacctgcctcctgaagaccccatgacccaggatggctctcagccgatggacacaaacatgatggcgcctcccctgccctcagaaatcaacagaggagatgttcaggcggttgcttatgaggaaccaaaacactggtgctctattgtctactatgagctcaacaatcgtgtgggtgaagcgttccatgcctcctccacaagtgtgttggtggatggtttcactgatccttccaacaataagaaccgtttctgccttgggctgctctccaatgttaaccggaattccactattgaaaacaccaggcggcatattggaaaaggagttcatctttattatgttggaggggaggtgtatgccgaatgccttagtgacagtagcatctttgtgcaaagtcggaactgcaactaccatcatggatttcatcctactactgtttgcaagatccctagtgggtgtagtctgaaaatttttaacaaccaagaatttgctcagttattggcacagtctgtgaaccatggatttgagacagtctatgagcttacaaaaatgtgtactatacgtatgagctttgtgaagggctggggagcagaataccaccgccaggatgttactagcaccccctgctggattgagatacatctgcacggccccctccagtggctggataaagttcttactcaaatgggttcacctcataatcctatttcatctgtatcttaaatggccccaggcatctgcctctggaaaactattgagccttgcatgtacttgaaggatggatgagtcagacacgattgagaactgacaaaggagccttgataatacttgacctctgtgaccaactgttggattcagaaatttaaacaaaaaaaaaaaaaaacacacacaccttggtaacatactgttgatatcaagaacctgtttagtttacattgtaacattctattgtaaaatcaactaaaattcagacttttagcaggactttgtgtacagttaaaggagagatggccaagccagggacaaattgtctattagaaaacggtcctaagagattctttggtgtttggcactttaaggtcatcgttgggcagaagtttagcattaatagttgttctgaaacgtgttttatcaggtttagagcccatgttgagtcttcttttcatgggttttcataatattttaaaactatttgtttagcgatggttttgttcgtttaagtaaaggttaatcttgatgatatacataataatctttctaaaattgtatgctgaccatacttgctgtcagaataatgctaggcatatgctttttgctaaatatgtatgtacagagtatttggaagttaagaattgattagactagtgaatttaggagtatttgaggtgggtggggggaagagggaaatgacaactgcaaatgtagactatactgtaaaaattcagtttgttgctttaaagaaacaaactgatacctgaattttgctgtgtttccattttttagagatttttatcatttttttctctctcggcattcttttttctcatactcttcaaaaagcagttctgcagctggttaattcatgtaactgtgagagcaaatgaataattcctgctattctgaaattgcctacatgtttcaataccagttatatggagtgcttgaatttaataagcagtttttacggagtttacagtacagaaataggctttaattttcaagtgaattttttgccaaacttagtaactctgttaaatatttggaggatttaaagaacatcccagtttgaattcatttcaaactttttaaatttttttgtactatgtttggttttattttccttctgttaatcttttgtattcacttatgctctcgtacattgagtacttttattccaaaactagtgggttttctctactggaaattttcaataaacctgtcattattgcttactttgattaaaaattt

SEQ ID NO: 282086 - DNA, 1167 bp, Homo sapiens
agcgtgtgagcgggcgggcaggcaggcgagtgcgccgggtattggcagctgaggagtggaggctgggcagctccgactccctgacgccagcgcgaccagatcaatccaggctccaggagaaagcaggcgggcgggcggagaaaggagaggccgagcggctcaacccgggccgaggctcggggagcggagagtggcgcagcgcccggccgtccggacccgggccgcgagaccccgctcgcccggccactcgtgctcccgcacggacgggcgcgccgccaacccggtgctgactgggttacttttttaaacactaggaatggtaatttctactcttctggacttcaaactaagaagttaaagagacttctctgtaaataaacaaatctcttctgctgtccttttgcatttggagacagctttatttcaccatatccaaggagtataactagtgctgtcattatgaatgtgacaagtttattttcctttacaagtccagctgtgaagagacttcttgggtggaaacagggcgatgaagaagaaaaatgggcagagaaagctgttgatgctttggtgaaaaaactgaagaaaaagaaaggtgccatggaggaactggaaaaggccttgagctgcccagggcaaccgagtaactgtgtcaccattccccgctctctggatggcaggctgcaagtctcccaccggaagggactgcctcatgtcatttactgccgtgtgtggcgctggcccgatcttcagagccaccatgaactaaaaccactggaatgctgtgagtttccttttggttccaagcagaaggaggtctgcatcaatccctaccactataagagagtagaaagccctgtacttcctcctgtgctggttccaagacacagcgaatataatcctcagcacagcctcttagctcagttccgtaacttaggacaaaatgagcctcacatgccactcaacgccacttttccagattctttccagcaacccaacagccacccgtttcctcactctcccaatagcagttacccaaactctcctgggagcagcagcagcacctaccctcactctcccaccagctcagacccaggaagccctttccagatgccagctgatacgcccccacctggaaagggcttcctgggtctgagttggcggccg

SEQ ID NO: 282087 - DNA, 2943 bp, Homo sapiens
gggggctgctgggaaggccggcgggatggaggcggcgggaccggctcgcgggtgcgggtccgggtgaagcgggaggcagccagagtcggagccgggcccgagcaccaggcgcaggcccggcgcccgcctgcccgcaccctcgtcctcacagacgccacagccatggccatgatggtgtttccgcgggaggagaagctgagccaggatgagatcgtgctgggcaccaaggctgtcatccagggactggagactctgcgtggggagcatcgtgccctgctggctcctctggttgcacctgaggccggcgaagccgagcctggctcgcaggagcgctgcatcctcctgcgtcgctccctggaagccattgagcttgggctgggggaggcccaggtgatcttggcattgtcgagccacctgggggctgtagaatcagagaagcagaagctgcgggcgcaggtgcggcgtctggtgcaggagaaccagtggctgcgtgaggagctggcggggacacagcagaagctgcagcgcagtgagcaggccgtggcccagctcgaggaggagaagcagcacttgctgttcatgagccagatccgcaagttggatgaagacgcctcccctaacgaggagaagggggacgtccccaaagacacactggatgacctgttccccaatgaggatgagcagagcccagcccctagcccaggaggaggggatgtgtctggtcagcatgggggctacgagatcccggcccggctccgcaccctgcacaacctggtgatccaatacgcctcacagggccgctacgaggtagctgtgccactctgcaagcaggcactcgaagacctggagaagacgtcaggccacgaccaccctgacgttgccaccatgctgaacatcctggcactggtctatcgggatcagaacaagtacaaggaggctgcccacctgctcaatgatgctctggccatccgggagaaaacactgggcaaggaccacccagccgtggctgcgacactaaacaacctggcagtcctgtatggcaagaggggcaagtacaaggaggctgagccattgtgcaagcgggcactggagatccgggagaaggtcctgggcaagtttcacccagatgtggccaagcagctcagcaacctggccctgctgtgccagaaccagggcaaagctgaggaggtggaatattactatcggcgggcactggagatctatgctacacgcctcgggcccgatgaccccaatgtggccaagaccaagaacaacctggcttcctgctacctgaagcagggcaagtaccaggatgcggagaccttgtacaaggagatcctcacccgcgctcatgagaaagagtttggctctgtcaatggggacaacaagcccatctggatgcacgcagaggagcgggaggaaagcaaggataagcgccgggacagcgccccctatggggaatacggcagctggtacaaggcctgtaaagtagacagccccacagtcaacaccaccctgcgcagcttgggggccctataccggcgccagggcaagctggaagccgcgcacacactagaggactgtgccagccgtaaccgcaagcagggtttggaccccgcaagccagaccaaggtggtagaactgctgaaagatggcagtggcaggcggggagaccgccgcagcagccgagacatggctgggggtgccgggcctcggtctgagtctgacctcgaggacgtgggacctacagctgagtggaatggggatggcagtggctccttgaggcgcagcggttcctttgggaaactccgggatgccctgaggcgcagcagtgagatgctggtaaagaagctgcaggggggcaccccccaggagccccctaaccccaggatgaagcgggccagttccctcaacttcctcaacaagagcgtggaagagccgacccagcctggaggcacaggtctctctgacagccgcactctcagctccagctccatggacctctcccgacgaagctccctggtgggctaatgctgaaggggcagccagtcaccagagcgcccacctggcacacccccctcaccccagccctgcgcatgggcctgctgcttgtcccgcctgtctctcccacagcccctgtcttttctgttcaatctcagggtaaccttctcccttgtcatctcagcctgagccctggaggctgggcctgcccactccagctccatcccttatttattccttccagcagggccctcttccctaggttcgggccagcaggaggtgccggctggagtctccaccatagactcagtggcctggcctccccagaccccagagccaagaacactaagcactcgccggcccttcggcaccctcgccctccctcccgactcaacccggccgttgcttctgtatatagagaaataagttattggccgcgcgcctcccttcagtccacggtactacccgggcctcccctcgtccctcttctagtggtaccgcccaggccttaatcacccccattccgtgcggtggtatctcccaggctctacattctcgggagcggcgcctcccaagggggtcctgggaccttctcgcgctcctcctggcctctgagggatgcgtcctacccgcgccatcgccccgtggcccaggacggggacctccccttagtccgtcctcccaccgccgggccctgccccgcatcccggccttatgcactgcccctcccacccggccccgcccaggcacggccgaccccgccccgggcaccgcccaccgagccatcctgcctcgcctccccccacgcctgcagcttctcgcgaggggcggcgacggtcccctggtggcaggaggggctccccctgttgcgggtgaggcggctgctctctattttcagatgttgctgtagaaataaagacggtttaaatctgaaaaaaaaaa

SEQ ID NO: 282088 - DNA, 2906 bp, Homo sapiens
gggggctgctgggaaggccggcgggatggaggcggcgggaccggctcgcgggtgcgggtccgggtgaagcgggaggcagccagagtcggagccgggcccgagcaccaggcgcagacgccacagccatggccatgatggtgtttccgcgggaggagaagctgagccaggatgagatcgtgctgggcaccaaggctgtcatccagggactggagactctgcgtggggagcatcgtgccctgctggctcctctggttgcacctgaggccggcgaagccgagcctggctcgcaggagcgctgcatcctcctgcgtcgctccctggaagccattgagcttgggctgggggaggcccaggtgatcttggcattgtcgagccacctgggggctgtagaatcagagaagcagaagctgcgggcgcaggtgcggcgtctggtgcaggagaaccagtggctgcgtgaggagctggcggggacacagcagaagctgcagcgcagtgagcaggccgtggcccagctcgaggaggagaagcagcacttgctgttcatgagccagatccgcaagttggatgaagacgcctcccctaacgaggagaagggggacgtccccaaagacacactggatgacctgttccccaatgaggatgagcagagcccagcccctagcccaggaggaggggatgtgtctggtcagcatgggggctacgagatcccggcccggctccgcaccctgcacaacctggtgatccaatacgcctcacagggccgctacgaggtagctgtgccactctgcaagcaggcactcgaagacctggagaagacgtcaggccacgaccaccctgacgttgccaccatgctgaacatcctggcactggtctatcgggatcagaacaagtacaaggaggctgcccacctgctcaatgatgctctggccatccgggagaaaacactgggcaaggaccacccagccgtggctgcgacactaaacaacctggcagtcctgtatggcaagaggggcaagtacaaggaggctgagccattgtgcaagcgggcactggagatccgggagaaggtcctgggcaagtttcacccagatgtggccaagcagctcagcaacctggccctgctgtgccagaaccagggcaaagctgaggaggtggaatattactatcggcgggcactggagatctatgctacacgcctcgggcccgatgaccccaatgtggccaagaccaagaacaacctggcttcctgctacctgaagcagggcaagtaccaggatgcggagaccttgtacaaggagatcctcacccgcgctcatgagaaagagtttggctctgtcaatggggacaacaagcccatctggatgcacgcagaggagcgggaggaaagcaaggataagcgccgggacagcgccccctatggggaatacggcagctggtacaaggcctgtaaagtagacagccccacagtcaacaccaccctgcgcagcttgggggccctataccggcgccagggcaagctggaagccgcgcacacactagaggactgtgccagccgtaaccgcaagcagggtttggaccccgcaagccagaccaaggtggtagaactgctgaaagatggcagtggcaggcggggagaccgccgcagcagccgagacatggctgggggtgccgggcctcggtctgagtctgacctcgaggacgtgggacctacagctgagtggaatggggatggcagtggctccttgaggcgcagcggttcctttgggaaactccgggatgccctgaggcgcagcagtgagatgctggtaaagaagctgcaggggggcaccccccaggagccccctaaccccaggatgaagcgggccagttccctcaacttcctcaacaagagcgtggaagagccgacccagcctggaggcacaggtctctctgacagccgcactctcagctccagctccatggacctctcccgacgaagctccctggtgggctaatgctgaaggggcagccagtcaccagagcgcccacctggcacacccccctcaccccagccctgcgcatgggcctgctgcttgtcccgcctgtctctcccacagcccctgtcttttctgttcaatctcagggtaaccttctcccttgtcatctcagcctgagccctggaggctgggcctgcccactccagctccatcccttatttattccttccagcagggccctcttccctaggttcgggccagcaggaggtgccggctggagtctccaccatagactcagtggcctggcctccccagaccccagagccaagaacactaagcactcgccggcccttcggcaccctcgccctccctcccgactcaacccggccgttgcttctgtatatagagaaataagttattggccgcgcgcctcccttcagtccacggtactacccgggcctcccctcgtccctcttctagtggtaccgcccaggccttaatcacccccattccgtgcggtggtatctcccaggctctacattctcgggagcggcgcctcccaagggggtcctgggaccttctcgcgctcctcctggcctctgagggatgcgtcctacccgcgccatcgccccgtggcccaggacggggacctccccttagtccgtcctcccaccgccgggccctgccccgcatcccggccttatgcactgcccctcccacccggccccgcccaggcacggccgaccccgccccgggcaccgcccaccgagccatcctgcctcgcctccccccacgcctgcagcttctcgcgaggggcggcgacggtcccctggtggcaggaggggctccccctgttgcgggtgaggcggctgctctctattttcagatgttgctgtagaaataaagacggtttaaatctgaaaaaaaaaa

SEQ ID NO: 282089 - DNA, 2914 bp, Homo sapiens
gggggctgctgggaaggccggcgggatggaggcggcgggaccggctcgcgggtgcgggtccgggtgaagcgggaggcagccagagtcggagccgggcccgagcaccaggcgcagacgccacagccatggccatgatggtgtttccgcgggaggagaagctgagccaggatgagatcgtgctgggcaccaaggctgtcatccagggactggagactctgcgtggggagcatcgtgccctgctggctcctctggttgcacctgaggccggcgaagccgagcctggctcgcaggagcgctgcatcctcctgcgtcgctccctggaagccattgagcttgggctgggggaggcccaggtgatcttggcattgtcgagccacctgggggctgtagaatcagagaagcagaagctgcgggcgcaggtgcggcgtctggtgcaggagaaccagtggctgcgtgaggagctggcggggacacagcagaagctgcagcgcagtgagcaggccgtggcccagctcgaggaggagaagcagcacttgctgttcatgagccagatccgcaagttggatgaagacgcctcccctaacgaggagaagggggacgtccccaaagacacactggatgacctgttccccaatgaggatgagcagagcccagcccctagcccaggaggaggggatgtgtctggtcagcatgggggctacgagatcccggcccggctccgcaccctgcacaacctggtgatccaatacgcctcacagggccgctacgaggtagctgtgccactctgcaagcaggcactcgaagacctggagaagacgtcaggccacgaccaccctgacgttgccaccatgctgaacatcctggcactggtctatcgggatcagaacaagtacaaggaggctgcccacctgctcaatgatgctctggccatccgggagaaaacactgggcaaggaccacccagccgtggctgcgacactaaacaacctggcagtcctgtatggcaagaggggcaagtacaaggaggctgagccattgtgcaagcgggcactggagatccgggagaaggtcctgggcaagtttcacccagatgtggccaagcagctcagcaacctggccctgctgtgccagaaccagggcaaagctgaggaggtggaatattactatcggcgggcactggagatctatgctacacgcctcgggcccgatgaccccaatgtggccaagaccaagaacaacctggcttcctgctacctgaagcagggcaagtaccaggatgcggagaccttgtacaaggagatcctcacccgcgctcatgagaaagagtttggctctgtcaatggggacaacaagcccatctggatgcacgcagaggagcgggaggaaagcaaggataagcgccgggacagcgccccctatggggaatacggcagctggtacaaggcctgtaaagtagacagccccacagtcaacaccaccctgcgcagcttgggggccctataccggcgccagggcaagctggaagccgcgcacacactagaggactgtgccagccgtaaccgcaagcagggtttggaccccgcaagccagaccaaggtggtagaactgctgaaagatggcagtggcaggcggggagaccgccgcagcagccgagacatggctgggggtgccgggcctcggtctgagtctgacctcgaggacgtgggacctacagctgagtggaatggggatggcagtggctccttgaggcgcagcggttcctttgggaaactccgggatgccctgaggcgcagcagtgagatgctggtaaagaagctgcaggggggcaccccccaggagccccctaaccccaggatgaagcgggccagttccctcaacttcctcaacaagagcgtggaagagccgacccagcctggaggcacaggtctctctgacagccgcactctcagctccagctccatggacctctcccgacgaagctccctggtgggctaatgctgaaggggcagccagtcaccagagcgcccacctggcacacccccctcaccccagccctgcgcatgggcctgctgcttgtcccgcctgtctctcccacagcccctgtcttttctgttcaatctcagggtaaccttctcccttgtcatctcagcctgagccctggaggctgggcctgcccactccagctccatcccttatttattccttccagcagggccctcttccctaggttcgggccagcaggaggtgccggctggagtctccaccatagactcagtggcctggcctccccagaccccagagccaagaacactaagcactcgccggcccttcggcaccctcgccctccctcccgactcaacccggccgttgcttctgtatatagagaaataagttattggccgcgcgcctcccttcagtccacggtactacccgggcctcccctcgtccctcttctagtggtaccgcccaggccttaatcacccccattccgtgcggtggtatctcccaggctctacattctcgggagcggcgcctcccaagggggtcctgggaccttctcgcgctcctcctggcctctgagggatgcgtcctacccgcgccatcgccccgtggcccaggacggggacctccccttagtccgtcctcccaccgccgggccctgccccgcatcccggccttatgcactgcccctcccacccggccccgcccaggcacggccgaccccgccccgggcaccgcccaccgagccatcctgcctcgcctccccccacgcctgcagcttctcgcgaggggcggcgacggtcccctggtggcaggaggggctccccctgttgcgggtgaggcggctgctctctattttcagatgttgctgtagaaataagcgtttctggtgtgtgttttttgtcgtattgtga

SEQ ID NO: 282090 - DNA, 2887 bp, Homo sapiens
caggcgtccggggaccgcctgtttacctaatccggggcggacggcggtgtggccccaggcccggcgcccgcctgcccgcaccctcgtcctcacagacgccacagccatggccatgatggtgtttccgcgggaggagaagctgagccaggatgagatcgtgctgggcaccaaggctgtcatccagggactggagactctgcgtggggagcatcgtgccctgctggctcctctggttgcacctgaggccggcgaagccgagcctggctcgcaggagcgctgcatcctcctgcgtcgctccctggaagccattgagcttgggctgggggaggcccaggtgatcttggcattgtcgagccacctgggggctgtagaatcagagaagcagaagctgcgggcgcaggtgcggcgtctggtgcaggagaaccagtggctgcgtgaggagctggcggggacacagcagaagctgcagcgcagtgagcaggccgtggcccagctcgaggaggagaagcagcacttgctgttcatgagccagatccgcaagttggatgaagacgcctcccctaacgaggagaagggggacgtccccaaagacacactggatgacctgttccccaatgaggatgagcagagcccagcccctagcccaggaggaggggatgtgtctggtcagcatgggggctacgagatcccggcccggctccgcaccctgcacaacctggtgatccaatacgcctcacagggccgctacgaggtagctgtgccactctgcaagcaggcactcgaagacctggagaagacgtcaggccacgaccaccctgacgttgccaccatgctgaacatcctggcactggtctatcgggatcagaacaagtacaaggaggctgcccacctgctcaatgatgctctggccatccgggagaaaacactgggcaaggaccacccagccgtggctgcgacactaaacaacctggcagtcctgtatggcaagaggggcaagtacaaggaggctgagccattgtgcaagcgggcactggagatccgggagaaggtcctgggcaagtttcacccagatgtggccaagcagctcagcaacctggccctgctgtgccagaaccagggcaaagctgaggaggtggaatattactatcggcgggcactggagatctatgctacacgcctcgggcccgatgaccccaatgtggccaagaccaagaacaacctggcttcctgctacctgaagcagggcaagtaccaggatgcggagaccttgtacaaggagatcctcacccgcgctcatgagaaagagtttggctctgtcaatggggacaacaagcccatctggatgcacgcagaggagcgggaggaaagcaaggataagcgccgggacagcgccccctatggggaatacggcagctggtacaaggcctgtaaagtagacagccccacagtcaacaccaccctgcgcagcttgggggccctataccggcgccagggcaagctggaagccgcgcacacactagaggactgtgccagccgtaaccgcaagcagggtttggaccccgcaagccagaccaaggtggtagaactgctgaaagatggcagtggcaggcggggagaccgccgcagcagccgagacatggctgggggtgccgggcctcggtctgagtctgacctcgaggacgtgggacctacagctgagtggaatggggatggcagtggctccttgaggcgcagcggttcctttgggaaactccgggatgccctgaggcgcagcagtgagatgctggtaaagaagctgcaggggggcaccccccaggagccccctaaccccaggatgaagcgggccagttccctcaacttcctcaacaagagcgtggaagagccgacccagcctggaggcacaggtctctctgacagccgcactctcagctccagctccatggacctctcccgacgaagctccctggtgggctaatgctgaaggggcagccagtcaccagagcgcccacctggcacacccccctcaccccagccctgcgcatgggcctgctgcttgtcccgcctgtctctcccacagcccctgtcttttctgttcaatctcagggtaaccttctcccttgtcatctcagcctgagccctggaggctgggcctgcccactccagctccatcccttatttattccttccagcagggccctcttccctaggttcgggccagcaggaggtgccggctggagtctccaccatagactcagtggcctggcctccccagaccccagagccaagaacactaagcactcgccggcccttcggcaccctcgccctccctcccgactcaacccggccgttgcttctgtatatagagaaataagttattggccgcgcgcctcccttcagtccacggtactacccgggcctcccctcgtccctcttctagtggtaccgcccaggccttaatcacccccattccgtgcggtggtatctcccaggctctacattctcgggagcggcgcctcccaagggggtcctgggaccttctcgcgctcctcctggcctctgagggatgcgtcctacccgcgccatcgccccgtggcccaggacggggacctccccttagtccgtcctcccaccgccgggccctgccccgcatcccggccttatgcactgcccctcccacccggccccgcccaggcacggccgaccccgccccgggcaccgcccaccgagccatcctgcctcgcctccccccacgcctgcagcttctcgcgaggggcggcgacggtcccctggtggcaggaggggctccccctgttgcgggtgaggcggctgctctctattttcagatgttgctgtagaaataaagacggtttaaatctgaaaaaaaaaa

SEQ ID NO: 282091 - DNA, 2692 bp, Homo sapiens
ctggtacccgtcgggtattccgggatatagtcagaaccacgctgttaggcggcgggaccggctcgcgggtgcgggtccgggtgaagcgggaggcagccagagtcggagccgggcccgagcaccaggcgcagacgccacagccatggccatgatggtgtttccgcgggaggagaagctgagccaggatgagatcgtgctgggcaccaaggctgtcatccagggactggagactctgcgtggggagcatcgtgccctgctggctcctctggttgcacctgaggccggcgaagccgagcctggctcgcaggagcgctgcatcctcctgcgtcgctccctggaagccattgagcttgggctgggggaggcccaggaggagaagggggacgtccccaaagacacactggatgacctgttccccaatgaggatgagcagagcccagcccctagcccaggaggaggggatgtgtctggtcagcatgggggctacgagatcccggcccggctccgcaccctgcacaacctggtgatccaatacgcctcacagggccgctacgaggtagctgtgccactctgcaagcaggcactcgaagacctggagaagacgtcaggccacgaccaccctgacgttgccaccatgctgaacatcctggcactggtctatcgggatcagaacaagtacaaggaggctgcccacctgctcaatgatgctctggccatccgggagaaaacactgggcaaggaccacccagccgtggctgcgacactaaacaacctggcagtcctgtatggcaagaggggcaagtacaaggaggctgagccattgtgcaagcgggcactggagatccgggagaaggtcctgggcaagtttcacccagatgtggccaagcagctcagcaacctggccctgctgtgccagaaccagggcaaagctgaggaggtggaatattactatcggcgggcactggagatctatgctacacgcctcgggcccgatgaccccaatgtggccaagaccaagaacaacctggcttcctgctacctgaagcagggcaagtaccaggatgcggagaccttgtacaaggagatcctcacccgcgctcatgagaaagagtttggctctgtcaatggggacaacaagcccatctggatgcacgcagaggagcgggaggaaagcaaggataagcgccgggacagcgccccctatggggaatacggcagctggtacaaggcctgtaaagtagacagccccacagtcaacaccaccctgcgcagcttgggggccctataccggcgccagggcaagctggaagccgcgcacacactagaggactgtgccagccgtaaccgcaagcagggtttggaccccgcaagccagaccaaggtggtagaactgctgaaagatggcagtggcaggcggggagaccgccgcagcagccgagacatggctgggggtgccgggcctcggtctgagtctgacctcgaggacgtgggacctacagctgagtggaatggggatggcagtggctccttgaggcgcagcggttcctttgggaaactccgggatgccctgaggcgcagcagtgagatgctggtaaagaagctgcaggggggcaccccccaggagccccctaaccccaggatgaagcgggccagttccctcaacttcctcaacaagagcgtggaagagccgacccagcctggaggcacaggtctctctgacagccgcactctcagctccagctccatggacctctcccgacgaagctccctggtgggctaatgctgaaggggcagccagtcaccagagcgcccacctggcacacccccctcaccccagccctgcgcatgggcctgctgcttgtcccgcctgtctctcccacagcccctgtcttttctgttcaatctcagggtaaccttctcccttgtcatctcagcctgagccctggaggctgggcctgcccactccagctccatcccttatttattccttccagcagggccctcttccctaggttcgggccagcaggaggtgccggctggagtctccaccatagactcagtggcctggcctccccagaccccagagccaagaacactaagcactcgccggcccttcggcaccctcgccctccctcccgactcaacccggccgttgcttctgtatatagagaaataagttattggccgcgcgcctcccttcagtccacggtactacccgggcctcccctcgtccctcttctagtggtaccgcccaggccttaatcacccccattccgtgcggtggtatctcccaggctctacattctcgggagcggcgcctcccaagggggtcctgggaccttctcgcgctcctcctggcctctgagggatgcgtcctacccgcgccatcgccccgtggcccaggacggggacctccccttagtccgtcctcccaccgccgggccctgccccgcatcccggccttatgcactgcccctcccacccggccccgcccaggcacggccgaccccgccccgggcaccgcccaccgagccatcctgcctcgcctccccccacgcctgcagcttctcgcgaggggcggcgacggtcccctggtggcaggaggggctccccctgttgcgggtgaggcggctgctctctattttcagatgttgctgtagaaataaagacggtttaaatctgaaaaaaaaaa

SEQ ID NO: 282092 - DNA, 2472 bp, Homo sapiens
gggggctgctgggaaggccggcgggatggaggcggcgggaccggctcgcgggtgcgggtccgggtgaagcgggaggcagccagagtcggagccgggcccgagcaccaggcgcagacgccacagccatggccatgatggtgtttccgcgggaggagaagctgagccaggatgagatcgtgctgggcaccaaggctgtcatccagggactggagactctgcgtggggagcatcgtgccctgctggctcctctggttgcacctgaggccggcgaagccgagcctggctcgcaggagcgctgcatcctcctgcgtcgctccctggaagccattgagcttgggctgggggaggcccaggtgatcttggcattgtcgagccacctgggggctgtagaatcagagaagcagaagctgcgggcgcaggtgcggcgtctggtgcaggagaaccagtggctgcgtgaggagctggcggggacacagcagaagctgcagcgcagtgagcaggccgtggcccagctcgaggaggagaagcagcacttgctgttcatgagccagatccgcaagttggatgaagacgcctcccctaacgaggagaagggggacgtccccaaagacacactggatgacctgttccccaatgaggatgagcagagcccagcccctagcccaggaggaggggatgtgtctggtcagcatgggggctacgagatcccggcccggctccgcaccctgcacaacctggtgatccaatacgcctcacagggccgctacgaggtagctgtgccactctgcaagcaggcactcgaagacctggagaagacgtcaggccacgaccaccctgacgttgccaccatgctgaacatcctggcactggtctatcgggatcagaacaagtacaaggaggctgcccacctgctcaatgatgctctggccatccgggagaaaacactgggcaaggaccacccagccgtggctgcgacactaaacaacctggcagtcctgtatggcaagaggggcaagtacaaggaggctgagccattgtgcaagcgggcactggagatccgggagaaggtcctgggcaagtttcacccagatgtggccaagcagctcagcaacctggccctgctgtgccagaaccagggcaaagctgaggaggtggaatattactatcggcgggcactggagatctatgctacacgcctcgggcccgatgaccccaatgtggccaagaccaagaacaacctggcttcctgctacctgaagcagggcaagtaccaggatgcggagaccttgtacaaggagatcctcacccgcgctcatgagaaagagtttggctctgtcaatggggacaacaagcccatctggatgcacgcagaggagcgggaggaaagcaaggataagcgccgggacagcgccccctatggggaatacggcagctggtacaaggcctgtaaagtagacagccccacagtcaacaccaccctgcgcagcttgggggccctataccggcgccagggcaagctggaagccgcgcacacactagaggactgtgccagccgtaaccgcaagcagggtttggaccccgcaagccagaccaaggtggtagaactgctgaaagatggcagtggcaggcggggagaccgccgcagcagccgagacatggctgggggtgccgggcctcggtctgagtctgacctcgaggacgtgggacctacagctgagtggaatggggatggcagtggctccttgaggcgcagcggttcctttgggaaactccgggatgccctgaggcgcagcagtgagatgctggtaaagaagctgcaggggggcaccccccaggagccccctaaccccaggatgaagcgggccagttccctcaacttcctcaacaagagcgtggaagagccgacccagcctggaggcacaggtctctctgacagccgcactctcagctccagctccatggacctctcccgacgaagctccctggtgggctaatgctgaaggggcagccagtcaccagagcgcccacctggcacacccccctcaccccagccctgcgcatgggcctgctgcttgtcccgcctgtctctcccacagcccctgtcttttctgttcaatctcagggtaaccttctcccttgtcatctcagcctgagccctggaggctgggcctgcccactccagctccatcccttatttattccttccagcagggccctcttccctaggttcgggccagcaggaggtgccggctggagtctccaccatagactcagtggcctggcctccccagaccccagagccaagaacactaagcactcgccggcccttcggcaccctcgccctcttctcgcgaggggcggcgacggtcccctggtggcaggaggggctccccctgttgcgggtgaggcggctgctctctattttcagatgttgctgtagaaataaagacggtttaaatctgaaaaaaaaaa

SEQ ID NO: 282093 - DNA, 2553 bp, Homo sapiens
gggggctgctgggaaggccggcgggatggaggcggcgggaccggctcgcgggtgcgggtccgggtgaagcgggaggcagccagagtcggagccgggcccgagcaccaggcgcagacgccacagccatggccatgatggtgtttccgcgggaggagaagctgagccaggatgagatcgtgctgggcaccaaggctgtcatccagggactggagactctgcgtggggagcatcgtgccctgctggctcctctggttgcacctgaggccggcgaagccgagcctggctcgcaggagcgctgcatcctcctgcgtcgctccctggaagccattgagcttgggctgggggaggcccaggtgatcttggcattgtcgagccacctgggggctgtagaatcagagaagcagaagctgcgggcgcaggtgcggcgtctggtgcaggagaaccagtggctgcgtgaggagctggcggggacacagcagaagctgcagcgcagtgagcaggccgtggcccagctcgaggaggagaagcagcacttgctgttcatgagccagatccgcaagttggatgaagacgcctcccctaacgaggagaagggggacgtccccaaagacacactggatgacctgttccccaatgaggatgagcagagcccagcccctagcccaggaggaggggatgtgtctggtcagcatgggggctacgagatcccggcccggctccgcaccctgcacaacctggtgatccaatacgcctcacagggccgctacgaggtagctgtgccactctgcaagcaggcactcgaagacctggagaagacgtcaggccacgaccaccctgacgttgccaccatgctgaacatcctggcactggtctatcgggatcagaacaagtacaaggaggctgcccacctgctcaatgatgctctggccatccgggagaaaacactgggcaaggaccacccagccgtggctgcgacactaaacaacctggcagtcctgtatggcaagaggggcaagtacaaggaggctgagccattgtgcaagcgggcactggagatccgggagaaggtcctgggcaagtttcacccagatgtggccaagcagctcagcaacctggccctgctgtgccagaaccagggcaaagctgaggaggtggaatattactatcggcgggcactggagatctatgctacacgcctcgggcccgatgaccccaatgtggccaagaccaagaacaacctggcttcctgctacctgaagcagggcaagtaccaggatgcggagaccttgtacaaggagatcctcacccgcgctcatgagaaagagtttggctctgtcaatggggacaacaagcccatctggatgcacgcagaggagcgggaggaaagcaaggataagcgccgggacagcgccccctatggggaatacggcagctggtacaaggcctgtaaagtagacagccccacagtcaacaccaccctgcgcagcttgggggccctataccggcgccagggcaagctggaagccgcgcacacactagaggactgtgccagccgtaaccgcaagcagggtttggaccccgcaagccagaccaaggtggtagaactgctgaaagatggcagtggcaggcggggagaccgccgcagcagccgagacatggctgggggtgccgggcctcggtctgagtctgacctcgaggacgtgggacctacagctgagtggaatggggatggcagtggctccttgaggcgcagcggttcctttgggaaactccgggatgccctgaggcgcagcagtgagatgctggtaaagaagctgcaggggggcaccccccaggagccccctaaccccaggatgaagcgggccagttccctcaacttcctcaacaagagcgtggaagagccgacccagcctggaggcacaggtctctctgacagccgcactctcagctccagctccatggacctctcccgacgaagctccctggtgggctaatgctgaaggggcagccagtcaccagagcgcccacctggcacacccccctcaccccagccctgcgcatgggcctgctgcttgtcccgcctgtctctcccacagcccctgtcttttctgttcaatctcagggtaaccttctcccttgtcatctcagcctgagccctggaggctgggcctgcccactccagctccatcccttatttattccttccagcagggccctcttccctaggttcgggccagcaggaggtgccggctggagtctccaccatagactcagtggcctggccttccagaccagagcagaactaagcctcgcggcttggggacctgggctcctccggttaaccggcggggtctggtttgagaaaaagtttgggcggggcgccttaggcacggagaaaccgggccccacggcctttaaggacgccagggtatacccaacgggggttcaccggaactcgggggcccggggtgggacggcctgcataaaggacccgccccggcgaaggcattcccgagcacaatgaagagaagagggagaccacagacggggcaa

SEQ ID NO: 282094 - DNA, 1878 bp, Homo sapiens
gctcggtaccatctctccactctggagatccgggagaaggtcctgggcaagtttcacccagatgtggccaagcagctcagcaacctggccctgctgtgccagaaccagggcaaagctgaggaggtggaatattactatcggcgggcactggagatctatgctacacgcctcgggcccgatgaccccaatgtggccaagaccaagaacaacctggcttcctgctacctgaagcagggcaagtaccaggatgcggagaccttgtacaaggagatcctcacccgcgctcatgagaaagagtttggctctgtcaatggggacaacaagcccatctggatgcacgcagaggagcgggaggaaagcaaggataagcgccgggacagcgccccctatggggaatacggcagctggtacaaggcctgtaaagtagacagccccacagtcaacaccaccctgcgcagcttgggggccctataccggcgccagggcaagctggaagccgcgcacacactagaggactgtgccagccgtaaccgcaagcagggtttggaccccgcaagccagaccaaggtggtagaactgctgaaagatggcagtggcaggcggggagaccgccgcagcagccgagacatggctgggggtgccgggcctcggtctgagtctgacctcgaggacgtgggacctacagctgagtggaatggggatggcagtggctccttgaggcgcagcggttcctttgggaaactccgggatgccctgaggcgcagcagtgagatgctggtaaagaagctgcaggggggcaccccccaggagccccctaaccccaggatgaagcgggccagttccctcaacttcctcaacaagagcgtggaagagccgacccagcctggaggcacaggtctctctgacagccgcactctcagctccagctccatggacctctcccgacgaagctccctggtgggctaatgctgaaggggcagccagtcaccagagcgcccacctggcacacccccctcaccccagccctgcgcatgggcctgctgcttgtcccgcctgtctctcccacagcccctgtcttttctgttcaatctcagggtaaccttctcccttgtcatctcagcctgagccctggaggctgggcctgcccactccagctccatcccttatttattccttccagcagggccctcttccctaggttcgggccagcaggaggtgccggctggagtctccaccatagactcagtggcctggcctccccagaccccagagccaagaacactaagcactcgccggcccttcggcaccctcgccctccctcccgactcaacccggccgttgcttctgtatatagagaaataagttattggccgcgcgcctcccttcagtccacggtactacccgggcctcccctcgtccctcttctagtggtaccgcccaggccttaatcacccccattccgtgcggtggtatctcccaggctctacattctcgggagcggcgcctcccaagggggtcctgggaccttctcgcgctcctcctggcctctgagggatgcgtcctacccgcgccatcgccccgtggcccaggacggggacctccccttagtccgtcctcccaccgccgggccctgccccgcatcccggccttatgcactgcccctcccacccggccccgcccaggcacggccgaccccgccccgggcaccgcccaccgagccatcctgcctcgcctccccccacgcctgcagcttctcgcgaggggcggcgacggtcccctggtggcaggaggggctccccctgttgcgggtgaggcggctgctctctattttcagatgttgctgtagaaataaagacggtttaaatctgaaaaaaaaaa

SEQ ID NO: 282095 - DNA, 1551 bp, Homo sapiens
tagcggatgctatgcttgggggcgaaggaaagcaaggataagcgccgggacagcgccccctatggggaatacggcagctggtacaaggcctgtaaagtagacagccccacagtcaacaccaccctgcgcagcttgggggccctataccggcgccagggcaagctggaagccgcgcacacactagaggactgtgccagccgtaaccgcaagcagggtttggaccccgcaagccagaccaaggtggtagaactgctgaaagatggcagtggcaggcggggagaccgccgcagcagccgagacatggctgggggtgccgggcctcggtctgagtctgacctcgaggacgtgggacctacagctgagtggaatggggatggcagtggctccttgaggcgcagcggttcctttgggaaactccgggatgccctgaggcgcagcagtgagatgctggtaaagaagctgcaggggggcaccccccaggagccccctaaccccaggatgaagcgggccagttccctcaacttcctcaacaagagcgtggaagagccgacccagcctggaggcacaggtctctctgacagccgcactctcagctccagctccatggacctctcccgacgaagctccctggtgggctaatgctgaaggggcagccagtcaccagagcgcccacctggcacacccccctcaccccagccctgcgcatgggcctgctgcttgtcccgcctgtctctcccacagcccctgtcttttctgttcaatctcagggtaaccttctcccttgtcatctcagcctgagccctggaggctgggcctgcccactccagctccatcccttatttattccttccagcagggccctcttccctaggttcgggccagcaggaggtgccggctggagtctccaccatagactcagtggcctggcctccccagaccccagagccaagaacactaagcactcgccggcccttcggcaccctcgccctccctcccgactcaacccggccgttgcttctgtatatagagaaataagttattggccgcgcgcctcccttcagtccacggtactacccgggcctcccctcgtccctcttctagtggtaccgcccaggccttaatcacccccattccgtgcggtggtatctcccaggctctacattctcgggagcggcgcctcccaagggggtcctgggaccttctcgcgctcctcctggcctctgagggatgcgtcctacccgcgccatcgccccgtggcccaggacggggacctccccttagtccgtcctcccaccgccgggccctgccccgcatcccggccttatgcactgcccctcccacccggccccgcccaggcacggccgaccccgccccgggcaccgcccaccgagccatcctgcctcgcctccccccacgcctgcagcttctcgcgaggggcggcgacggtcccctggtggcaggaggggctccccctgttgcgggtgaggcggctgctctctattttcagatgttgctgtagaaataaagacggtttaaatctgaaaaaaaaaa

SEQ ID NO: 282096 - DNA, 825 bp, Homo sapiens
aagcgtatacggtagtacaggctgggtgggaatcggccgagggtaaccttctcccttgtcatctcagcctgagccctggaggctgggcctgcccactccagctccatcccttatttattccttccagcagggccctcttccctaggttcgggccagcaggaggtgccggctggagtctccaccatagactcagtggcctggcctccccagaccccagagccaagaacactaagcactcgccggcccttcggcaccctcgccctccctcccgactcaacccggccgttgcttctgtatatagagaaataagttattggccgcgcgcctcccttcagtccacggtactacccgggcctcccctcgtccctcttctagtggtaccgcccaggccttaatcacccccattccgtgcggtggtatctcccaggctctacattctcgggagcggcgcctcccaagggggtcctgggaccttctcgcgctcctcctggcctctgagggatgcgtcctacccgcgccatcgccccgtggcccaggacggggacctccccttagtccgtcctcccaccgccgggccctgccccgcatcccggccttatgcactgcccctcccacccggccccgcccaggcacggccgaccccgccccgggcaccgcccaccgagccatcctgcctcgcctccccccacgcctgcagcttctcgcgaggggcggcgacggtcccctggtggcaggaggggctccccctgttgcgggtgaggcggctgctctctattttcagatgttgctgtagaaataaagacggtttaaatctgaaaaaaaaaa

SEQ ID NO: 282097 - DNA, 748 bp, Homo sapiens
gggggctgctgggaaggccggcgggatggaggcggcgggaccggctcgcgggtgcgggtccgggtgaagcgggaggcagccagagtcggagccgggcccgagcaccaggcgcaggcccggcgcccgcctgcccgcaccctcgtcctcacagacgccacagccatggccatgatggtgtttccgcgggaggagaagctgagccaggatgagatcgtgctgggcaccaaggctgtcatccagggactggagactctgcgtggggagcatcgtgccctgctggctcctctggttgcacctgaggccggcgaagccgagcctggctcgcaggagcgctgcatcctcctgcgtcgctccctggaagccattgagcttgggctgggggaggcccaggtgatcttggcattgtcgagccacctgggggctgtagaatcagagaagcagaagctgcgggcgcaggtgcggcgtctggtgcaggagaaccagtggctgcgtgaggagctggcggggacacagcagaagctgcagcgcagtgagcaggccgtggcccagctcgaggaggagaagcagcacttgctgttcatgagccagatccgcaagttggatgaagacgcctcccctaacgaggagaagggggacgtccccaaagacacactggatgacctgttccccctgttgcgggtgaggcggctgctctctattttcagatgttgctgtagaaataaagacggtttaaatctgaaaaaaaaaa

SEQ ID NO: 282098 - DNA, 643 bp, Homo sapiens
ggggtggacgtgtaaacggccagtgctaacaccgtcactgtggagatggacgggagtgtcagggcaccagggtgtggccttgggtcagaactgccattgcctctgcccagctcagggattccggctgcctctgccaggtcagaccccttcaggccagggaggcacagactggcagcagcacagggctgagccacctgccccctctgcccacagcctggaggcacaggtctctctgacagccgcactctcagctccagctccatggacctctcccgacgaagctccctggtgggctaatgctgaaggggcagccagtcaccagagcgcccacctggcacacccccctcaccccagccctgcgcatgggcctgctgcttgtcccgcctgtctctcccacagcccctgtcttttctgttcaatctcagggtaaccttctcccttgtcatctcagcctgagccctggaggctgggcctgcccactccagctccatcccttatttattccttccagcagggccctcttccctaggttcgggccagcaggaggtgccggctggagtctccaccatagactcagtggcctggcctccccagaccccagagccaagaacactaagcactcgccggcccttcggcaccctcg

SEQ ID NO: 282099 - DNA, 639 bp, Homo sapiens
ctggtacccgtcgggtattccgggatatagtcagaaccacgctgttaggcggcgggaccggctcgcgggtgcgggtccgggtgaagcgggaggcagccagagtcggagccgggcccgagcaccaggcgcaggcccggcgcccgcctgcccgcaccctcgtcctcacagacgccacagccatggccatgatggtgtttccgcgggaggagaagctgagccaggatgagatcgtgctgggcaccaaggctgtcatccagggactggagactctgcgtggggagcatcgtgccctgctggctcctctggttgcacctgaggccggcgaagccgagcctggctcgcaggagcgctgcatcctcctgcgtcgctccctggaagccattgagcttgggctgggggaggcccaggtgatcttggcattgtcgagccacctgggggctgtagaatcagagaagcagaagctgcgggcgcaggtgcggcgtctggtgcaggagaaccagtggctgcgtgaggagctggcggggacacagcagaagctgcagcgcagtgagcaggccgtggcccagctcgaggaggagaagcagcacttgctgttcatgagccagatccgcaagttggatgaagacgcctcccctaacg

SEQ ID NO: 282100 - DNA, 2610 bp, Homo sapiens
ggctagtagaggccgggtttaaatcggacgaggattgagcttgggctgggggaggccgtgatcttggcattgtcgagccacctgggggctgtagaatcagagaagcagaagctgcgggcgcaggtgcggcgtctggtgcaggagaaccagtggctgcgtgaggagctggcggggacacagcagaagctgcagcgcagtgagcaggccgtggcccagctcgaggaggagaagcagcacttgctgttcatgagccagatccgcaagttggatgaagacgcctcccctaacgaggagaagggggacgtccccaaagacacactggatgacctgttccccaatgaggatgagcagagcccagcccctagcccaggaggaggggatgtgtctggtcagcatgggggctacgagatcccggcccggctccgcaccctgcacaacctggtgatccaatacgcctcacagggccgctacgaggtagctgtgccactctgcaagcaggcactcgaagacctggagaagacgtcaggccacgaccaccctgacgttgccaccatgctgaacatcctggcactggtctatcgggatcagaacaagtacaaggaggctgcccacctgctcaatgatgctctggccatccgggagaaaacactgggcaaggaccacccagccgtggctgcgacactaaacaacctggcagtcctgtatggcaagaggggcaagtacaaggaggctgagccattgtgcaagcgggcactggagatccgggagaaggtcctgggcaagtttcacccagatgtggccaagcagctcagcaacctggccctgctgtgccagaaccagggcaaagctgaggaggtggaatattactatcggcgggcactggagatctatgctacacgcctcgggcccgatgaccccaatgtggccaagaccaagaacaacctggcttcctgctacctgaagcagggcaagtaccaggatgcggagaccttgtacaaggagatcctcacccgcgctcatgagaaagagtttggctctgtcaatggggacaacaagcccatctggatgcacgcagaggagcgggaggaaagcaaggataagcgccgggacagcgccccctatggggaatacggcagctggtacaaggcctgtaaagtagacagccccacagtcaacaccaccctgcgcagcttgggggccctataccggcgccagggcaagctggaagccgcgcacacactagaggactgtgccagccgtaaccgcaagcagggtttggaccccgcaagccagaccaaggtggtagaactgctgaaagatggcagtggcaggcggggagaccgccgcagcagccgagacatggctgggggtgccgggcctcggtctgagtctgacctcgaggacgtgggacctacagctgagtggaatggggatggcagtggctccttgaggcgcagcggttcctttgggaaactccgggatgccctgaggcgcagcagtgagatgctggtaaagaagctgcaggggggcaccccccaggagccccctaaccccaggatgaagcgggccagttccctcaacttcctcaacaagagcgtggaagagccgacccagcctggaggcacaggtctctctgacagccgcactctcagctccagctccatggacctctcccgacgaagctccctggtgggctaatgctgaaggggcagccagtcaccagagcgcccacctggcacacccccctcaccccagccctgcgcatgggcctgctgcttgtcccgcctgtctctcccacagcccctgtcttttctgttcaatctcagggtaaccttctcccttgtcatctcagcctgagccctggaggctgggcctgcccactccagctccatcccttatttattccttccagcagggccctcttccctaggttcgggccagcaggaggtgccggctggagtctccaccatagactcagtggcctggcctccccagaccccagagccaagaacactaagcactcgccggcccttcggcaccctcgccctccctcccgactcaacccggccgttgcttctgtatatagagaaataagttattggccgcgcgcctcccttcagtccacggtactacccgggcctcccctcgtccctcttctagtggtaccgcccaggccttaatcacccccattccgtgcggtggtatctcccaggctctacattctcgggagcggcgcctcccaagggggtcctgggaccttctcgcgctcctcctggcctctgagggatgcgtcctacccgcgccatcgccccgtggcccaggacggggacctccccttagtccgtcctcccaccgccgggccctgccccgcatcccggccttatgcactgcccctcccacccggccccgcccaggcacggccgaccccgccccgggcaccgcccaccgagccatcctgcctcgcctccccccacgcctgcagcttctcgcgaggggcggcgacggtcccctggtggcaggaggggctccccctgttgcgggtgaggcggctgctctctattttcagatgttgctgtagaaataaagacggtttaaatctgaaaaaaaaaa

SEQ ID NO: 282101 - DNA, 2899 bp, Homo sapiens
cggcccgcgctcctttaaggcagcgaacgggccaagagaagcgtgtttcgccccctccgacgccaccgaggcccggcgcccgcctgcccgcaccctcgtcctcacagacgccacagccatggccatgatggtgtttccgcgggaggagaagctgagccaggatgagatcgtgctgggcaccaaggctgtcatccagggactggagactctgcgtggggagcatcgtgccctgctggctcctctggttgcacctgaggccggcgaagccgagcctggctcgcaggagcgctgcatcctcctgcgtcgctccctggaagccattgagcttgggctgggggaggcccaggtgatcttggcattgtcgagccacctgggggctgtagaatcagagaagcagaagctgcgggcgcaggtgcggcgtctggtgcaggagaaccagtggctgcgtgaggagctggcggggacacagcagaagctgcagcgcagtgagcaggccgtggcccagctcgaggaggagaagcagcacttgctgttcatgagccagatccgcaagttggatgaagacgcctcccctaacgaggagaagggggacgtccccaaagacacactggatgacctgttccccaatgaggatgagcagagcccagcccctagcccaggaggaggggatgtgtctggtcagcatgggggctacgagatcccggcccggctccgcaccctgcacaacctggtgatccaatacgcctcacagggccgctacgaggtagctgtgccactctgcaagcaggcactcgaagacctggagaagacgtcaggccacgaccaccctgacgttgccaccatgctgaacatcctggcactggtctatcgggatcagaacaagtacaaggaggctgcccacctgctcaatgatgctctggccatccgggagaaaacactgggcaaggaccacccagccgtggctgcgacactaaacaacctggcagtcctgtatggcaagaggggcaagtacaaggaggctgagccattgtgcaagcgggcactggagatccgggagaaggtcctgggcaagtttcacccagatgtggccaagcagctcagcaacctggccctgctgtgccagaaccagggcaaagctgaggaggtggaatattactatcggcgggcactggagatctatgctacacgcctcgggcccgatgaccccaatgtggccaagaccaagaacaacctggcttcctgctacctgaagcagggcaagtaccaggatgcggagaccttgtacaaggagatcctcacccgcgctcatgagaaagagtttggctctgtcaatggggacaacaagcccatctggatgcacgcagaggagcgggaggaaagcaaggataagcgccgggacagcgccccctatggggaatacggcagctggtacaaggcctgtaaagtagacagccccacagtcaacaccaccctgcgcagcttgggggccctataccggcgccagggcaagctggaagccgcgcacacactagaggactgtgccagccgtaaccgcaagcagggtttggaccccgcaagccagaccaaggtggtagaactgctgaaagatggcagtggcaggcggggagaccgccgcagcagccgagacatggctgggggtgccgggcctcggtctgagtctgacctcgaggacgtgggacctacagctgagtggaatggggatggcagtggctccttgaggcgcagcggttcctttgggaaactccgggatgccctgaggcgcagcagtgagatgctggtaaagaagctgcaggggggcaccccccaggagccccctaaccccaggatgaagcgggccagttccctcaacttcctcaacaagagcgtggaagagccgacccagcctggaggcacaggtctctctgacagccgcactctcagctccagctccatggacctctcccgacgaagctccctggtgggctaatgctgaaggggcagccagtcaccagagcgcccacctggcacacccccctcaccccagccctgcgcatgggcctgctgcttgtcccgcctgtctctcccacagcccctgtcttttctgttcaatctcagggtaaccttctcccttgtcatctcagcctgagccctggaggctgggcctgcccactccagctccatcccttatttattccttccagcagggccctcttccctaggttcgggccagcaggaggtgccggctggagtctccaccatagactcagtggcctggcctccccagaccccagagccaagaacactaagcactcgccggcccttcggcaccctcgccctccctcccgactcaacccggccgttgcttctgtatatagagaaataagttattggccgcgcgcctcccttcagtccacggtactacccgggcctcccctcgtccctcttctagtggtaccgcccaggccttaatcacccccattccgtgcggtggtatctcccaggctctacattctcgggagcggcgcctcccaagggggtcctgggaccttctcgcgctcctcctggcctctgagggatgcgtcctacccgcgccatcgccccgtggcccaggacggggacctccccttagtccgtcctcccaccgccgggccctgccccgcatcccggccttatgcactgcccctcccacccggccccgcccaggcacggccgaccccgccccgggcaccgcccaccgagccatcctgcctcgcctccccccacgcctgcagcttctcgcgaggggcggcgacggtcccctggtggcaggaggggctccccctgttgcgggtgaggcggctgctctctattttcagatgttgctgtagaaataaagacggtttaaatctgaaaaaaaaaa

SEQ ID NO: 282102 - DNA, 2479 bp, Homo sapiens
ctggtacccgtcgggtattccgggatatagtcagaaccacgctgttaggcggcgggaccggctcgcgggtgcgggtccgggtgaagcgggaggcagccagagtcggagccgggcccgagcaccaggcgcaggcccggcgcccgcctgcccgcaccctcgtcctcacagacgccacagccatggccatgatggtgtttccgcgggaggagaagctgagccaggatgagatcgtgctgggcaccaaggctgtcatccagggactggagactctgcgtggggagcatcgtgccctgctggctcctctggttgcacctgaggccggcgaagccgagcctggctcgcaggagcgctgcatcctcctgcgtcgctccctggaagccattgagcttgggctgggggaggcccaggtgatcttggcattgtcgagccacctgggggctgtagaatcagggatcagaacaagtacaaggaggctgcccacctgctcaatgatgctctggccatccgggagaaaacactgggcaaggaccacccagccgtggctgcgacactaaacaacctggcagtcctgtatggcaagaggggcaagtacaaggaggctgagccattgtgcaagcgggcactggagatccgggagaaggtcctgggcaagtttcacccagatgtggccaagcagctcagcaacctggccctgctgtgccagaaccagggcaaagctgaggaggtggaatattactatcggcgggcactggagatctatgctacacgcctcgggcccgatgaccccaatgtggccaagaccaagaacaacctggcttcctgctacctgaagcagggcaagtaccaggatgcggagaccttgtacaaggagatcctcacccgcgctcatgagaaagagtttggctctgtcaatggggacaacaagcccatctggatgcacgcagaggagcgggaggaaagcaaggataagcgccgggacagcgccccctatggggaatacggcagctggtacaaggcctgtaaagtagacagccccacagtcaacaccaccctgcgcagcttgggggccctataccggcgccagggcaagctggaagccgcgcacacactagaggactgtgccagccgtaaccgcaagcagggtttggaccccgcaagccagaccaaggtggtagaactgctgaaagatggcagtggcaggcggggagaccgccgcagcagccgagacatggctgggggtgccgggcctcggtctgagtctgacctcgaggacgtgggacctacagctgagtggaatggggatggcagtggctccttgaggcgcagcggttcctttgggaaactccgggatgccctgaggcgcagcagtgagatgctggtaaagaagctgcaggggggcaccccccaggagccccctaaccccaggatgaagcgggccagttccctcaacttcctcaacaagagcgtggaagagccgacccagcctggaggcacaggtctctctgacagccgcactctcagctccagctccatggacctctcccgacgaagctccctggtgggctaatgctgaaggggcagccagtcaccagagcgcccacctggcacacccccctcaccccagccctgcgcatgggcctgctgcttgtcccgcctgtctctcccacagcccctgtcttttctgttcaatctcagggtaaccttctcccttgtcatctcagcctgagccctggaggctgggcctgcccactccagctccatcccttatttattccttccagcagggccctcttccctaggttcgggccagcaggaggtgccggctggagtctccaccatagactcagtggcctggcctccccagaccccagagccaagaacactaagcactcgccggcccttcggcaccctcgccctccctcccgactcaacccggccgttgcttctgtatatagagaaataagttattggccgcgcgcctcccttcagtccacggtactacccgggcctcccctcgtccctcttctagtggtaccgcccaggccttaatcacccccattccgtgcggtggtatctcccaggctctacattctcgggagcggcgcctcccaagggggtcctgggaccttctcgcgctcctcctggcctctgagggatgcgtcctacccgcgccatcgccccgtggcccaggacggggacctccccttagtccgtcctcccaccgccgggccctgccccgcatcccggccttatgcactgcccctcccacccggccccgcccaggcacggccgaccccgccccgggcaccgcccaccgagccatcctgcctcgcctccccccacgcctgcagcttctcgcgaggggcggcgacggtcccctggtggcaggaggggctccccctgttgcgggtgaggcggctgctctctattttcagatgttgctgtagaaataaagacggtttaaatctgaaaaaaaaaa

SEQ ID NO: 282103 - DNA, 2574 bp, Homo sapiens
gggggctgctgggaaggccggcgggatggaggcggcgggaccggctcgcgggtgcgggtccgggtgaagcgggaggcagccagagtcggagccgggcccgagcaccaggcgcagacgccacagccatggccatgatggtgtttccgcgggaggagaagctgagccaggatgagatcgtgctgggcaccaaggctgtcatccagggactggagactctgcgtggggagcatcgtgccctgctggctcctctggttgcacctgaggccggcgaagccgagcctggctcgcaggagcgctgcatcctcctgcgtcgctccctggaagccattgagcttgggctgggggaggcccaggtgatcttggcattgtcgagccacctgggggctgtagaatcagagaagcagaagctgcgggcgcaggtgcggcgtctggtgcaggagaaccagtggctgcgtgaggagctggcggggacacagcagaagctgcagcgcagtgagcaggccgtggcccagctcgaggaggagaagcagcacttgctgttcatgagccagatccgcaagttggatgaagacgcctcccctaacgaggagaagggggacgtccccaaagacacactggatgacctgttccccaatgaggatgagcagagcccagcccctagcccaggaggaggggatgtgtctggtcagcatgggggctacgagatcccggcccggctccgcaccctgcacaacctggtgatccaatacgcctcacagggccgctacgaggtagctgtgccactctgcaagcaggcactcgaagacctggagaagacgtcaggccacgaccaccctgacgttgccaccatgctgaacatcctggcactggtctatcgggatcagaacaagtacaaggaggctgcccacctgctcaatgatgctctggccatccgggagaaaacactgggcaaggaccacccagccgtggctgcgacactaaacaacctggcagtcctgtatggcaagaggggcaagtacaaggaggctgagccattgtgcaagcgggcactggagatccgggagaaggtcctgggcaagtttcacccagatgtggccaagcagctcagcaacctggccctgctgtgccagaaccagggcaaagctgaggaggtggaatattactatcggcgggcactggagatctatgctacacgcctcgggcccgatgaccccaatgtggccaagaccaagaacaacctggcttcctgctacctgaagcagggcaagtaccaggatgcggagaccttgtacaaggagatcctcacccgcgctcatgagaaagagtttggctctgtcaatggggacaacaagcccatctggatgcacgcagaggagcgggaggaaagcaaggataagcgccgggacagcgccccctatggggaatacggcagctggtacaaggcctgtaaagtagacagccccacagtcaacaccaccctgcgcagcttgggggccctataccggcgccagggcaagctggaagccgcgcacacactagaggactgtgccagccgtaaccgcaagcagggtttggaccccgcaagccagaccaaggtggtagaactgctgaaagatggcagtggcaggcggggagaccgccgcagcagccgagacatggctgggggtgccgggcctcggtctgagtctgacctcgaggacgtgggacctacagctgagtggaatggggatggcagtggctccttgaggcgcagcggttcctttgggaaactccgggatgccctgaggcgcagcagtgagatgctggtaaagaagctgcaggggggcaccccccaggagccccctaaccccaggatgaagcgggccagttccctcaacttcctcaacaagagcgtggaagagccgacccagcctggaggcacaggtctctctgacagccgcactctcagctccagctccatggacctctcccgacgaagctccctggtgggctaatgctgaaggggcagccagtcaccagagcgcccacctggcacacccccctcaccccagccctgcgcatgggcctgctgcttgtcccgcctgtctctcccacagcccctgtcttttctgttcaatctcagggtaaccttctcccttgtcatctcagcctgagccctggaggctgggcctgcccactccagctccatcccttatttattccttccagcagggccctcttccctaggttcgggccagcaggaggtgccggctggagtctccaccatagactcagtggcctggccttaagttcagagccaggcctggctctgaacttaggcctggctctgaacttaggcctcctcttcggcctcctcaccgaaatcctcctcctattctgcggtggcatcctggtactgctgatactcagagacgaggtcgttcatgttgctctcagcctcggtgaactccatctcgtccatgccctcgcctgtgtaccagtggaggaaggccttccggcggaacatggcagtgaactgctccgagatgcgcttgaagagctcctggatggctgtgctattgcaatgaaggcgat

SEQ ID NO: 282104 - DNA, 2050 bp, Homo sapiens
gggggctgctgggaaggccggcgggatggaggcggcgggaccggctcgcgggtgcgggtccgggtgaagcgggaggcagccagagtcggagccgggcccgagcaccaggcgcagacgccacagccatggccatgatggtgtttccgcgggaggagaagctgagccaggatgagatcgtgctgggcaccaaggctgtcatccagggactggagactctgcgtggggagcatcgtgccctgctggctcctctggttgcacctgaggccggcgaagccgagcctggctcgcaggagcgctgcatcctcctgcgtcgctccctggaagccattgagcttgggctgggggaggcccaggtgatcttggcattgtcgagccacctgggggctgtagaatcagagaagcagaagctgcgggcgcaggtgcggcgtctggtgcaggagaaccagtggctgcgtgaggagctggcggggacacagcagaagctgcagcgcagtgagcaggccgtggcccagctcgaggaggagaagcagcacttgctgttcatgagccagatccgcaagttggatgaagacgcctcccctaacgaggagaagggggacgtccccaaagacacactggatgacctgttccccaatgaggatgagcagagcccagcccctagcccaggaggaggggatgtgtctggtcagcatgggggctacgagatcccggcccggctccgcaccctgcacaacctggtgatccaatacgcctcacagggccgctacgaggtagctgtgccactctgcaagcaggcactcgaagacctggagaagacgtcaggccacgaccaccctgacgttgccaccatgctgaacatcctggcactggtctatcgggatcagaacaagtacaaggaggctgcccacctgctcaatgatgctctggccatccgggagaaaacactgggcaaggaccacccagccgtggctgcgacactaaacaacctggcagtcctgtatggcaagaggggcaagtacaaggaggctgagccattgtgcaagcgggcactggagatccgggagaaggtcctgggcaagtttcacccagatgtggccaagcagctcagcaacctggccctgctgtgccagaaccagggcaaagctgaggaggtggaatattactatcggcgggcactggagatctatgctacacgcctcgggcccgatgaccccaatgtggccaagaccaagaacaacctggcttcctgctacctgaagcagggcaagtaccaggatgcggagaccttgtacaaggagatcctcacccgcgctcatgagaaagagtttggctctgtcaatggggacaacaagcccatctggatgcacgcagaggagcgggaggaaagcaaggataagcgccgggacagcgccccctatggggaatacggcagctggtacaaggcctgtaaagtagacagccccacagtcaacaccaccctgcgcagcttgggggccctataccggcgccagggcaagctggaagccgcgcacacactagaggactgtgccagccgtaaccgcaagcagggtttggaccccgcaagccagaccaaggtggtagaactgctgaaagatggcagtggcaggcggggagaccgccgcagcagccgagacatggctgggggtgccgggcctcggtctgagtctgacctcgaggacgtgggacctacagctgagtggaatggggatggcagtggctccttgaggcgcagcggttcctttgggaaactccgggatgccctgaggcgcagcagtgagatgctggtaaagaagctgcaggggggcaccccccaggagccccctaaccccaggatgaagcgggccagttccctcaacttcctcaacaagagcgtggaagagccgacccagcctggaggcacaggtctctctgacagccgcactctcagctccagctccatggacctctcccgacgaagctccctggtgggctaatgctgaaggggcagccagtcaccagagcgccgtcgcacgcacggggatccttagat

SEQ ID NO: 282105 - DNA, 1092 bp, Homo sapiens
aggtgactctccaggatcttacgggagccttaccctaggatgaagcgggccagttccctcaacttcctcaacaagagcgtggaagagccgacccagcctggaggcacaggtctctctgacagccgcactctcagctccagctccatggacctctcccgacgaagctccctggtgggctaatgctgaaggggcagccagtcaccagagcgcccacctggcacacccccctcaccccagccctgcgcatgggcctgctgcttgtcccgcctgtctctcccacagcccctgtcttttctgttcaatctcagggtaaccttctcccttgtcatctcagcctgagccctggaggctgggcctgcccactccagctccatcccttatttattccttccagcagggccctcttccctaggttcgggccagcaggaggtgccggctggagtctccaccatagactcagtggcctggcctccccagaccccagagccaagaacactaagcactcgccggcccttcggcaccctcgccctccctcccgactcaacccggccgttgcttctgtatatagagaaataagttattggccgcgcgcctcccttcagtccacggtactacccgggcctcccctcgtccctcttctagtggtaccgcccaggccttaatcacccccattccgtgcggtggtatctcccaggctctacattctcgggagcggcgcctcccaagggggtcctgggaccttctcgcgctcctcctggcctctgagggatgcgtcctacccgcgccatcgccccgtggcccaggacggggacctccccttagtccgtcctcccaccgccgggccctgccccgcatcccggccttatgcactgcccctcccacccggccccgcccaggcacggccgaccccgccccgggcaccgcccaccgagccatcctgcctcgcctccccccacgcctgcagcttctcgcgaggggcggcgacggtcccctggtggcaggaggggctccccctgttgcgggtgaggcggctgctctctattttcagatgttgctgtagaaataaagacggtttaaatctgaaaaaaaaaa

SEQ ID NO: 282106 - DNA, 471 bp, Homo sapiens
cagcgcagtgagcaggccgtggcccagctcgaggaggagaagcagcacttgctgttcatgagccagatccgcaagttggatgaagacgcctcccctaacgtgagctcctaccatggtcactgttgcccagcaaggaggcctgggagcagggaggggcagcatggagcagattcggctccaccccagcccatggacaccccggctgccctgtgcctccttccctgatgctcatcctgtcttccttcccaggaggagaagggggacgtccccaaagacacactggatgacctgttccccaatgaggatgagcagagcccaggtgcggatgggcagttctggagtgggggaaggaaaggttgtgtgaactcttggtccttgggaccgagtggctgccatgttccttcctgcctcacttctgatcatgacatcctagtgtgttagagcttcaagaacagttgtacgtgctgctgc

SEQ ID NO: 282107 - DNA, 7023 bp, Homo sapiens
gaagagagagtgttggccatatcaatctgcacattatattaaattacttttcccaaagtttggaagcatttcctgaaggctgtcaagggtattagtttttttctctctttaaatcacaaagcaaaattccactgtctctccccaaccccttctaaaaaaaaaaagttgtcgagttttgcttttctattcactgcaatcctggccaaagtaaagccctctttctcaatgacgtcaagatctttaccaagattaggctttcacttctctattgcagcaattagccagggaatgtataaaaggcgtcagggagactcactgggctgcagagagaggcactttgcaccacagacagatagcaagaagggaaagacagagagtgagaaaaaagaggagtcagtcgctcctggggaagggagagagtgagactgggagaaagagaagcacagaaagtgtgtgtaaaacggagtaaagaaagaaaaaaaaaaaactacccttaaagcacatttaaaaaaaaaaaactctggcaattcaagaaagaaacaggctacgtttaaagagcatagagacaatgaaaggctaaagaaaattttaaaatctctgccacagtctcataggtgcttggaaatgaaagtagaactgcctgtctttaacggactctgacagaggtaactggattagggacgagtacgccagctttttttttttttttttttttttttttaacatcttaaatcctgaaaaaaaaaaaaaaaaaaaaaaaaaggcagcagctccgaattgaatgaattgatgggcacactccaactgctgggctggagagactggacttagtcttgccatttctgcttctttgaaagaggagacaacttgggcttccttttaatttagttttttttccccttctcccccaacccccaaccttcccccttacctcccccaccccctttatcaccaccccccttttaaataagagggtgaaggggaaccagagcgcacaagggaactgactcaggaggcagagaagatgggcatcctcagcgtagacttgctgatcacactgcaaattctgccagtttttttctccaactgcctcttcctggctctctatgactcggtcattctgctcaagcacgtggtgctgctgttgagccgctccaagtccactcgcggagagtggcggcgcatgctgacctcagagggactgcgctgcgtctggaagagcttcctcctcgatgcctacaaacaggtgaaattgggtgaggatgcccccaattccagtgtggtgcatgtctccagtacagaaggaggtgacaacagtggcaatggtacccaggagaagatagctgagggagccacatgccaccttcttgactttgccagccctgagcgcccactagtggtcaactttggctcagccacttgacctcctttcacgagccagctgccagccttccgcaaactggtggaagagttctcctcagtggctgacttcctgctggtctacattgatgaggctcatccatcagatggctgggcgataccgggggactcctctttgtcttttgaggtgaagaagcaccagaaccaggaagatcgatgtgcagcagcccagcagcttctggagcgtttctccttgccgccccagtgccgagttgtggctgaccgcatggacaataacgccaacatagcttacggggtagcctttgaacgtgtgtgcattgtgcagagacagaaaattgcttatctgggaggaaagggccccttctcctacaaccttcaagaagtccggcattggctggagaagaatttcagcaagagatgaaagaaaactagattagctggttaaaggtatgattataagagagcttattgttttaaaaagttatataaaggcaaggaaattaagaactgaatccatatttcaacagagccctattggcttactgaaagacaggagtttatctatcggaagaacatgaatctctaacagctccatacttctttcactactcaaatggcattgggctgagtaagtaaccatatcacctctcttcttagtaaaaagccctatgtgaaaagatcccaagatggagaggaagaaacgctaattcagcatgtgttcattctgcattgagaaggaactgatacatctgatgcatgctttgagaccagaagaaaagacttacctgaataattactacattagggaagctactgtctacgttaagataaagggtattgccttggctctatttggcatggatggagcccagttggaaaattcccaaatattacaacaagtccttgaacccaggccatgtggttagacgttggtgttaaggttagaccttatgttagagtcatttctgatgttccagcttctagccatgtagtgctctcagtcttcataccccagaaattattggtatatttgtagataccgagaatgatccctcagtctgagaggttagaatgatcatctgtaatctgagggttaatttctaggcaggtggagagagtggtaaaaaagaaatgaaattgacaagctaggaaagaggaggcagaaagatttggaaaattcacagagtttcacccttaagctgtagagagtgggtcacatttgttagccacggaaacatagaaacatacacaaggccagaaaaagaagaaggagctcaactaaaagtggcatagagaatacacatataaaaacaatatatttgtcatatgctcctagagaggagaaaggggtgattgaaagaaaaaaaaatacttaaatatttgtaattgtgaggggtttcttttggaaataattacttttgaaccatgtatgtggtatgtatattttcagtgggttaattataccccatgatacctattaaaggaaaaccagtgggtctggtggtgctggtcttttcctccccattcctacaatttctatgtggcccaagtcattcctaatcttggtctctatagcagtgttctctctgaatgctgagctgaagaaattatacgtacatacacacatacatacatacatacaaatatatgtatatatattctcagctgctgcgggaggtaggtaccatggccattcagcacagccttgatttcctcccaaagtaggtgagctatagtgaagaataggtgcaaacaaacaagcttacttccattgcaaaatagaagaagaggaagttagagataattctgatcaatcattttggaggctttgttataaggcaacccccggtatatcatggaatttccattgacatttgaatttggacttggatcttcccttggtcccattagctgaggtttagtaatctaaagtccctatagtatatgattataatgctattttaaaaaatatatatataaaatatttttttctttttaaaatagacactatagttttacccataagtaatatttaaagattatagctcccaaaagaatggaccaaccactttcgtatcataatttctttttggtaaatatgagactattatgaaatcatagtatatgattgtatttaaaggtacaatcaaaggatcttttgtccattccattaataactgaataaaaaataaataaaatggatagaaaaaaactaaagttgaaaatacattcttaaactagttgtctgaaatgagaaaagagtgagaactaggtgtgcaagaaccaaacgtattttattttattttttaaatgggagcaacatatcagtcgtgtcaccagctggtatattgtgtaaatattaaagctccattgggactgatttttcatggcaacatcagctttctaatgttctaaattctataaaaaccacccacaaagaaacaaagcaaatttcattatctaatgagttgctggaaaatcatattgagaataattatttcagattcctcagttgttaacttctacattcaagggcttatctctgcccccattgatttttaacctcaaaatggtgtgagatttactgtggaaccctaaagcagtaaaataaaaaacctggttgcagcacattcacactgttgtccttaaaattccccttttttctctatgtacgataaagtaacagtatgtcagataagccggtggggggatgagattaggctgaggcagtgctagtcaactggggaaaaggatgatggaaaaatcacccagttgtgctatatttttaaagaaggaggtcgtttatgtgtgcagacaattctccctgaggttagcccaatggagaaatgaagcagaggaaggaaacatagaaagacatgggctatcagggaggaagatgttcaatagaacatgcaagaatttctggaagaaaggctgtggaagggccaatggagaaaatgaatggacaaagctcaggaatcctacgctatgtagaatgtcttggtgttatcagggttaagcctgtaattatgtaacctatttatcgcaacatgaatttttatgatttcttgtgatgtattcttttatgaaattaacaagaactcattattttgaggtagaggaaaatcaatgctttatctgatatgctgagaaattattagattgccaatactcatgtgcgtttcatgtgttttataaggtttgttcctttgaagaattgtagttcttagtcccacagggaaatgtgtatctatttatatatcatagtataaatctatgatatatttatatcatatataaaagtctgagttctctttcttagtccctaatcatgtttctcccataggctgtgtttacatggagctatcggtttagccttttaagcttcattagcttgtctattattgaaatagtttccaagaaattttagatattatcataacatctgggtctactcaaacacttattgtttgaaagacttatgtcttggacctatcaaaaactgactttatttattgcttagtgaaaatactagtgggatcaacaatgattttcttgaatgggcatgaatggagatgcccgcacagtaatgtagaaatgtttcatacagctattaaaatgtaactgacctccttagaggcagattagtaactgttcctactttgtatagctaagtgacagtcacttaacttacatgactttcttttttcacattgggtctctggtcctgtgtcttcacctcatttatagcacgtctccttgatttttggtagtatcaacttcccagtgatctgttcagttaagttcttctcccgttaaccaggaagtgcttattctctcatcacagtgggaagaatagcctattgtctttcattttgcctgagtgtattttactatttgggctctgaaataaaaattatgaaatatggtgaggtcacatgttggtgctgccttgctgcataaaattctaggagggcaggttaggagacagttatgtatggcctttcgggaaaattcaaaggtggattacaaggtgtcctcagcatgccctatggcctatgtgcgaagcaagaagaattgactgatttacaggacttctctttatgtcaatcttaagaggatggatgaatctggacatttgttccacccgacctctgactgatggtttggaaaataactttaattaggatcatatgaccattgaaaaaggaaaaatgtagactctgacttccgtcccactgaaggattaatgaaaacctttactagcatttagagcttttcagaacatccccactgtcatgtgtctcagcagtggagactgcaagtaaggcttttaattttaggaggtttttttttttttttttttttccctaaatggtatggccaaaagtcagagttaaaatatatatagttagattccaacttcctccttcactctaaaaatagaatccaaacccactcttcatatatgcttccagaatggggcttaagtaccaatctctgctttgcaatgggcacaatcttggtcatgtcctgaggctctctaagaaaagagaggatctaggatgggagagctagaaagttgctaactgggaagaacaaggccctgagggcttggtctaccaatctgggaagatttgaaaacaaacttctcgcaactgaaggaaggctgaaggctgctgcaagtcattgagtgactttaggatgagcaaaacattgggccacttcctaatgccctatgtgtatagtaccagaagcaaggtctcagacttaacagacccagctctgttccaaggtgagtctgaaccaatagaaagcaaacatgtgcagatatccaaacaagactgctcatgcaagtcggggctggctacccgtcttaggcagcaacagcagagctccagggagcttattcaatatttactgagacttcgaagacccagcagatgtttaatgaagtcactattttggctcaaaccctccacttctccccctcccctcaaaaagccaacaggtaaacacataaatgaaagaaacccacagaaggggatgggaaataaagaaaattctctcaagacttctccaggcccatgtcactggtcagcgtggtttttatgtgtattaggattgggggatgtgaagaaataagtatccagtactttataaccaaagcaattaaatgatattgggtagggaatgttggccagttttgtttagttttgcatcacattgtcaccagactcactagcccaagtaatcgggcgcccgaagagggagacagagatgtgcagagttgaccagtgtgcggatgataactactgacgaaagagtcatcgactcagttagtggttggatgtagtcacattagtttgcctctccccatctttgtctccctggcaaggagaatatgcgggacatgatgctaagagtcctgggtaaatgtggtgagaatgcacgcgtgcatatgctacacatatgtgcttctcagttgcagaaaatgaactgctttgggagattatcagtagaaagagtgttatcatattggtgctgagtgctatgtgtgcttatacaatttgttcttgtattttaataaactttgaataaaagaataaagctacaaaaaaa

SEQ ID NO: 282108 - DNA, 6717 bp, Homo sapiens
gaagagagagtgttggccatatcaatctgcacattatattaaattacttttcccaaagtttggaagcatttcctgaaggctgtcaagggtattagtttttttctctctttaaatcacaaagcaaaattccactgtctctccccaaccccttctaaaaaaaaaaagttgtcgagttttgcttttctattcactgcaatcctggccaaagtaaagccctctttctcaatgacgtcaagatctttaccaagattaggctttcacttctctattgcagcaattagccagggaatgtataaaaggcgtcagggagactcactgggctgcagagagaggcactttgcaccacagacagatagcaagaagggaaagacagagagtgagaaaaaagaggagtcagtcgctcctggggaagggagagagtgagactgggagaaagagaagcacagaaagtgtgtgtaaaacggagtaaagaaagaaaaaaaaaaaactacccttaaagcacatttaaaaaaaaaaaactctggcaattcaagaaagaaacaggctacgtttaaagagcatagagacaatgaaaggctaaagaaaattttaaaatctctgccacagtctcataggtgcttggaaatgaaagtagaactgcctgtctttaacggactctgacagagagggtgaaggggaaccagagcgcacaagggaactgactcaggaggcagagaagatgggcatcctcagcgtagacttgctgatcacactgcaaattctgccagtttttttctccaactgcctcttcctggctctctatgactcggtcattctgctcaagcacgtggtgctgctgttgagccgctccaagtccactcgcggagagtggcggcgcatgctgacctcagagggactgcgctgcgtctggaagagcttcctcctcgatgcctacaaacaggtgaaattgggtgaggatgcccccaattccagtgtggtgcatgtctccagtacagaaggaggtgacaacagtggcaatggtacccaggagaagatagctgagggagccacatgccaccttcttgactttgccagccctgagcgcccactagtggtcaactttggctcagccacttgacctcctttcacgagccagctgccagccttccgcaaactggtggaagagttctcctcagtggctgacttcctgctggtctacattgatgaggctcatccatcagatggctgggcgataccgggggactcctctttgtcttttgaggtgaagaagcaccagaaccaggaagatcgatgtgcagcagcccagcagcttctggagcgtttctccttgccgccccagtgccgagttgtggctgaccgcatggacaataacgccaacatagcttacggggtagcctttgaacgtgtgtgcattgtgcagagacagaaaattgcttatctgggaggaaagggccccttctcctacaaccttcaagaagtccggcattggctggagaagaatttcagcaagagatgaaagaaaactagattagctggttaaaggtatgattataagagagcttattgttttaaaaagttatataaaggcaaggaaattaagaactgaatccatatttcaacagagccctattggcttactgaaagacaggagtttatctatcggaagaacatgaatctctaacagctccatacttctttcactactcaaatggcattgggctgagtaagtaaccatatcacctctcttcttagtaaaaagccctatgtgaaaagatcccaagatggagaggaagaaacgctaattcagcatgtgttcattctgcattgagaaggaactgatacatctgatgcatgctttgagaccagaagaaaagacttacctgaataattactacattagggaagctactgtctacgttaagataaagggtattgccttggctctatttggcatggatggagcccagttggaaaattcccaaatattacaacaagtccttgaacccaggccatgtggttagacgttggtgttaaggttagaccttatgttagagtcatttctgatgttccagcttctagccatgtagtgctctcagtcttcataccccagaaattattggtatatttgtagataccgagaatgatccctcagtctgagaggttagaatgatcatctgtaatctgagggttaatttctaggcaggtggagagagtggtaaaaaagaaatgaaattgacaagctaggaaagaggaggcagaaagatttggaaaattcacagagtttcacccttaagctgtagagagtgggtcacatttgttagccacggaaacatagaaacatacacaaggccagaaaaagaagaaggagctcaactaaaagtggcatagagaatacacatataaaaacaatatatttgtcatatgctcctagagaggagaaaggggtgattgaaagaaaaaaaaatacttaaatatttgtaattgtgaggggtttcttttggaaataattacttttgaaccatgtatgtggtatgtatattttcagtgggttaattataccccatgatacctattaaaggaaaaccagtgggtctggtggtgctggtcttttcctccccattcctacaatttctatgtggcccaagtcattcctaatcttggtctctatagcagtgttctctctgaatgctgagctgaagaaattatacgtacatacacacatacatacatacatacaaatatatgtatatatattctcagctgctgcgggaggtaggtaccatggccattcagcacagccttgatttcctcccaaagtaggtgagctatagtgaagaataggtgcaaacaaacaagcttacttccattgcaaaatagaagaagaggaagttagagataattctgatcaatcattttggaggctttgttataaggcaacccccggtatatcatggaatttccattgacatttgaatttggacttggatcttcccttggtcccattagctgaggtttagtaatctaaagtccctatagtatatgattataatgctattttaaaaaatatatatataaaatatttttttctttttaaaatagacactatagttttacccataagtaatatttaaagattatagctcccaaaagaatggaccaaccactttcgtatcataatttctttttggtaaatatgagactattatgaaatcatagtatatgattgtatttaaaggtacaatcaaaggatcttttgtccattccattaataactgaataaaaaataaataaaatggatagaaaaaaactaaagttgaaaatacattcttaaactagttgtctgaaatgagaaaagagtgagaactaggtgtgcaagaaccaaacgtattttattttattttttaaatgggagcaacatatcagtcgtgtcaccagctggtatattgtgtaaatattaaagctccattgggactgatttttcatggcaacatcagctttctaatgttctaaattctataaaaaccacccacaaagaaacaaagcaaatttcattatctaatgagttgctggaaaatcatattgagaataattatttcagattcctcagttgttaacttctacattcaagggcttatctctgcccccattgatttttaacctcaaaatggtgtgagatttactgtggaaccctaaagcagtaaaataaaaaacctggttgcagcacattcacactgttgtccttaaaattccccttttttctctatgtacgataaagtaacagtatgtcagataagccggtggggggatgagattaggctgaggcagtgctagtcaactggggaaaaggatgatggaaaaatcacccagttgtgctatatttttaaagaaggaggtcgtttatgtgtgcagacaattctccctgaggttagcccaatggagaaatgaagcagaggaaggaaacatagaaagacatgggctatcagggaggaagatgttcaatagaacatgcaagaatttctggaagaaaggctgtggaagggccaatggagaaaatgaatggacaaagctcaggaatcctacgctatgtagaatgtcttggtgttatcagggttaagcctgtaattatgtaacctatttatcgcaacatgaatttttatgatttcttgtgatgtattcttttatgaaattaacaagaactcattattttgaggtagaggaaaatcaatgctttatctgatatgctgagaaattattagattgccaatactcatgtgcgtttcatgtgttttataaggtttgttcctttgaagaattgtagttcttagtcccacagggaaatgtgtatctatttatatatcatagtataaatctatgatatatttatatcatatataaaagtctgagttctctttcttagtccctaatcatgtttctcccataggctgtgtttacatggagctatcggtttagccttttaagcttcattagcttgtctattattgaaatagtttccaagaaattttagatattatcataacatctgggtctactcaaacacttattgtttgaaagacttatgtcttggacctatcaaaaactgactttatttattgcttagtgaaaatactagtgggatcaacaatgattttcttgaatgggcatgaatggagatgcccgcacagtaatgtagaaatgtttcatacagctattaaaatgtaactgacctccttagaggcagattagtaactgttcctactttgtatagctaagtgacagtcacttaacttacatgactttcttttttcacattgggtctctggtcctgtgtcttcacctcatttatagcacgtctccttgatttttggtagtatcaacttcccagtgatctgttcagttaagttcttctcccgttaaccaggaagtgcttattctctcatcacagtgggaagaatagcctattgtctttcattttgcctgagtgtattttactatttgggctctgaaataaaaattatgaaatatggtgaggtcacatgttggtgctgccttgctgcataaaattctaggagggcaggttaggagacagttatgtatggcctttcgggaaaattcaaaggtggattacaaggtgtcctcagcatgccctatggcctatgtgcgaagcaagaagaattgactgatttacaggacttctctttatgtcaatcttaagaggatggatgaatctggacatttgttccacccgacctctgactgatggtttggaaaataactttaattaggatcatatgaccattgaaaaaggaaaaatgtagactctgacttccgtcccactgaaggattaatgaaaacctttactagcatttagagcttttcagaacatccccactgtcatgtgtctcagcagtggagactgcaagtaaggcttttaattttaggaggtttttttttttttttttttttccctaaatggtatggccaaaagtcagagttaaaatatatatagttagattccaacttcctccttcactctaaaaatagaatccaaacccactcttcatatatgcttccagaatggggcttaagtaccaatctctgctttgcaatgggcacaatcttggtcatgtcctgaggctctctaagaaaagagaggatctaggatgggagagctagaaagttgctaactgggaagaacaaggccctgagggcttggtctaccaatctgggaagatttgaaaacaaacttctcgcaactgaaggaaggctgaaggctgctgcaagtcattgagtgactttaggatgagcaaaacattgggccacttcctaatgccctatgtgtatagtaccagaagcaaggtctcagacttaacagacccagctctgttccaaggtgagtctgaaccaatagaaagcaaacatgtgcagatatccaaacaagactgctcatgcaagtcggggctggctacccgtcttaggcagcaacagcagagctccagggagcttattcaatatttactgagacttcgaagacccagcagatgtttaatgaagtcactattttggctcaaaccctccacttctccccctcccctcaaaaagccaacaggtaaacacataaatgaaagaaacccacagaaggggatgggaaataaagaaaattctctcaagacttctccaggcccatgtcactggtcagcgtggtttttatgtgtattaggattgggggatgtgaagaaataagtatccagtactttataaccaaagcaattaaatgatattgggtagggaatgttggccagttttgtttagttttgcatcacattgtcaccagactcactagcccaagtaatcgggcgcccgaagagggagacagagatgtgcagagttgaccagtgtgcggatgataactactgacgaaagagtcatcgactcagttagtggttggatgtagtcacattagtttgcctctccccatctttgtctccctggcaaggagaatatgcgggacatgatgctaagagtcctgggtaaatgtggtgagaatgcacgcgtgcatatgctacacatatgtgcttctcagttgcagaaaatgaactgctttgggagattatcagtagaaagagtgttatcatattggtgctgagtgctatgtgtgcttatacaatttgttcttgtattttaataaactttgaataaaagaataaagctacaaaaaaa

SEQ ID NO: 282109 - DNA, 7131 bp, Homo sapiens
gaagagagagtgttggccatatcaatctgcacattatattaaattacttttcccaaagtttggaagcatttcctgaaggctgtcaagggtattagtttttttctctctttaaatcacaaagcaaaattccactgtctctccccaaccccttctaaaaaaaaaaagttgtcgagttttgcttttctattcactgcaatcctggccaaagtaaagccctctttctcaatgacgtcaagatctttaccaagattaggctttcacttctctattgcagcaattagccagggaatgtataaaaggcgtcagggagactcactgggctgcagagagaggcactttgcaccacagacagatagcaagaagggaaagacagagagtgagaaaaaagaggagtcagtcgctcctggggaagggagagagtgagactgggagaaagagaagcacagaaagtgtgtgtaaaacggagtaaagaaagaaaaaaaaaaaactacccttaaagcacatttaaaaaaaaaaaactctggcaattcaagaaagaaacaggctacgtttaaagagcatagagacaatgaaaggctaaagaaaattttaaaatctctgccacagtctcataggtgcttggaaatgaaagtagaactgcctgtctttaacggactctgacagaggtaactggattagggacgagtacgccagctttttttttttttttttttttttttttaacatcttaaatcctgaaaaaaaaaaaaaaaaaaaaaaaaaggcagcagctccgaattgaatgaattgatgggcacactccaactgctgggctggagagactggacttagtcttgccatttctgcttctttgaaagaggagacaacttgggcttccttttaatttagttttttttccccttctcccccaacccccaaccttcccccttacctcccccaccccctttatcaccaccccccttttaaataagagggtgaaggggaaccagagcgcacaagggaactgactcaggaggcagagaagatgggcatcctcagcgtagacttgctgatcacactgcaaattctgccagtttttttctccaactgcctcttcctggctctctatgactcggtcattctgctcaagcacgtggtgctgctgttgagccgctccaagtccactcgcggagagtggcggcgcatgctgacctcagagggactgcgctgcgtctggaagagcttcctcctcgatgcctacaaacagctaaattgtcctccatcaggttttagcaaagatggacacattttatgactagtatatgaagcttataaaagcagactactggtctactcacatttggatttatggatggtgaaattgggtgaggatgcccccaattccagtgtggtgcatgtctccagtacagaaggaggtgacaacagtggcaatggtacccaggagaagatagctgagggagccacatgccaccttcttgactttgccagccctgagcgcccactagtggtcaactttggctcagccacttgacctcctttcacgagccagctgccagccttccgcaaactggtggaagagttctcctcagtggctgacttcctgctggtctacattgatgaggctcatccatcagatggctgggcgataccgggggactcctctttgtcttttgaggtgaagaagcaccagaaccaggaagatcgatgtgcagcagcccagcagcttctggagcgtttctccttgccgccccagtgccgagttgtggctgaccgcatggacaataacgccaacatagcttacggggtagcctttgaacgtgtgtgcattgtgcagagacagaaaattgcttatctgggaggaaagggccccttctcctacaaccttcaagaagtccggcattggctggagaagaatttcagcaagagatgaaagaaaactagattagctggttaaaggtatgattataagagagcttattgttttaaaaagttatataaaggcaaggaaattaagaactgaatccatatttcaacagagccctattggcttactgaaagacaggagtttatctatcggaagaacatgaatctctaacagctccatacttctttcactactcaaatggcattgggctgagtaagtaaccatatcacctctcttcttagtaaaaagccctatgtgaaaagatcccaagatggagaggaagaaacgctaattcagcatgtgttcattctgcattgagaaggaactgatacatctgatgcatgctttgagaccagaagaaaagacttacctgaataattactacattagggaagctactgtctacgttaagataaagggtattgccttggctctatttggcatggatggagcccagttggaaaattcccaaatattacaacaagtccttgaacccaggccatgtggttagacgttggtgttaaggttagaccttatgttagagtcatttctgatgttccagcttctagccatgtagtgctctcagtcttcataccccagaaattattggtatatttgtagataccgagaatgatccctcagtctgagaggttagaatgatcatctgtaatctgagggttaatttctaggcaggtggagagagtggtaaaaaagaaatgaaattgacaagctaggaaagaggaggcagaaagatttggaaaattcacagagtttcacccttaagctgtagagagtgggtcacatttgttagccacggaaacatagaaacatacacaaggccagaaaaagaagaaggagctcaactaaaagtggcatagagaatacacatataaaaacaatatatttgtcatatgctcctagagaggagaaaggggtgattgaaagaaaaaaaaatacttaaatatttgtaattgtgaggggtttcttttggaaataattacttttgaaccatgtatgtggtatgtatattttcagtgggttaattataccccatgatacctattaaaggaaaaccagtgggtctggtggtgctggtcttttcctccccattcctacaatttctatgtggcccaagtcattcctaatcttggtctctatagcagtgttctctctgaatgctgagctgaagaaattatacgtacatacacacatacatacatacatacaaatatatgtatatatattctcagctgctgcgggaggtaggtaccatggccattcagcacagccttgatttcctcccaaagtaggtgagctatagtgaagaataggtgcaaacaaacaagcttacttccattgcaaaatagaagaagaggaagttagagataattctgatcaatcattttggaggctttgttataaggcaacccccggtatatcatggaatttccattgacatttgaatttggacttggatcttcccttggtcccattagctgaggtttagtaatctaaagtccctatagtatatgattataatgctattttaaaaaatatatatataaaatatttttttctttttaaaatagacactatagttttacccataagtaatatttaaagattatagctcccaaaagaatggaccaaccactttcgtatcataatttctttttggtaaatatgagactattatgaaatcatagtatatgattgtatttaaaggtacaatcaaaggatcttttgtccattccattaataactgaataaaaaataaataaaatggatagaaaaaaactaaagttgaaaatacattcttaaactagttgtctgaaatgagaaaagagtgagaactaggtgtgcaagaaccaaacgtattttattttattttttaaatgggagcaacatatcagtcgtgtcaccagctggtatattgtgtaaatattaaagctccattgggactgatttttcatggcaacatcagctttctaatgttctaaattctataaaaaccacccacaaagaaacaaagcaaatttcattatctaatgagttgctggaaaatcatattgagaataattatttcagattcctcagttgttaacttctacattcaagggcttatctctgcccccattgatttttaacctcaaaatggtgtgagatttactgtggaaccctaaagcagtaaaataaaaaacctggttgcagcacattcacactgttgtccttaaaattccccttttttctctatgtacgataaagtaacagtatgtcagataagccggtggggggatgagattaggctgaggcagtgctagtcaactggggaaaaggatgatggaaaaatcacccagttgtgctatatttttaaagaaggaggtcgtttatgtgtgcagacaattctccctgaggttagcccaatggagaaatgaagcagaggaaggaaacatagaaagacatgggctatcagggaggaagatgttcaatagaacatgcaagaatttctggaagaaaggctgtggaagggccaatggagaaaatgaatggacaaagctcaggaatcctacgctatgtagaatgtcttggtgttatcagggttaagcctgtaattatgtaacctatttatcgcaacatgaatttttatgatttcttgtgatgtattcttttatgaaattaacaagaactcattattttgaggtagaggaaaatcaatgctttatctgatatgctgagaaattattagattgccaatactcatgtgcgtttcatgtgttttataaggtttgttcctttgaagaattgtagttcttagtcccacagggaaatgtgtatctatttatatatcatagtataaatctatgatatatttatatcatatataaaagtctgagttctctttcttagtccctaatcatgtttctcccataggctgtgtttacatggagctatcggtttagccttttaagcttcattagcttgtctattattgaaatagtttccaagaaattttagatattatcataacatctgggtctactcaaacacttattgtttgaaagacttatgtcttggacctatcaaaaactgactttatttattgcttagtgaaaatactagtgggatcaacaatgattttcttgaatgggcatgaatggagatgcccgcacagtaatgtagaaatgtttcatacagctattaaaatgtaactgacctccttagaggcagattagtaactgttcctactttgtatagctaagtgacagtcacttaacttacatgactttcttttttcacattgggtctctggtcctgtgtcttcacctcatttatagcacgtctccttgatttttggtagtatcaacttcccagtgatctgttcagttaagttcttctcccgttaaccaggaagtgcttattctctcatcacagtgggaagaatagcctattgtctttcattttgcctgagtgtattttactatttgggctctgaaataaaaattatgaaatatggtgaggtcacatgttggtgctgccttgctgcataaaattctaggagggcaggttaggagacagttatgtatggcctttcgggaaaattcaaaggtggattacaaggtgtcctcagcatgccctatggcctatgtgcgaagcaagaagaattgactgatttacaggacttctctttatgtcaatcttaagaggatggatgaatctggacatttgttccacccgacctctgactgatggtttggaaaataactttaattaggatcatatgaccattgaaaaaggaaaaatgtagactctgacttccgtcccactgaaggattaatgaaaacctttactagcatttagagcttttcagaacatccccactgtcatgtgtctcagcagtggagactgcaagtaaggcttttaattttaggaggtttttttttttttttttttttccctaaatggtatggccaaaagtcagagttaaaatatatatagttagattccaacttcctccttcactctaaaaatagaatccaaacccactcttcatatatgcttccagaatggggcttaagtaccaatctctgctttgcaatgggcacaatcttggtcatgtcctgaggctctctaagaaaagagaggatctaggatgggagagctagaaagttgctaactgggaagaacaaggccctgagggcttggtctaccaatctgggaagatttgaaaacaaacttctcgcaactgaaggaaggctgaaggctgctgcaagtcattgagtgactttaggatgagcaaaacattgggccacttcctaatgccctatgtgtatagtaccagaagcaaggtctcagacttaacagacccagctctgttccaaggtgagtctgaaccaatagaaagcaaacatgtgcagatatccaaacaagactgctcatgcaagtcggggctggctacccgtcttaggcagcaacagcagagctccagggagcttattcaatatttactgagacttcgaagacccagcagatgtttaatgaagtcactattttggctcaaaccctccacttctccccctcccctcaaaaagccaacaggtaaacacataaatgaaagaaacccacagaaggggatgggaaataaagaaaattctctcaagacttctccaggcccatgtcactggtcagcgtggtttttatgtgtattaggattgggggatgtgaagaaataagtatccagtactttataaccaaagcaattaaatgatattgggtagggaatgttggccagttttgtttagttttgcatcacattgtcaccagactcactagcccaagtaatcgggcgcccgaagagggagacagagatgtgcagagttgaccagtgtgcggatgataactactgacgaaagagtcatcgactcagttagtggttggatgtagtcacattagtttgcctctccccatctttgtctccctggcaaggagaatatgcgggacatgatgctaagagtcctgggtaaatgtggtgagaatgcacgcgtgcatatgctacacatatgtgcttctcagttgcagaaaatgaactgctttgggagattatcagtagaaagagtgttatcatattggtgctgagtgctatgtgtgcttatacaatttgttcttgtattttaataaactttgaataaaagaataaagctacaaaaaaa

SEQ ID NO: 282110 - DNA, 7265 bp, Homo sapiens
gaagagagagtgttggccatatcaatctgcacattatattaaattacttttcccaaagtttggaagcatttcctgaaggctgtcaagggtattagtttttttctctctttaaatcacaaagcaaaattccactgtctctccccaaccccttctaaaaaaaaaaagttgtcgagttttgcttttctattcactgcaatcctggccaaagtaaagccctctttctcaatgacgtcaagatctttaccaagattaggctttcacttctctattgcagcaattagccagggaatgtataaaaggcgtcagggagactcactgggctgcagagagaggcactttgcaccacagacagatagcaagaagggaaagacagagagtgagaaaaaagaggagtcagtcgctcctggggaagggagagagtgagactgggagaaagagaagcacagaaagtgtgtgtaaaacggagtaaagaaagaaaaaaaaaaaactacccttaaagcacatttaaaaaaaaaaaactctggcaattcaagaaagaaacaggctacgtttaaagagcatagagacaatgaaaggctaaagaaaattttaaaatctctgccacagtctcataggtgcttggaaatgaaagtagaactgcctgtctttaacggactctgacagaggtaactggattagggacgagtacgccagctttttttttttttttttttttttttttaacatcttaaatcctgaaaaaaaaaaaaaaaaaaaaaaaaaggcagcagctccgaattgaatgaattgatgggcacactccaactgctgggctggagagactggacttagtcttgccatttctgcttctttgaaagaggagacaacttgggcttccttttaatttagttttttttccccttctcccccaacccccaaccttcccccttacctcccccaccccctttatcaccaccccccttttaaataagagggtgaaggggaaccagagcgcacaagggaactgactcaggaggcagagaagatgggcatcctcagcgtagacttgctgatcacactgcaaattctgccagtttttttctccaactgcctcttcctggctctctatgactcggtcattctgctcaagcacgtggtgctgctgttgagccgctccaagtccactcgcggagagtggcggcgcatgctgacctcagagggactgcgctgcgtctggaagagcttcctcctcgatgcctacaaacagctaaattgtcctccatcaggttttagcaaagatggacacattttatgactagtatatgaagcttataaaagcagactactggtctactcacatttggatttatggatgactgacagtgttgtacttactctaaatttcccaaggcaaattagtctgtgttttggaaagaattctgcagctgaactatacattgtttctaagaaggagaaggtgccttaactttccaagaaaatttactgcaggtgaaattgggtgaggatgcccccaattccagtgtggtgcatgtctccagtacagaaggaggtgacaacagtggcaatggtacccaggagaagatagctgagggagccacatgccaccttcttgactttgccagccctgagcgcccactagtggtcaactttggctcagccacttgacctcctttcacgagccagctgccagccttccgcaaactggtggaagagttctcctcagtggctgacttcctgctggtctacattgatgaggctcatccatcagatggctgggcgataccgggggactcctctttgtcttttgaggtgaagaagcaccagaaccaggaagatcgatgtgcagcagcccagcagcttctggagcgtttctccttgccgccccagtgccgagttgtggctgaccgcatggacaataacgccaacatagcttacggggtagcctttgaacgtgtgtgcattgtgcagagacagaaaattgcttatctgggaggaaagggccccttctcctacaaccttcaagaagtccggcattggctggagaagaatttcagcaagagatgaaagaaaactagattagctggttaaaggtatgattataagagagcttattgttttaaaaagttatataaaggcaaggaaattaagaactgaatccatatttcaacagagccctattggcttactgaaagacaggagtttatctatcggaagaacatgaatctctaacagctccatacttctttcactactcaaatggcattgggctgagtaagtaaccatatcacctctcttcttagtaaaaagccctatgtgaaaagatcccaagatggagaggaagaaacgctaattcagcatgtgttcattctgcattgagaaggaactgatacatctgatgcatgctttgagaccagaagaaaagacttacctgaataattactacattagggaagctactgtctacgttaagataaagggtattgccttggctctatttggcatggatggagcccagttggaaaattcccaaatattacaacaagtccttgaacccaggccatgtggttagacgttggtgttaaggttagaccttatgttagagtcatttctgatgttccagcttctagccatgtagtgctctcagtcttcataccccagaaattattggtatatttgtagataccgagaatgatccctcagtctgagaggttagaatgatcatctgtaatctgagggttaatttctaggcaggtggagagagtggtaaaaaagaaatgaaattgacaagctaggaaagaggaggcagaaagatttggaaaattcacagagtttcacccttaagctgtagagagtgggtcacatttgttagccacggaaacatagaaacatacacaaggccagaaaaagaagaaggagctcaactaaaagtggcatagagaatacacatataaaaacaatatatttgtcatatgctcctagagaggagaaaggggtgattgaaagaaaaaaaaatacttaaatatttgtaattgtgaggggtttcttttggaaataattacttttgaaccatgtatgtggtatgtatattttcagtgggttaattataccccatgatacctattaaaggaaaaccagtgggtctggtggtgctggtcttttcctccccattcctacaatttctatgtggcccaagtcattcctaatcttggtctctatagcagtgttctctctgaatgctgagctgaagaaattatacgtacatacacacatacatacatacatacaaatatatgtatatatattctcagctgctgcgggaggtaggtaccatggccattcagcacagccttgatttcctcccaaagtaggtgagctatagtgaagaataggtgcaaacaaacaagcttacttccattgcaaaatagaagaagaggaagttagagataattctgatcaatcattttggaggctttgttataaggcaacccccggtatatcatggaatttccattgacatttgaatttggacttggatcttcccttggtcccattagctgaggtttagtaatctaaagtccctatagtatatgattataatgctattttaaaaaatatatatataaaatatttttttctttttaaaatagacactatagttttacccataagtaatatttaaagattatagctcccaaaagaatggaccaaccactttcgtatcataatttctttttggtaaatatgagactattatgaaatcatagtatatgattgtatttaaaggtacaatcaaaggatcttttgtccattccattaataactgaataaaaaataaataaaatggatagaaaaaaactaaagttgaaaatacattcttaaactagttgtctgaaatgagaaaagagtgagaactaggtgtgcaagaaccaaacgtattttattttattttttaaatgggagcaacatatcagtcgtgtcaccagctggtatattgtgtaaatattaaagctccattgggactgatttttcatggcaacatcagctttctaatgttctaaattctataaaaaccacccacaaagaaacaaagcaaatttcattatctaatgagttgctggaaaatcatattgagaataattatttcagattcctcagttgttaacttctacattcaagggcttatctctgcccccattgatttttaacctcaaaatggtgtgagatttactgtggaaccctaaagcagtaaaataaaaaacctggttgcagcacattcacactgttgtccttaaaattccccttttttctctatgtacgataaagtaacagtatgtcagataagccggtggggggatgagattaggctgaggcagtgctagtcaactggggaaaaggatgatggaaaaatcacccagttgtgctatatttttaaagaaggaggtcgtttatgtgtgcagacaattctccctgaggttagcccaatggagaaatgaagcagaggaaggaaacatagaaagacatgggctatcagggaggaagatgttcaatagaacatgcaagaatttctggaagaaaggctgtggaagggccaatggagaaaatgaatggacaaagctcaggaatcctacgctatgtagaatgtcttggtgttatcagggttaagcctgtaattatgtaacctatttatcgcaacatgaatttttatgatttcttgtgatgtattcttttatgaaattaacaagaactcattattttgaggtagaggaaaatcaatgctttatctgatatgctgagaaattattagattgccaatactcatgtgcgtttcatgtgttttataaggtttgttcctttgaagaattgtagttcttagtcccacagggaaatgtgtatctatttatatatcatagtataaatctatgatatatttatatcatatataaaagtctgagttctctttcttagtccctaatcatgtttctcccataggctgtgtttacatggagctatcggtttagccttttaagcttcattagcttgtctattattgaaatagtttccaagaaattttagatattatcataacatctgggtctactcaaacacttattgtttgaaagacttatgtcttggacctatcaaaaactgactttatttattgcttagtgaaaatactagtgggatcaacaatgattttcttgaatgggcatgaatggagatgcccgcacagtaatgtagaaatgtttcatacagctattaaaatgtaactgacctccttagaggcagattagtaactgttcctactttgtatagctaagtgacagtcacttaacttacatgactttcttttttcacattgggtctctggtcctgtgtcttcacctcatttatagcacgtctccttgatttttggtagtatcaacttcccagtgatctgttcagttaagttcttctcccgttaaccaggaagtgcttattctctcatcacagtgggaagaatagcctattgtctttcattttgcctgagtgtattttactatttgggctctgaaataaaaattatgaaatatggtgaggtcacatgttggtgctgccttgctgcataaaattctaggagggcaggttaggagacagttatgtatggcctttcgggaaaattcaaaggtggattacaaggtgtcctcagcatgccctatggcctatgtgcgaagcaagaagaattgactgatttacaggacttctctttatgtcaatcttaagaggatggatgaatctggacatttgttccacccgacctctgactgatggtttggaaaataactttaattaggatcatatgaccattgaaaaaggaaaaatgtagactctgacttccgtcccactgaaggattaatgaaaacctttactagcatttagagcttttcagaacatccccactgtcatgtgtctcagcagtggagactgcaagtaaggcttttaattttaggaggtttttttttttttttttttttccctaaatggtatggccaaaagtcagagttaaaatatatatagttagattccaacttcctccttcactctaaaaatagaatccaaacccactcttcatatatgcttccagaatggggcttaagtaccaatctctgctttgcaatgggcacaatcttggtcatgtcctgaggctctctaagaaaagagaggatctaggatgggagagctagaaagttgctaactgggaagaacaaggccctgagggcttggtctaccaatctgggaagatttgaaaacaaacttctcgcaactgaaggaaggctgaaggctgctgcaagtcattgagtgactttaggatgagcaaaacattgggccacttcctaatgccctatgtgtatagtaccagaagcaaggtctcagacttaacagacccagctctgttccaaggtgagtctgaaccaatagaaagcaaacatgtgcagatatccaaacaagactgctcatgcaagtcggggctggctacccgtcttaggcagcaacagcagagctccagggagcttattcaatatttactgagacttcgaagacccagcagatgtttaatgaagtcactattttggctcaaaccctccacttctccccctcccctcaaaaagccaacaggtaaacacataaatgaaagaaacccacagaaggggatgggaaataaagaaaattctctcaagacttctccaggcccatgtcactggtcagcgtggtttttatgtgtattaggattgggggatgtgaagaaataagtatccagtactttataaccaaagcaattaaatgatattgggtagggaatgttggccagttttgtttagttttgcatcacattgtcaccagactcactagcccaagtaatcgggcgcccgaagagggagacagagatgtgcagagttgaccagtgtgcggatgataactactgacgaaagagtcatcgactcagttagtggttggatgtagtcacattagtttgcctctccccatctttgtctccctggcaaggagaatatgcgggacatgatgctaagagtcctgggtaaatgtggtgagaatgcacgcgtgcatatgctacacatatgtgcttctcagttgcagaaaatgaactgctttgggagattatcagtagaaagagtgttatcatattggtgctgagtgctatgtgtgcttatacaatttgttcttgtattttaataaactttgaataaaagaataaagctacaaaaaaa

SEQ ID NO: 282111 - DNA, 6858 bp, Homo sapiens
gaagagagagtgttggccatatcaatctgcacattatattaaattacttttcccaaagtttggaagcatttcctgaaggctgtcaagggtattagtttttttctctctttaaatcacaaagcaaaattccactgtctctccccaaccccttctaaaaaaaaaaagttgtcgagttttgcttttctattcactgcaatcctggccaaagtaaagccctctttctcaatgacgtcaagatctttaccaagattaggctttcacttctctattgcagcaattagccagggaatgtataaaaggcgtcagggagactcactgggctgcagagagaggcactttgcaccacagacagatagcaagaagggaaagacagagagtgagaaaaaagaggagtcagtcgctcctggggaagggagagagtgagactgggagaaagagaagcacagaaagtgtgtgtaaaacggagtaaagaaagaaaaaaaaaaaactacccttaaagcacatttaaaaaaaaaaaactctggcaattcaagaaagaaacaggctacgtttaaagagcatagagacaatgaaaggctaaagaaaattttaaaatctctgccacagtctcataggtgcttggaaatgaaagtagaactgcctgtctttaacggactctgacagaggtaactggattagggacgagtacgccagctttttttttttttttttttttttttttaacatcttaaatcctgaaaaaaaaaaaaaaaaaaaaaaaaaggcagcagctccgaattgaatgaattgatgggcacactccaactgctgggctggagagactggacttagtcttgccatttctgcttctttgaaagaggagacaacttgggcttccttttaatttagttttttttccccttctcccccaacccccaaccttcccccttacctcccccaccccctttatcaccaccccccttttaaataagagggtgaaggggaaccagagcgcacaagggaactgactcaggaggcagagaagatgggcatcctcagcgtagacttgctgatcacactgcaaattctgccagtttttttctccaactgcctcttcctggctctctatgactcggtcattctgctcaagcacgtggtgctgctgttgagccgctccaagtccactcgcggagagtggcggcgcatgctgacctcagagggactgcgctgcgtctggaagagcttcctcctcgatgcctacaaacaggtgaaattgggtgaggatgcccccaattccagtgtggtgcatgtctccagtacagaaggaggtgacaacagtggcaatggtacccaggagaagatagctgagggagccacatgccaccttcttgactttgccagccctgagcgcccactagtggtcaactttggctcagccacttgacctcctttcacgagccagctgccagccttccgcaaactggtggaagagttctcctcagtggctgacttcctgctggtctacattgatgaggctcatccatcagatggctgggcgataccgggggactcctctttgtcttttgaggtgaagaagcaccagaaccaggaagatcgatgtgcagcagcccagcagcttctggagcgtttctccttgccgccccagtgccgagttgtggctgaccgcatggacaataacgccaacatagcttacggggtagcctttgaacgtgtgtgcattgtgcagagacagaaaattgcttatctgggaggaaagggccccttctcctacaaccttcaagaagtccggcattggctggagaagaatttcagcaagagatgaaagaaaactagattagctggttaaaggtatgattataagagagcttattgttttaaaaagttatataaaggcaaggaaattaagaactgaatccatatttcaacagagccctattggcttactgaaagacaggagtttatctatcggaagaacatgaatctctaacagctccatacttctttcactactcaaatggcattgggctgagtaagtaaccatatcacctctcttcttagtaaaaagccctatgtgaaaagatcccaagatggagaggaagaaacgctaattcagcatgtgttcattctgcattgagaaggaactgatacatctgatgcatgctttgagaccagaagaaaagacttacctgaataattactacattagggaagctactgtctacgttaagataaagggtattgccttggctctatttggcatggatggagcccagttggaaaattcccaaatattacaacaagtccttgaacccaggccatgtggttagacgttggtgttaaggttagaccttatgttagagtcatttctgatgttccagcttctagccatgtagtgctctcagtcttcataccccagaaattattggtatatttgtagataccgagaatgatccctcagtctgagaggttagaatgatcatctgtaatctgagggttaatttctaggcaggtggagagagtggtaaaaaagaaatgaaattgacaagctaggaaagaggaggcagaaagatttggaaaattcacagagtttcacccttaagctgtagagagtgggtcacatttgttagccacggaaacatagaaacatacacaaggccagaaaaagaagaaggagctcaactaaaagtggcatagagaatacacatataaaaacaatatatttgtcatatgctcctagagaggagaaaggggtgattgaaagaaaaaaaaatacttaaatatttgtaattgtgaggggtttcttttggaaataattacttttgaaccatgtatgtggtatgtatattttcagtgggttaattataccccatgatacctattaaaggaaaaccagtgggtctggtggtgctggtcttttcctccccattcctacaatttctatgtggcccaagtcattcctaatcttggtctctatagcagtgttctctctgaatgctgagctgaagaaattatacgtacatacacacatacatacatacatacaaatatatgtatatatattctcagctgctgcgggaggtaggtaccatggccattcagcacagccttgatttcctcccaaagtaggtgagctatagtgaagaataggtgcaaacaaacaagcttacttccattgcaaaatagaagaagaggaagttagagataattctgatcaatcattttggaggctttgttataaggcaacccccggtatatcatggaatttccattgacatttgaatttggacttggatcttcccttggtcccattagctgaggtttagtaatctaaagtccctatagtatatgattataatgctattttaaaaaatatatatataaaatatttttttctttttaaaatagacactatagttttacccataagtaatatttaaagattatagctcccaaaagaatggaccaaccactttcgtatcataatttctttttggtaaatatgagactattatgaaatcatagtatatgattgtatttaaaggtacaatcaaaggatcttttgtccattccattaataactgaataaaaaataaataaaatggatagaaaaaaactaaagttgaaaatacattcttaaactagttgtctgaaatgagaaaagagtgagaactaggtgtgcaagaaccaaacgtattttattttattttttaaatgggagcaacatatcagtcgtgtcaccagctggtatattgtgtaaatattaaagctccattgggactgatttttcatggcaacatcagctttctaatgttctaaattctataaaaaccacccacaaagaaacaaagcaaatttcattatctaatgagttgctggaaaatcatattgagaataattatttcagattcctcagttgttaacttctacattcaagggcttatctctgcccccattgatttttaacctcaaaatggtgtgagatttactgtggaaccctaaagcagtaaaataaaaaacctggttgcagcacattcacactgttgtccttaaaattccccttttttctctatgtacgataaagtaacagtatgtcagataagccggtggggggatgagattaggctgaggcagtgctagtcaactggggaaaaggatgatggaaaaatcacccagttgtgctatatttttaaagaaggaggtcgtttatgtgtgcagacaattctccctgaggttagcccaatggagaaatgaagcagaggaaggaaacatagaaagacatgggctatcagggaggaagatgttcaatagaacatgcaagaatttctggaagaaaggctgtggaagggccaatggagaaaatgaatggacaaagctcaggaatcctacgctatgtagaatgtcttggtgttatcagggttaagcctgtaattatgtaacctatttatcgcaacatgaatttttatgatttcttgtgatgtattcttttatgaaattaacaagaactcattattttgaggtagaggaaaatcaatgctttatctgatatgctgagaaattattagattgccaatactcatgtgcgtttcatgtgttttataaggtttgttcctttgaagaattgtagttcttagtcccacagggaaatgtgtatctatttatatatcatagtataaatctatgatatatttatatcatatataaaagtctgagttctctttcttagtccctaatcatgtttctcccataggctgtgtttacatggagctatcggtttagccttttaagcttcattagcttgtctattattgaaatagtttccaagaaattttagatattatcataacatctgggtctactcaaacacttattgtttgaaagacttatgtcttggacctatcaaaaactgactttatttattgcttagtgaaaatactagtgggatcaacaatgattttcttgaatgggcatgaatggagatgcccgcacagtaatgtagaaatgtttcatacagctattaaaatgtaactgacctccttagaggcagattagtaactgttcctactttgtatagctaagtgacagtcacttaacttacatgactttcttttttcacattgggtctctggtcctgtgtcttcacctcatttatagcacgtctccttgatttttggtagtatcaacttcccagtgatctgttcagttaagttcttctcccgttaaccaggaagtgcttattctctcatcacagtgggaagaatagcctattgtctttcattttgcctgagtgtattttactatttgggctctgaaataaaaattatgaaatatggtgaggtcacatgttggtgctgccttgctgcataaaattctaggagggcaggttaggagacagttatgtatggcctttcgggaaaattcaaaggtggattacaaggtgtcctcagcatgccctatggcctatgtgcgaagcaagaagaattgactgatttacaggacttctctttatgtcaatcttaagaggatggatgaatctggacatttgttccacccgacctctgactgatggtttggaaaataactttaattaggatcatatgaccattgaaaaaggaaaaatgtagactctgacttccgtcccactgaaggattaatgaaaacctttactagcatttagagcttttcagaacatccccactgtcatgtgtctcagcagtggagactgcaagtaaggcttttaattttaggaggtttttttttttttttttttttccctaaatggtatggccaaaagtcagagttaaaatatatatagttagattccaacttcctccttcactctaaaaatagaatccaaacccactcttcatatatgcttccagaatggggcttaagtaccaatctctgctttgcaatgggcacaatcttggtcatgtcctgaggctctctaagaaaagagaggatctaggatgggagagctagaaagttgctaactgggaagaacaaggccctgagggcttggtctaccaatctgggaagatttgaaaacaaacttctcgcaactgaaggaaggctgaaggctgctgcaagtcattgagtgactttaggatgagcaaaacattgggccacttcctaatgccctatgtgtatagtaccagaagcaaggtctcagacttaacagacccagctctgttccaaggtgagtctgaaccaatagaaagcaaacatgtgcagatatccaaacaagactgctcatgcaagtcggggctggctacccgtcttaggcagcaacagcagagctccagggagcttattcaatatttactgagacttcgaagacccagcagatgtttaatgaagtcactattttggctcaaaccctccacttctccccctcccctcaaaaagccaacaggtaaacacataaatgaaagaaacccacagaaggggatgggaaataaagaaaattctctcaagacttctccaggcccatgtcactggtcagcgtggtttttatgtgtattaggattgggggatgtgaagaaataagtatccagtactttataaccaaagcaattaaatgatattgggtagggaatgttggccagttttgtttagttttgcatcacattgtcaccagactcactagcccaagtaatcgggcgcccgaagagggagacagagatgtgcagagttgaccagtgtgcggatgataactactgacgaaagagtcatcgactcagttagtggttggatgtagtcacattagtttgcctctccccatctttgtctcctggcaaagagccaccctaggagccacccgaagagccacgcaaagcgcaccccacgcagcgacacaac

SEQ ID NO: 282112 - DNA, 6896 bp, Homo sapiens
gaagagagagtgttggccatatcaatctgcacattatattaaattacttttcccaaagtttggaagcatttcctgaaggctgtcaagggtattagtttttttctctctttaaatcacaaagcaaaattccactgtctctccccaaccccttctaaaaaaaaaaagttgtcgagttttgcttttctattcactgcaatcctggccaaagtaaagccctctttctcaatgacgtcaagatctttaccaagattaggctttcacttctctattgcagcaattagccagggaatgtataaaaggcgtcagggagactcactgggctgcagagagaggcactttgcaccacagacagatagcaagaagggaaagacagagagtgagaaaaaagaggagtcagtcgctcctggggaagggagagagtgagactgggagaaagagaagcacagaaagtgtgtgtaaaacggagtaaagaaagaaaaaaaaaaaactacccttaaagcacatttaaaaaaaaaaaactctggcaattcaagaaagaaacaggctacgtttaaagagcatagagacaatgaaaggctaaagaaaattttaaaatctctgccacagtctcataggtgcttggaaatgaaagtagaactgcctgtctttaacggactctgacagaggtaactggattagggacgagtacgccagctttttttttttttttttttttttttttaacatcttaaatcctgaaaaaaaaaaaaaaaaaaaaaaaaaggcagcagctccgaattgaatgaattgatgggcacactccaactgctgggctggagagactggacttagtcttgccatttctgcttctttgaaagaggagacaacttgggcttccttttaatttagttttttttccccttctcccccaacccccaaccttcccccttacctcccccaccccctttatcaccaccccccttttaaataagagggtgaaggggaaccagagcgcacaagggaactgactcaggaggcagagaagatgggcatcctcagcgtagacttgctgatcacactgcaaattctgccagtttttttctccaactgcctcttcctggctctctatgactcggtcattctgctcaagcacgtggtgctgctgttgagccgctccaagtccactcgcggagagtggcggcgcatgctgacctcagagggactgcgctgcgtctggaagagcttcctcctcgatgcctacaaacaggtgaaattgggtgaggatgcccccaattccagtgtggtgcatgtctccagtacagaaggaggtgacaacagtggcaatggtacccaggagaagatagctgagggagccacatgccaccttcttgactttgccagccctgagcgcccactagtggtcaactttggctcagccacttgacctcctttcacgagccagctgccagccttccgcaaactggtggaagagttctcctcagtggctgacttcctgctggtctacattgatgaggctcatccatcagatggctgggcgataccgggggactcctctttgtcttttgaggtgaagaagcaccagaaccaggaagatcgatgtgcagcagcccagcagcttctggagcgtttctccttgccgccccagtgccgagttgtggctgaccgcatggacaataacgccaacatagcttacggggtagcctttgaacgtgtgtgcattgtgcagagacagaaaattgcttatctgggaggaaagggccccttctcctacaaccttcaagaagtccggcattggctggagaagaatttcagcaagagatgaaagaaaactagattagctggttaaaggtatgattataagagagcttattgttttaaaaagttatataaaggcaaggaaattaagaactgaatccatatttcaacagagccctattggcttactgaaagacaggagtttatctatcggaagaacatgaatctctaacagctccatacttctttcactactcaaatggcattgggctgagtaagtaaccatatcacctctcttcttagtaaaaagccctatgtgaaaagatcccaagatggagaggaagaaacgctaattcagcatgtgttcattctgcattgagaaggaactgatacatctgatgcatgctttgagaccagaagaaaagacttacctgaataattactacattagggaagctactgtctacgttaagataaagggtattgccttggctctatttggcatggatggagcccagttggaaaattcccaaatattacaacaagtccttgaacccaggccatgtggttagacgttggtgttaaggttagaccttatgttagagtcatttctgatgttccagcttctagccatgtagtgctctcagtcttcataccccagaaattattggtatatttgtagataccgagaatgatccctcagtctgagaggttagaatgatcatctgtaatctgagggttaatttctaggcaggtggagagagtggtaaaaaagaaatgaaattgacaagctaggaaagaggaggcagaaagatttggaaaattcacagagtttcacccttaagctgtagagagtgggtcacatttgttagccacggaaacatagaaacatacacaaggccagaaaaagaagaaggagctcaactaaaagtggcatagagaatacacatataaaaacaatatatttgtcatatgctcctagagaggagaaaggggtgattgaaagaaaaaaaaatacttaaatatttgtaattgtgaggggtttcttttggaaataattacttttgaaccatgtatgtggtatgtatattttcagtgggttaattataccccatgatacctattaaaggaaaaccagtgggtctggtggtgctggtcttttcctccccattcctacaatttctatgtggcccaagtcattcctaatcttggtctctatagcagtgttctctctgaatgctgagctgaagaaattatacgtacatacacacatacatacatacatacaaatatatgtatatatattctcagctgctgcgggaggtaggtaccatggccattcagcacagccttgatttcctcccaaagtaggtgagctatagtgaagaataggtgcaaacaaacaagcttacttccattgcaaaatagaagaagaggaagttagagataattctgatcaatcattttggaggctttgttataaggcaacccccggtatatcatggaatttccattgacatttgaatttggacttggatcttcccttggtcccattagctgaggtttagtaatctaaagtccctatagtatatgattataatgctattttaaaaaatatatatataaaatatttttttctttttaaaatagacactatagttttacccataagtaatatttaaagattatagctcccaaaagaatggaccaaccactttcgtatcataatttctttttggtaaatatgagactattatgaaatcatagtatatgattgtatttaaaggtacaatcaaaggatcttttgtccattccattaataactgaataaaaaataaataaaatggatagaaaaaaactaaagttgaaaatacattcttaaactagttgtctgaaatgagaaaagagtgagaactaggtgtgcaagaaccaaacgtattttattttattttttaaatgggagcaacatatcagtcgtgtcaccagctggtatattgtgtaaatattaaagctccattgggactgatttttcatggcaacatcagctttctaatgttctaaattctataaaaaccacccacaaagaaacaaagcaaatttcattatctaatgagttgctggaaaatcatattgagaataattatttcagattcctcagttgttaacttctacattcaagggcttatctctgcccccattgatttttaacctcaaaatggtgtgagatttactgtggaaccctaaagcagtaaaataaaaaacctggttgcagcacattcacactgttgtccttaaaattccccttttttctctatgtacgataaagtaacagtatgtcagataagccggtggggggatgagattaggctgaggcagtgctagtcaactggggaaaaggatgatggaaaaatcacccagttgtgctatatttttaaagaaggaggtcgtttatgtgtgcagacaattctccctgaggttagcccaatggagaaatgaagcagaggaaggaaacatagaaagacatgggctatcagggaggaagatgttcaatagaacatgcaagaatttctggaagaaaggctgtggaagggccaatggagaaaatgaatggacaaagctcaggaatcctacgctatgtagaatgtcttggtgttatcagggttaagcctgtaattatgtaacctatttatcgcaacatgaatttttatgatttcttgtgatgtattcttttatgaaattaacaagaactcattattttgaggtagaggaaaatcaatgctttatctgatatgctgagaaattattagattgccaatactcatgtgcgtttcatgtgttttataaggtttgttcctttgaagaattgtagttcttagtcccacagggaaatgtgtatctatttatatatcatagtataaatctatgatatatttatatcatatataaaagtctgagttctctttcttagtccctaatcatgtttctcccataggctgtgtttacatggagctatcggtttagccttttaagcttcattagcttgtctattattgaaatagtttccaagaaattttagatattatcataacatctgggtctactcaaacacttattgtttgaaagacttatgtcttggacctatcaaaaactgactttatttattgcttagtgaaaatactagtgggatcaacaatgattttcttgaatgggcatgaatggagatgcccgcacagtaatgtagaaatgtttcatacagctattaaaatgtaactgacctccttagaggcagattagtaactgttcctactttgtatagctaagtgacagtcacttaacttacatgactttcttttttcacattgggtctctggtcctgtgtcttcacctcatttatagcacgtctccttgatttttggtagtatcaacttcccagtgatctgttcagttaagttcttctcccgttaaccaggaagtgcttattctctcatcacagtgggaagaatagcctattgtctttcattttgcctgagtgtattttactatttgggctctgaaataaaaattatgaaatatggtgaggtcacatgttggtgctgccttgctgcataaaattctaggagggcaggttaggagacagttatgtatggcctttcgggaaaattcaaaggtggattacaaggtgtcctcagcatgccctatggcctatgtgcgaagcaagaagaattgactgatttacaggacttctctttatgtcaatcttaagaggatggatgaatctggacatttgttccacccgacctctgactgatggtttggaaaataactttaattaggatcatatgaccattgaaaaaggaaaaatgtagactctgacttccgtcccactgaaggattaatgaaaacctttactagcatttagagcttttcagaacatccccactgtcatgtgtctcagcagtggagactgcaagtaaggcttttaattttaggaggtttttttttttttttttttttccctaaatggtatggccaaaagtcagagttaaaatatatatagttagattccaacttcctccttcactctaaaaatagaatccaaacccactcttcatatatgcttccagaatggggcttaagtaccaatctctgctttgcaatgggcacaatcttggtcatgtcctgaggctctctaagaaaagagaggatctaggatgggagagctagaaagttgctaactgggaagaacaaggccctgagggcttggtctaccaatctgggaagatttgaaaacaaacttctcgcaactgaaggaaggctgaaggctgctgcaagtcattgagtgactttaggatgagcaaaacattgggccacttcctaatgccctatgtgtatagtaccagaagcaaggtctcagacttaacagacccagctctgttccaaggtgagtctgaaccaatagaaagcaaacatgtgcagatatccaaacaagactgctcatgcaagtcggggctggctacccgtcttaggcagcaacagcagagctccagggagcttattcaatatttactgagacttcgaagacccagcagatgtttaatgaagtcactattttggctcaaaccctccacttctccccctcccctcaaaaagccaacaggtaaacacataaatgaaagaaacccacagaaggggatgggaaataaagaaaattctctcaagacttctccaggcccatgtcactggtcagcgtggtttttatgtgtattaggattgggggatgtgaagaaataagtatccagtactttataaccaaagcaattaaatgatattgggtagggaatgttggccagttttgtttagttttgcatcacattgtcaccagactcactagcccaagtaatcgggcgccctggcaaggagaatatgcgggacatgatgctaagagtcctgggtaaatgtggtgagaatgcacgcgtgcatatgctacacatatgtgcttctcagttgcagaaaatgaactgctttgggagattatcagtagaaagagtgttatcatattggtgctgagtgctatgtgtgcttatacaatttgttcttgtattttaataaactttgaataaaagaataaagctacaaaaaaa

SEQ ID NO: 282113 - DNA, 1880 bp, Homo sapiens
gaagagagagtgttggccatatcaatctgcacattatattaaattacttttcccaaagtttggaagcatttcctgaaggctgtcaagggtattagtttttttctctctttaaatcacaaagcaaaattccactgtctctccccaaccccttctaaaaaaaaaaagttgtcgagttttgcttttctattcactgcaatcctggccaaagtaaagccctctttctcaatgacgtcaagatctttaccaagattaggctttcacttctctattgcagcaattagccagggaatgtataaaaggcgtcagggagactcactgggctgcagagagaggcactttgcaccacagacagatagcaagaagggaaagacagagagtgagaaaaaagaggagtcagtcgctcctggggaagggagagagtgagactgggagaaagagaagcacagaaagtgtgtgtaaaacggagtaaagaaagaaaaaaaaaaaactacccttaaagcacatttaaaaaaaaaaaactctggcaattcaagaaagaaacaggctacgtttaaagagcatagagacaatgaaaggctaaagaaaattttaaaatctctgccacagtctcataggtgcttggaaatgaaagtagaactgcctgtctttaacggactctgacagaggtaactggattagggacgagtacgccagctttttttttttttttttttttttttttaacatcttaaatcctgaaaaaaaaaaaaaaaaaaaaaaaaaggcagcagctccgaattgaatgaattgatgggcacactccaactgctgggctggagagactggacttagtcttgccatttctgcttctttgaaagaggagacaacttgggcttccttttaatttagttttttttccccttctcccccaacccccaaccttcccccttacctcccccaccccctttatcaccaccccccttttaaataagagggtgaaggggaaccagagcgcacaagggaactgactcaggaggcagagaagatgggcatcctcagcgtagacttgctgatcacactgcaaattctgccagtttttttctccaactgcctcttcctggctctctatgactcggtcattctgctcaagcacgtggtgctgctgttgagccgctccaagtccactcgcggagagtggcggcgcatgctgacctcagagggactgcgctgcgtctggaagagcttcctcctcgatgcctacaaacagctaaattgtcctccatcaggttttagcaaagatggacacattttatgactagtatatgaagcttataaaagcagactactggtctactcacatttggatttatggatgactgacagtgttgtacttactctaaatttcccaaggcaaattagtctgtgttttggaaagaattctgcagctgaactatacattgtttctaagaaggagaaggtgccttaactttccaagaaaatttactgcagggaataagagagtcccctgtgactaaagcaacagattagattattcagttgaataatcagacataatgaaaggatcaacaggtctgctcggatgaatcagggggttagaggcgcatttgtcaaggccacataattgttcatgggtttcaaaaatgattccaaaatgcagatgaatgtttttacctatcaagaacctacaagtgtacaggttgcttacttaacaggaagtccctacaacggactaatctgaatgcatttaggtcttcttatcacggtacgttgaggcacacagtacacatgatattgttaaaacaccccttctagaatcattactattatttcaaatgggaaagatctaaagagaagagactgctacccactacctagatcta

SEQ ID NO: 282114 - DNA, 326 bp, Homo sapiens
gagaagatgggcatcctcagcgtagacttgctgatcacactgcaaattctgccagtttttttctccaactgcctcttcctggctctctatgactcggtcattctgctcaagcacgtggtgctgctgttgagccgctccaagtccactcgcggagagtggcggcgcatgctgacctcagagggactgcgctgcgtctggaagagcttcctcctcgatgcctacaaacaggtgagctgagctgagaagggcttctccctaggtctacaggggcaggggctcatatgctggggaccagaggccattgggagcattggggggagagctgt

SEQ ID NO: 282115 - DNA, 2010 bp, Homo sapiens
aagagacaaaagactgcactatagagaaggcatagaagtaacaagaatgaagaactagataatttgctttaaatacatataagttattttacatttcttccatatgaaaccaatttattctgctgagtgatttcacagataaaggtgttacttacttgacttcaccatgacaagaaaaggacaagtttttttaagcagcatctttatgaattttttatcagtggcagatattttaatgggctgcatttttacaaattcctgatatattctggagacctgtggtacatttttgctactctggagatataaattaaattagcatgatgtattgccaaggaccagcacgtggattgtctacattgtgatccatgaggcactgagaggactcggccctcagatacaactcccctgggtagatgcccaggcagaacccagcaaatgtatatgcatctctgggctctgaggacaaaatgccttgagagtaaagggcactttcagggctgccctgaggaggtgctttctggacattctaggaactctgagcaggagcatggctcccatactgtttttccttagggcctgttttgaataatagtgtttttctgaatatataaccaagcattttctctggactggaagccacatttgatccctggttctcagaaatctgggtttggtggttctgtctttatagatacttgtacacatcacaaaatcaccaaatttggggaaatgccaaccatactttgagagaataaatatgagcagttgtgcctacttgcataggggagcctgtgtaaaaagtcagtgattccgtaggctcttttcctgcactaaccagtgcagttaatacctcactttcatgaacagcaaactcatggcaacattaagtgaatcatggccgggcgcagtggctcacgcctgtaatcccagtactttgggaggccaaggcgggtggatcacctgaggtcaggagttcaagacgagcctggccaacatagtgaaaccccatctctactaaaaaatacaaaaaattagccgggcgtggtgcagacgcctgtaatctcagctgctcgggaggctgaggcaggagaattgcttgaacccggggagtggaggttgcagtgagccaagattgtgccactgcactccagcctgggtgacagagtgagactctgtctttaaaaaaaaaaaaagattcatgtccttagattagattgtaacgccactgggcaggtactgtgtctaatgttttgtgtggcacctgtcacattgttagagctcaataaacgttcaacaacaatggacttgtgactgtcaaaatacaaaaagggtctacaaagcatttctctagttttgtatgtattttagtaggcctctttattcagaattattaaacaaggcacaaaaattttaacattcataatcaaaagaggcatttgtatgtgagagaagaactctaaggccagtggtgtgcagctcccagtactgctcatagtcctaatggatgtacttatggtggccacacttccagctgagtgagcacctgaccatagctttctcctaaggcataggatgttaagtgttcagggttctgaagttcagaaaaacagtctcacctgaggaggtttctcttcccaagcacatagctaataaagggctgcaggttttctcctgggtgatgttcccagcagcacaaggcctctcatggcaggacctgaagagctcagcctgagcctgtgctggggtcaggtggctcagtgaactcaatgctgctgaattaacaggaggcccaggattacagatatgagttgttgatcctagaaatttctccagaatttagcaatgtgaggttgagtccctaataatttttcttccacttcattctaatcattttcacttacgaattatagagattatcgaattttttagtggtgatggatggcatggacttctggtacacggtatttagagggtcctctgttgagacttgtgcggtacctttgggtc

SEQ ID NO: 282116 - DNA, 1948 bp, Homo sapiens
aagagacaaaagactgcactatagagaaggcatagaagtaacaagaatgaagaactagataatttgctttaaatacatataagttattttacatttcttccatatgaaaccaatttattctgctgagtgatttcacagataaaggtgttacttacttgacttcaccatgacaagaaaaggacaagtttttttaagcagcatctttatgaattttttatcagtggcagatattttaatgggctgcatttttacaaattcctgatatattctggagacctgtggtacatttttgctactctggagatataaattaaattagcatgatgtattgccaaggaccagcacgtggattgtctacattgtgatccatgaggcactgagaggactcggccctcagatacaactcccctgggtagatgcccaggcagaacccagcaaatgtatatgcatctctgggctctgaggacaaaatgccttgagagtaaagggcactttcagggctgccctgaggaggtgctttctggacattctaggaactctgagcaggagcatggctcccatactgtttttccttagggcctgttttgaataatagtgtttttctgaatatataaccaagcattttctctggactggaagccacatttgatccctggttctcagaaatctgggtttggtggttctgtctttatagatacttgtacacatcacaaaatcaccaaatttggggaaatgccaaccatactttgagagaataaatatgagcagttgtgcctacttgcataggggagcctgtgtaaaaagtcagtgattccgtaggctcttttcctgcactaaccagtgcagttaatacctcagcctgtaatcccagtactttgggaggccaaggcgggtggatcacctgaggtcaggagttcaagacgagcctggccaacatagtgaaaccccatctctactaaaaaatacaaaaaattagccgggcgtggtgcagacgcctgtaatctcagctgctcgggaggctgaggcaggagaattgcttgaacccggggagtggaggttgcagtgagccaagattgtgccactgcactccagcctgggtgacagagtgagactctgtctttaaaaaaaaaaaaagattcatgtccttagattagattgtaacgccactgggcaggtactgtgtctaatgttttgtgtggcacctgtcacattgttagagctcaataaacgttcaacaacaatggacttgtgactgtcaaaatacaaaaagggtctacaaagcatttctctagttttgtatgtattttagtaggcctctttattcagaattattaaacaaggcacaaaaattttaacattcataatcaaaagaggcatttgtatgtgagagaagaactctaaggccagtggtgtgcagctcccagtactgctcatagtcctaatggatgtacttatggtggccacacttccagctgagtgagcacctgaccatagctttctcctaaggcataggatgttaagtgttcagggttctgaagttcagaaaaacagtctcacctgaggaggtttctcttcccaagcacatagctaataaagggctgcaggttttctcctgggtgatgttcccagcagcacaaggcctctcatggcaggacctgaagagctcagcctgagcctgtgctggggtcaggtggctcagtgaactcaatgctgctgaattaacaggaggcccaggattacagatatgagttgttgatcctagaaatttctccagaatttagcaatgtgaggttgagtccctaataatttttcttccacttcattctaatcattttcacttacgaattatagagattatcgaattttttagtggtgatggatggcatggacttctggtacacggtatttagagggtcctctgttgagacttgtgcggtacctttgggtc

SEQ ID NO: 282117 - DNA, 546 bp, Homo sapiens
gcagacatcatatttaatggtgaaatacttaaagttttccccatgagatggaggattagtcaggaacatctattttttttttttggtgagactgagtcttgctgtatcgtctaggctagagtgtggtggcgccatctcggctcactgcaccctctgcctcccagcctaggcgacaagagaaaaactccatctcaaaaaaaaaaaaaaaaaaaagaattcttaacagttttatttgtaatagtctaacagttaatacaaagatatccattaacagtataatgggtaaatgaatagtaatacaaaaaaaatcatgcaggaataaaaatgaataaagcattgctacatgcaacaacaggagtgaatgtcacaaaaatataacgaaagaagccagacaaaaataatacaaactacatgatttcatcacttacataaagttcaaaaactaatctaaagagaaattaggatagaggtttcacctttatgtagagtacaagagacggttctggtaattatcttttcacctgtatccatactcaactgtattca

SEQ ID NO: 282118 - DNA, 6011 bp, Homo sapiens
  misc_feature (5948)..(5949): n is a, c, g, or t
  misc_feature (5960)..(5960): n is a, c, g, or t
cctccaggcccagaacggagccgccttggcctcggggtctccctacaccaacggtcctgtccaaaatgcattgctgtcttcacaagagtcagtgagccaaggatacaatttccagcttccaggatcctaccctcatccaataccagcaaagactttgatccagtctctggccagtctaactatggtggttctcagggatctgggcagactcttaatagaccacctgtggcctctaatccagtgacaccttcgcttcatagtggtcctgctccccgaatgccattacctgcttctcagaacccagctactacaccaatgccttctagtagctttcttcctgaagccaacctgccaccacctttgaattggcaatataactatccatccacagcctcacaaacaaaccattgtcctcgtgcatcatcccaaccaactgtatctggaaatacaagtttaaccacaaatcatcaatatgtttcttctggatatccttcacttcaaaatagcttcataaagtcaggtccttctgtacctcccttagtgaatccacctctgcctacaacttttcaaccaggagctcctcatgggccccctccagctggaggcccacccccagtgagggccctcacgcccctgacatcatcatatagagatgtaccccagcccttatttaattcagctgtcaaccaagaaggtattacatcaaataccaataacggatctatggtggtccacagtagttacgacgagattgaaggaggtggcttattggcaacaccacagcttactaacaagaatcccaaaatgagccgaagtgttggatattcatatccctccttaccacctggttatcagaacacaacaccacctggtgcaactggagtaccaccctcttccttgaattacccaagtgggccacaagcctttactcagactcccttaggtgctaatcatttaaccacaagcatgagtggattaagtctacaaccagagggtctaagagttgtcaatcttcttcaagaaagaaacatgcttccgtcaacacctttgaagcctccagttccaaatttgcatgaagacatccagaaactcaactgtaacccagagttatttcgatgcacgctgactagcattcctcagacgcaggccttattgaataaagccaaacttcctttggggctgctgcttcatcctttcaaagacttagtgcaattgcctgtggttacctccagtacaattgtgagatgccgttcatgcaggacgtacatcaatcctttcgtcagctttcttgatcaaaggagatggaagtgtaacttatgttatcgagtcaatgatgttcctgaagaattcttgtacaaccctttgaccagagtttatggagaacctcacagaagaccagaagttcaaaatgctactattgagtttatggctccttcagaatacatgttacgaccacctcagcctccagtgtatctctttgtatttgatgtgtctcacaatgcagtcgaaactggatacttgaattcagtttgccagagtttgttagacaatctggatttgcttcctggcaacactagaacaaaaattggcttcataacatttgacagtacaatccatttctacggtcttcaggaaagtctctctcaacctcagatgctaatagtttcagatattgaagatgtttttatacctatgccagagaacttattagtaaacttaaatgaaagtaaagagctcgtgcaagatttactgaaaactttgccacaaatgtttaccaagactctggagacccagagtgccttgggtcctgcactgcaggctgcctttaagctgatgtctccaactggtggtcgaatgtctgtctttcaaacacaactcccaactcttggagtgggagccctgaaaccacgagaggaaccaaaccacaggtcatctgctaaggatatacacatgacaccatccactgacttctataagaaattagccttggactgttctggtcagcaagttgctgttgacttattccttctcagtggacagtattctgatttggcttctctgggttgtatttctcggtattcagcaggtagtgtctattactatccctcttaccatcatcagcacaacccagtccaagtacagaaattacagaaggaactacagagataccttactcggaagattggctttgaggcagtcatgaggattcggtgcaccaaaggtctttccattcatactttccatggaaacttctttgttaggtcaaccgacttactgtctttgcctaacgtcaacccagacgctgggtatgcagtacagatgtcagtggaagagagtcttactgacactcagttggtttcttttcagtcagcactcttgtatacatccagcaaaggcgaaagaagaattcgtgttcatactttgtgtttgccagtagtttcgactctgaatgatgtctttcttggagctgatgttcaagcaatttcagggttattggccaatatggctgttgacagatctatgactgccagtctgagtgacgctcgggatgctctagtgaatgcagtcattgactccctttcagcttaccgttcttcagtcttaagtaaccagcagcctggactcatggttcctttttctttgcggcttttcccactttttgtgttggctctccttaaacagaaatcattccagactgggacaaatgcacgtctagatgaacgcatttttgctatgtgtcaagtgaaaaaccagcccttggtttaccttatgctcacaactcatcccagtttgtatagagttgacaatctctcagatgagggagcactcaacatcagtgatagaaccatacctcagccccccattcttcagctttcagtggagaagctgagcagagatggagctttcctcatggatgcaggctctgtactgatgctttgggttggaaaaaattgtacacagaattttctcagccaagttctaggagttcaaaactatgcatcaattccacagcctatgacagaccttccagaacttgatacaccagaatctgccagaataatagctttcatctcttggcttagagagcagagaccatttttcccaatactttatgtaataagggatgagagtccaatgaaagcaaacttccttcaaaacatgatagaagacagaacagaatctgcattatcatattatgaattcctgttgcatatacagcaacaagtgaataaatgaatgaatgaagaaatttgacttatttttaaggaatgtcacgatagtgcagaatacctggaaatgtgtaataccttctttttctattatgtttgtggactaatgtgatgattgagatgttctcactgtgatttcaacaacctatagcaaataaaagaccacagcagagaatcaaacatgcaactctgaaatactgtatttttcaaatcagaatatagctacgtatgattggatacttttttcttgccaattatgtttgagttgttatggattaaaataagaatattgcagaggcaaagtacattttgtaaaataaagatttctgtgttctacatgtatatttctcatttttaatttttctgaatctttggctgctacatttaaaacctcacaaacctaagtgttgcagggaagttacaaattgattggtagtgatgtttttaaaataaaaacaatggaaagtaaatataatgtaggaaaactagaattcattccccacacgtgtcttttttttttctttgttaagggaaaggatcatgttgactaaaactaaactaattctagtatagcttgagaaaaatatgaagaaacacattcaagctttaaaatctgtcagtattctttatgcttgaagaacaaagtcactttgatttgaagtgagaactatcattaggtggttttctgatttcctgatgaagagttggacatactgtcttaatctatagtgaaaagaatttgagctgtcttcataaacactgggactagcaatgataatagggagataagaaactttaattatcttgatcctttaagtggattttatttggtgcatttctgctctgggtatataataaaagtgggggtttttggtgaaatgagtgaagaaatgaaaggtttctaaagtgctatccaaatacatcagtaacatttttctaaggagtttaattgttaaattggaagtcattcataagaaatatttatgcttgaatatgaaaatctatgaaagcataaatgctgctgtttgatttggtggatattaagattatacacatccaacatattaaagttatgaaagaaacttgacttctgaaaatccttaagagactgctttcttgattcagctagagaaatattatagtcaaaactattgagtgaattttgtttacaaataggtaaattatacatttgtatatttaaagtgctgtgacatagtatctttaagagtttggctcagttttcacagattcattttgtcttaagaatttcttaaatatgttcatgtataatacttgatcaaaatatttttgggttttttgttttgttttaatgggttagaaaatgtttacaatcttggtcttatatgatcaccaatggaatagtaacttccaggtttatatcaatatgagctgactttaactgagttgtttgggatagggaagaagcagtccctctacagtatacaactactgcttgccagctggatcaaaataatcatgttttatgaaaatatctcccttaagcagtgttaaggttggtttgcagtgtgtaagtggcacattgaactggaagttttcttgaaagctgcttcatctattaagaagcaattttcaaattgtagcgaattatattatcccctcttttaaagaaacagtcgttatatgctgatgtttcttaaaataactaaaatgttcctcttaatgtgattttaaatggagttatttgtaggtcctttcttagtagtaaagaatcttctagagggaaacatttgtgcttttagggataatcttccttgtgcctcactacatccctaagtgggtatgactcttgttattaccacatgcttttttagtatatttcacaaatttacttttaaatattattttagatacggtgtaacatgtgcaattcagaataattttataacaggtcatgaaaaacataactttagttaggattcacaatatttgttctccacataatgagagaatgaatgagcctttggagatactgatataaggcaattattttttgcaatgttgaatgtgttttttagtttgattctttttttttcccccaatagggcactacctgccatatcatcttgtattactttttgatgtaaagcgactaatatttacactatgccatattttttttaattatagttgtaaattatgaaagatccttgaattttctacagatctacaactactaatgtaacagacaagggcaatcttggtatttaaatctgagcatggcagttctaccataaaaagtactctatttttctaatttctaggatttttaaaataacatttctgtaagtctgacatactaatagtcactcaagcagtaccatttattttagtttgcatatattttcactgtttttaatttaatgtattgagtctaatagactgttttgcaataattagaataaagatttatttcttctaatcaaagatgcataacagctattatctaggggaccaccaaatgtgatttcaaaattttgttaactattacaaatgtaatccttatatagaaattttaattttgtaaagtagtgtataatattgtaatattaaattcttgttcttaaattcaaatatgtattgatcttcaatgtgctgtgttaaatcttgcttctctgaaaagttggagacaagatttgtcttcctttttacagtttgtaattttcactgttgtttatnnctaccgcaggnctttttctttatgaatttatcttttcatttcctaaacgaccccccccggcg

SEQ ID NO: 282119 - DNA, 5974 bp, Homo sapiens
cctccaggcccagaacggagccgccttggcctcggggtctccctacaccaacggtcctgtccaaaatgcattgctgtcttcacaagagtcagtgagccaaggatacaatttccagcttccaggatcctaccctcatccaataccagcaaagactttgatccagtctctggccagtctaactatggtggttctcagggatctgggcagactcttaatagaccacctgtggcctctaatccagtgacaccttcgcttcatagtggtcctgctccccgaatgccattacctgcttctcagaacccagctactacaccaatgccttctagtagctttcttcctgaagccaacctgccaccacctttgaattggcaatataactatccatccacagcctcacaaacaaaccattgtcctcgtgcatcatcccaaccaactgtatctggaaatacaagtttaaccacaaatcatcaatatgtttcttctggatatccttcacttcaaaatagcttcataaagtcaggtccttctgtacctcccttagtgaatccacctctgcctacaacttttcaaccaggagctcctcatgggccccctccagctggaggcccacccccagtgagggccctcacgcccctgacatcatcatatagagatgtaccccagcccttatttaattcagctgtcaaccaagaaggtattacatcaaataccaataacggatctatggtggtccacagtagttacgacgagattgaaggaggtggcttattggcaacaccacagcttactaacaagaatcccaaaatgagccgaagtgttggatattcatatccctccttaccacctggttatcagaacacaacaccacctggtgcaactggagtaccaccctcttccttgaattacccaagtgggccacaagcctttactcagactcccttaggtgctaatcatttaaccacaagcatgagtggattaagtctacaaccagagggtctaagagttgtcaatcttcttcaagaaagaaacatgcttccgtcaacacctttgaagcctccagttccaaatttgcatgaagacatccagaaactcaactgtaacccagagttatttcgatgcacgctgactagcattcctcagacgcaggccttattgaataaagccaaacttcctttggggctgctgcttcatcctttcaaagacttagtgcaattgcctgtggttacctccagtacaattgtgagatgccgttcatgcaggacgtacatcaatcctttcgtcagctttcttgatcaaaggagatggaagtgtaacttatgttatcgagtcaatgatgttcctgaagaattcttgtacaaccctttgaccagagtttatggagaacctcacagaagaccagaagttcaaaatgctactattgagtttatggctccttcagaatacatgttacgaccacctcagcctccagtgtatctctttgtatttgatgtgtctcacaatgcagtcgaaactggatacttgaattcagtttgccagagtttgttagacaatctggatttgcttcctggcaacactagaacaaaaattggcttcataacatttgacagtacaatccatttctacggtcttcaggaaagtctctctcaacctcagatgctaatagtttcagatattgaagatgtttttatacctatgccagagaacttattagtaaacttaaatgaaagtaaagagctcgtgcaagatttactgaaaactttgccacaaatgtttaccaagactctggagacccagagtgccttgggtcctgcactgcaggctgcctttaagctgatgtctccaactggtggtcgaatgtctgtctttcaaacacaactcccaactcttggagtgggagccctgaaaccacgagaggaaccaaaccacaggtcatctgctaaggatatacacatgacaccatccactgacttctataagaaattagccttggactgttctggtcagcaagttgctgttgacttattccttctcagtggacagtattctgatttggcttctctgggttgtatttctcggtattcagcaggtagtgtctattactatccctcttaccatcatcagcacaacccagtccaagtacagaaattacagaaggaactacagagataccttactcggaagattggctttgaggcagtcatgaggattcggtgcaccaaaggtctttccattcatactttccatggaaacttctttgttaggtcaaccgacttactgtctttgcctaacgtcaacccagacgctgggtatgcagtacagatgtcagtggaagagagtcttactgacactcagttggtttcttttcagtcagcactcttgtatacatccagcaaaggcgaaagaagaattcgtgttcatactttgtgtttgccagtagtttcgactctgaatgatgtctttcttggagctgatgttcaagcaatttcagggttattggccaatatggctgttgacagatctatgactgccagtctgagtgacgctcgggatgctctagtgaatgcagtcattgactccctttcagcttaccgttcttcagtcttaagtaaccagcagcctggactcatggttcctttttctttgcggcttttcccactttttgtgttggctctccttaaacagaaatcattccagactgggacaaatgcacgtctagatgaacgcatttttgctatgtgtcaagtgaaaaaccagcccttggtttaccttatgctcacaactcatcccagtttgtatagagttgacaatctctcagatgagggagcactcaacatcagtgatagaaccatacctcagccccccattcttcagctttcagtggagaagctgagcagagatggagctttcctcatggatgcaggctctgtactgatgctttgggttggaaaaaattgtacacagaattttctcagccaagttctaggagttcaaaactatgcatcaattccacagcctatgacagaccttccagaacttgatacaccagaatctgccagaataatagctttcatctcttggcttagagagcagagaccatttttcccaatactttatgtaataagggatgagagtccaatgaaagcaaacttccttcaaaacatgatagaagacagaacagaatctgcattatcatattatgaattcctgttgcatatacagcaacaagtgaataaatgaatgaatgaagaaatttgacttatttttaaggaatgtcacgatagtgcagaatacctggaaatgtgtaataccttctttttctattatgtttgtggactaatgtgatgattgagatgttctcactgtgatttcaacaacctatagcaaataaaagaccacagcagagaatcaaacatgcaactctgaaatactgtatttttcaaatcagaatatagctacgtatgattggatacttttttcttgccaattatgtttgagttgttatggattaaaataagaatattgcagaggcaaagtacattttgtaaaataaagatttctgtgttctacatgtatatttctcatttttaatttttctgaatctttggctgctacatttaaaacctcacaaacctaagtgttgcagggaagttacaaattgattggtagtgatgtttttaaaataaaaacaatggaaagtaaatataatgtaggaaaactagaattcattccccacacgtgtcttttttttttctttgttaagggaaaggatcatgttgactaaaactaaactaattctagtatagcttgagaaaaatatgaagaaacacattcaagctttaaaatctgtcagtattctttatgcttgaagaacaaagtcactttgatttgaagtgagaactatcattaggtggttttctgatttcctgatgaagagttggacatactgtcttaatctatagtgaaaagaatttgagctgtcttcataaacactgggactagcaatgataatagggagataagaaactttaattatcttgatcctttaagtggattttatttggtgcatttctgctctgggtatataataaaagtgggggtttttggtgaaatgagtgaagaaatgaaaggtttctaaagtgctatccaaatacatcagtaacatttttctaaggagtttaattgttaaattggaagtcattcataagaaatatttatgcttgaatatgaaacatccaacatattaaagttatgaaagaaacttgacttctgaaaatccttaagagactgctttcttgattcagctagagaaatattatagtcaaaactattgagtgaattttgtttacaaataggtaaattatacatttgtatatttaaagtgctgtgacatagtatctttaagagtttggctcagttttcacagattcattttgtcttaagaatttcttaaatatgttcatgtataatacttgatcaaaatatttttgggttttttgttttgttttaatgggttagaaaatgtttacaatcttggtcttatatgatcaccaatggaatagtaacttccaggtttatatcaatatgagctgactttaactgagttgtttgggatagggaagaagcagtccctctacagtatacaactactgcttgccagctggatcaaaataatcatgttttatgaaaatatctcccttaagcagtgttaaggttggtttgcagtgtgtaagtggcacattgaactggaagttttcttgaaagctgcttcatctattaagaagcaattttcaaattgtagcgaattatattatcccctcttttaaagaaacagtcgttatatgctgatgtttcttaaaataactaaaatgttcctcttaatgtgattttaaatggagttatttgtaggtcctttcttagtagtaaagaatcttctagagggaaacatttgtgcttttagggataatcttccttgtgcctcactacatccctaagtgggtatgactcttgttattaccacatgcttttttagtatatttcacaaatttacttttaaatattattttagatacggtgtaacatgtgcaattcagaataattttataacaggtcatgaaaaacataactttagttaggattcacaatatttgttctccacataatgagagaatgaatgagcctttggagatactgatataaggcaattattttttgcaatgttgaatgtgttttttagtttgattctttttttttcccccaatagggcactacctgccatatcatcttgtattactttttgatgtaaagcgactaatatttacactatgccatattttttttaattatagttgtaaattatgaaagatccttgaattttctacagatctacaactactaatgtaacagacaagggcaatcttggtatttaaatctgagcatggcagttctaccataaaaagtactctatttttctaatttctaggatttttaaaataacatttctgtaagtctgacatactaatagtcactcaagcagtaccatttattttagtttgcatatattttcactgtttttaatttaatgtattgagtctaatagactgttttgcaataattagaataaagatttatttcttctaatcaaagatgcataacagctattatctaggggaccaccaaatgtgatttcaaaattttgttaactattacaaatgtaatccttatatagaaattttaattttgtaaagtagtgtataatattgtaatattaaattcttgttcttaaattcaaatatgtattgatcttcaatgtgctgtgttaaatcttgcttctctgaaaagttggagacaagatttgtcttcctttttacagtttgtaattttcactgttttattcctgttaaaaaaaaaaaaaagtcatttgtaccaccatgcagaccattgtttgatctatgctaacttatcaacttggctattc

SEQ ID NO: 282120 - DNA, 3567 bp, Homo sapiens
cctccaggcccagaacggagccgccttggcctcggggtctccctacaccaacggtcctgtccaaaatgcattgctgtcttcacaagagtcagtgagccaaggatacaatttccagcttccaggatcctaccctcatccaataccagcaaagactttgatccagtctctggccagtctaactatggtggttctcagggatctgggcagactcttaatagaccacctgtggcctctaatccagtgacaccttcgcttcatagtggtcctgctccccgaatgccattacctgcttctcagaacccagctactacaccaatgccttctagtagctttcttcctgaagccaacctgccaccacctttgaattggcaatataactatccatccacagcctcacaaacaaaccattgtcctcgtgcatcatcccaaccaactgtatctggaaatacaagtttaaccacaaatcatcaatatgtttcttctggatatccttcacttcaaaatagcttcataaagtcaggtccttctgtacctcccttagtgaatccacctctgcctacaacttttcaaccaggagctcctcatgggccccctccagctggaggcccacccccagtgagggccctcacgcccctgacatcatcatatagagatgtaccccagcccttatttaattcagctgtcaaccaagaaggtattacatcaaataccaataacggatctatggtggtccacagtagttacgacgagattgaaggaggtggcttattggcaacaccacagcttactaacaagaatcccaaaatgagccgaagtgttggatattcatatccctccttaccacctggttatcagaacacaacaccacctggtgcaactggagtaccaccctcttccttgaattacccaagtgggccacaagcctttactcagactcccttaggtgctaatcatttaaccacaagcatgagtggattaagtctacaaccagagggtctaagagttgtcaatcttcttcaagaaagaaacatgcttccgtcaacacctttgaagcctccagttccaaatttgcatgaagacatccagaaactcaactgtaacccagagttatttcgatgcacgctgactagcattcctcagacgcaggccttattgaataaagccaaacttcctttggggctgctgcttcatcctttcaaagacttagtgcaattgcctgtggttacctccagtacaattgtgagatgccgttcatgcaggacgtacatcaatcctttcgtcagctttcttgatcaaaggagatggaagtgtaacttatgttatcgagtcaatgatgttcctgaagaattcttgtacaaccctttgaccagagtttatggagaacctcacagaagaccagaagttcaaaatgctactattgagtttatggctccttcagaatacatgttacgaccacctcagcctccagtgtatctctttgtatttgatgtgtctcacaatgcagtcgaaactggatacttgaattcagtttgccagagtttgttagacaatctggatttgcttcctggcaacactagaacaaaaattggcttcataacatttgacagtacaatccatttctacggtcttcaggaaagtctctctcaacctcagatgctaatagtttcagatattgaagatgtttttatacctatgccagagaacttattagtaaacttaaatgaaagtaaagagctcgtgcaagatttactgaaaactttgccacaaatgtttaccaagactctggagacccagagtgccttgggtcctgcactgcaggctgcctttaagctgatgtctccaactggtggtcgaatgtctgtctttcaaacacaactcccaactcttggagtgggagccctgaaaccacgagaggaaccaaaccacaggtcatctgctaaggatatacacatgacaccatccactgacttctataagaaattagccttggactgttctggtcagcaagttgctgttgacttattccttctcagtggacagtattctgatttggcttctctgggttgtatttctcggtattcagcaggtagtgtctattactatccctcttaccatcatcagcacaacccagtccaagtacagaaattacagaaggaactacagagataccttactcggaagattggctttgaggcagtcatgaggattcggtgcaccaaaggtctttccattcatactttccatggaaacttctttgttaggtcaaccgacttactgtctttgcctaacgtcaacccagacgctgggtatgcagtacagatgtcagtggaagagagtcttactgacactcagttggtttcttttcagtcagcactcttgtatacatccagcaaaggcgaaagaagaattcgtgttcatactttgtgtttgccagtagtttcgactctgaatgatgtctttcttggagctgatgttcaagcaatttcagggttattggccaatatggctgttgacagatctatgactgccagtctgagtgacgctcgggatgctctagtgaatgcagtcattgactccctttcagcttaccgttcttcagtcttaagtaaccagcagcctggactcatggttcctttttctttgcggcttttcccactttttgtgttggctctccttaaacagaaatcattccagactgggacaaatgcacgtctagatgaacgcatttttgctatgtgtcaagtgaaaaaccagcccttggtttaccttatgctcacaactcatcccagtttgtatagagttgacaatctctcagatgagggagcactcaacatcagtgatagaaccatacctcagccccccattcttcagctttcagtggagaagctgagcagagatggagctttcctcatggatgcaggctctgtactgatgctttgggttggaaaaaattgtacacagaattttctcagccaagttctaggagttcaaaactatgcatcaattccacagcctatgacagaccttccagaacttgatacaccagaatctgccagaataatagctttcatctcttggcttagagagcagagaccatttttcccaatactttatgtaataagggatgagagtccaatgaaagcaaacttccttcaaaacatgatagaagacagaacagaatctgcattatcatattatgaattcctgttgcatatacagcaacaagtgaataaatgaatgaatgaagaaatttgacttatttttaaggaatgtcacgatagtgcagaatacctggaaatgtgtaataccttctttttctattatgtttgtggactaatgtgatgattgagatgttctcactgtgatttcaacaacctatagcaaataaaagaccacagcagagaatcaaacatgcaactctgaaatactgtatttttcaaatcagaatatagctacgtatgattggatacttttttcttgccaattatgtttgagttgttatggattaaaataagaatattgcagaggcaaagtacattttgtaaaataaagatttctgtgttctac

SEQ ID NO: 282121 - DNA, 4019 bp, Homo sapiens
tcccaacactttgggaggctgaggcaggaggactgcttgaggccaggagtttgagatcagcctgggcaacatagggagacttggtacaaaaaaattgttttaattaattaaaattaaaatttcaaaagaactctgtttcgaaacattgtgcatttcaggaaacacaggaaagcattgtgtgtttaattgcaatgtttttctttctcaatggtatataaagtgttggattacaatcagtagcataactgaggctcaggaaggttaagttacttgccaaatcattatacagctaggaaatagcagagcagcatttcaacagaggttggctcagttctccagaccatgcttttagctgctgtgttttgtctcatttgtgtatgtagtaaattggagagatacttggtatagtttttaaaaattatctcttctatccttaacagtggactagctaaacttctatcatatttcttttttgtccttaccctcaccttgcttagctgttgacagatctatgactgccagtctgagtgacgctcgggatgctctagtgaatgcagtcattgactccctttcagcttaccgttcttcagtcttaagtaaccagcagcctggactcatggttcctttttctttgcggcttttcccactttttgtgttggctctccttaaacagaaatcattccagactgggacaaatgcacgtctagatgaacgcatttttgctatgtgtcaagtgaaaaaccagcccttggtttaccttatgctcacaactcatcccagtttgtatagagttgacaatctctcagatgagggagcactcaacatcagtgatagaaccatacctcagccccccattcttcagctttcagtggagaagctgagcagagatggagctttcctcatggatgcaggctctgtactgatgctttgggttggaaaaaattgtacacagaattttctcagccaagttctaggagttcaaaactatgcatcaattccacagcctatgacagaccttccagaacttgatacaccagaatctgccagaataatagctttcatctcttggcttagagagcagagaccatttttcccaatactttatgtaataagggatgagagtccaatgaaagcaaacttccttcaaaacatgatagaagacagaacagaatctgcattatcatattatgaattcctgttgcatatacagcaacaagtgaataaatgaatgaatgaagaaatttgacttatttttaaggaatgtcacgatagtgcagaatacctggaaatgtgtaataccttctttttctattatgtttgtggactaatgtgatgattgagatgttctcactgtgatttcaacaacctatagcaaataaaagaccacagcagagaatcaaacatgcaactctgaaatactgtatttttcaaatcagaatatagctacgtatgattggatacttttttcttgccaattatgtttgagttgttatggattaaaataagaatattgcagaggcaaagtacattttgtaaaataaagatttctgtgttctacatgtatatttctcatttttaatttttctgaatctttggctgctacatttaaaacctcacaaacctaagtgttgcagggaagttacaaattgattggtagtgatgtttttaaaataaaaacaatggaaagtaaatataatgtaggaaaactagaattcattccccacacgtgtcttttttttttctttgttaagggaaaggatcatgttgactaaaactaaactaattctagtatagcttgagaaaaatatgaagaaacacattcaagctttaaaatctgtcagtattctttatgcttgaagaacaaagtcactttgatttgaagtgagaactatcattaggtggttttctgatttcctgatgaagagttggacatactgtcttaatctatagtgaaaagaatttgagctgtcttcataaacactgggactagcaatgataatagggagataagaaactttaattatcttgatcctttaagtggattttatttggtgcatttctgctctgggtatataataaaagtgggggtttttggtgaaatgagtgaagaaatgaaaggtttctaaagtgctatccaaatacatcagtaacatttttctaaggagtttaattgttaaattggaagtcattcataagaaatatttatgcttgaatatgaaaatctatgaaagcataaatgctgctgtttgatttggtggatattaagattatacacatccaacatattaaagttatgaaagaaacttgacttctgaaaatccttaagagactgctttcttgattcagctagagaaatattatagtcaaaactattgagtgaattttgtttacaaataggtaaattatacatttgtatatttaaagtgctgtgacatagtatctttaagagtttggctcagttttcacagattcattttgtcttaagaatttcttaaatatgttcatgtataatacttgatcaaaatatttttgggttttttgttttgttttaatgggttagaaaatgtttacaatcttggtcttatatgatcaccaatggaatagtaacttccaggtttatatcaatatgagctgactttaactgagttgtttgggatagggaagaagcagtccctctacagtatacaactactgcttgccagctggatcaaaataatcatgttttatgaaaatatctcccttaagcagtgttaaggttggtttgcagtgtgtaagtggcacattgaactggaagttttcttgaaagctgcttcatctattaagaagcaattttcaaattgtagcgaattatattatcccctcttttaaagaaacagtcgttatatgctgatgtttcttaaaataactaaaatgttcctcttaatgtgattttaaatggagttatttgtaggtcctttcttagtagtaaagaatcttctagagggaaacatttgtgcttttagggataatcttccttgtgcctcactacatccctaagtgggtatgactcttgttattaccacatgcttttttagtatatttcacaaatttacttttaaatattattttagatacggtgtaacatgtgcaattcagaataattttataacaggtcatgaaaaacataactttagttaggattcacaatatttgttctccacataatgagagaatgaatgagcctttggagatactgatataaggcaattattttttgcaatgttgaatgtgttttttagtttgattctttttttttcccccaatagggcactacctgccatatcatcttgtattactttttgatgtaaagcgactaatatttacactatgccatattttttttaattatagttgtaaattatgaaagatccttgaattttctacagatctacaactactaatgtaacagacaagggcaatcttggtatttaaatctgagcatggcagttctaccataaaaagtactctatttttctaatttctaggatttttaaaataacatttctgtaagtctgacatactaatagtcactcaagcagtaccatttattttagtttgcatatattttcactgtttttaatttaatgtattgagtctaatagactgttttgcaataattagaataaagatttatttcttctaatcaaagatgcataacagctattatctaggggaccaccaaatgtgatttcaaaattttgttaactattacaaatgtaatccttatatagaaattttaattttgtaaagtagtgtataatattgtaatattaaattcttgttcttaaattcaaatatgtattgatcttcaatgtgctgtgttaaatcttgcttctctgaaaagttggagacaagatttgtcttcctttttacagtttgtaattttcactgttttattcctgttaaaaaaaaaaaaaagtcatttgtaccaccatgcagaccattgtttgatctatgctaacttatcaacttggctattc

SEQ ID NO: 282122 - DNA, 5974 bp, Homo sapiens
cctccaggcccagaacggagccgccttggcctcggggtctccctacaccaacggtcctgtccaaaatgcattgctgtcttcacaagagtcagtgagccaaggatacaatttccagcttccaggatcctaccctcatccaataccagcaaagactttgatccagtctctggccagtctaactatggtggttctcagggatctgggcagactcttaatagaccacctgtggcctctaatccagtgacaccttcgcttcatagtggtcctgctccccgaatgccattacctgcttctcagaacccagctactacaccaatgccttctagtagctttcttcctgaagccaacctgccaccacctttgaattggcaatataactatccatccacagcctcacaaacaaaccattgtcctcgtgcatcatcccaaccaactgtatctggaaatacaagtttaaccacaaatcatcaatatgtttcttctggatatccttcacttcaaaatagcttcataaagtcaggtccttctgtacctcccttagtgaatccacctctgcctacaacttttcaaccaggagctcctcatgggccccctccagctggaggcccacccccagtgagggccctcacgcccctgacatcatcatatagagatgtaccccagcccttatttaattcagctgtcaaccaagaaggtattacatcaaataccaataacggatctatggtggtccacagtagttacgacgagattgaaggaggtggcttattggcaacaccacagcttactaacaagaatcccaaaatgagccgaagtgttggatattcatatccctccttaccacctggttatcagaacacaacaccacctggtgcaactggagtaccaccctcttccttgaattacccaagtgggccacaagcctttactcagactcccttaggtgctaatcatttaaccacaagcatgagtggattaagtctacaaccagagggtctaagagttgtcaatcttcttcaagaaagaaacatgcttccgtcaacacctttgaagcctccagttccaaatttgcatgaagacatccagaaactcaactgtaacccagagttatttcgatgcacgctgactagcattcctcagacgcaggccttattgaataaagccaaacttcctttggggctgctgcttcatcctttcaaagacttagtgcaattgcctgtggttacctccagtacaattgtgagatgccgttcatgcaggacgtacatcaatcctttcgtcagctttcttgatcaaaggagatggaagtgtaacttatgttatcgagtcaatgatgttcctgaagaattcttgtacaaccctttgaccagagtttatggagaacctcacagaagaccagaagttcaaaatgctactattgagtttatggctccttcagaatacatgttacgaccacctcagcctccagtgtatctctttgtatttgatgtgtctcacaatgcagtcgaaactggatacttgaattcagtttgccagagtttgttagacaatctggatttgcttcctggcaacactagaacaaaaattggcttcataacatttgacagtacaatccatttctacggtcttcaggaaagtctctctcaacctcagatgctaatagtttcagatattgaagatgtttttatacctatgccagagaacttattagtaaacttaaatgaaagtaaagagctcgtgcaagatttactgaaaactttgccacaaatgtttaccaagactctggagacccagagtgccttgggtcctgcactgcaggctgcctttaagctgatgtctccaactggtggtcgaatgtctgtctttcaaacacaactcccaactcttggagtgggagccctgaaaccacgagaggaaccaaaccacaggtcatctgctaaggatatacacatgacaccatccactgacttctataagaaattagccttggactgttctggtcagcaagttgctgttgacttattccttctcagtggacagtattctgatttggcttctctgggttgtatttctcggtattcagcaggtagtgtctattactatccctcttaccatcatcagcacaacccagtccaagtacagaaattacagaaggaactacagagataccttactcggaagattggctttgaggcagtcatgaggattcggtgcaccaaaggtctttccattcatactttccatggaaacttctttgttaggtcaaccgacttactgtctttgcctaacgtcaacccagacgctgggtatgcagtacagatgtcagtggaagagagtcttactgacactcagttggtttcttttcagtcagcactcttgtatacatccagcaaaggcgaaagaagaattcgtgttcatactttgtgtttgccagtagtttcgactctgaatgatgtctttcttggagctgatgttcaagcaatttcagggttattggccaatatggctgttgacagatctatgactgccagtctgagtgacgctcgggatgctctagtgaatgcagtcattgactccctttcagcttaccgttcttcagtcttaagtaaccagcagcctggactcatggttcctttttctttgcggcttttcccactttttgtgttggctctccttaaacagaaatcattccagactgggacaaatgcacgtctagatgaacgcatttttgctatgtgtcaagtgaaaaaccagcccttggtttaccttatgctcacaactcatcccagtttgtatagagttgacaatctctcagatgagggagcactcaacatcagtgatagaaccatacctcagccccccattcttcagctttcagtggagaagctgagcagagatggagctttcctcatggatgcaggctctgtactgatgctttgggttggaaaaaattgtacacagaattttctcagccaagttctaggagttcaaaactatgcatcaattccacagcctatgacagaccttccagaacttgatacaccagaatctgccagaataatagctttcatctcttggcttagagagcagagaccatttttcccaatactttatgtaataagggatgagagtccaatgaaagcaaacttccttcaaaacatgatagaagacagaacagaatctgcattatcatattatgaattcctgttgcatatacagcaacaagtgaataaatgaatgaatgaagaaatttgacttatttttaaggaatgtcacgatagtgcagaatacctggaaatgtgtaataccttctttttctattatgtttgtggactaatgtgatgattgagatgttctcactgtgatttcaacaacctatagcaaataaaagaccacagcagagaatcaaacatgcaactctgaaatactgtatttttcaaatcagaatatagctacgtatgattggatacttttttcttgccaattatgtttgagttgttatggattaaaataagaatattgcagaggcaaagtacattttgtaaaataaagatttctgtgttctacatgtatatttctcatttttaatttttctgaatctttggctgctacatttaaaacctcacaaacctaagtgttgcagggaagttacaaattgattggtagtgatgtttttaaaataaaaacaatggaaagtaaatataatgtaggaaaactagaattcattccccacacgtgtcttttttttttctttgttaagggaaaggatcatgttgactaaaactaaactaattctagtatagcttgagaaaaatatgaagaaacacattcaagctttaaaatctgtcagtattctttatgcttgaagaacaaagtcactttgatttgaagtgagaactatcattaggtggttttctgatttcctgatgaagagttggacatactgtcttaatctatagtgaaaagaatttgagctgtcttcataaacactgggactagcaatgataatagggagataagaaactttaattatcttgatcctttaagtggattttatttggtgcatttctgctctgggtatataataaaagtgggggtttttggtgaaatgagtgaagaaatgaaaggtttctaaagtgctatccaaatacatcagtaacatttttctaaggagtttaattgttaaattggaagtcattcataagaaatatttatgcttgaatatgaaaatctatgaaagcataaatgctgctgtttgatttggtggatattaagattatacacatccaacatattaaagttatgaaagaaacttgacttctgaaaatccttaagagactgctttcttgattcagctagagaaatattatagtcaaaactattgagtgaattttgtttacaaataggtaaattatacatttgtatatttaaagtgctgtgacatagtatctttaagagtttggctcagttttcacagattcattttgtcttaagaatttcttaaatatgttcatgtataatacttgatcaaaatatttttgggttttttgttttgttttaatgggttagaaaatgtttacaatcttggtcttatatgatcaccaatggaatagtaacttccaggtttatatcaatatgagctgactttaactgagttgtttgggatagggaagaagcagtccctctacagtatacaactactgcttgccagctggatcaaaataatcatgttttatgaaaatatctcccttaagcagtgttaaggttggtttgcagtgtgtaagtggcacattgaactggaagttttcttgaaagctgcttcatctattaagaagcaattttcaaattgtagcgaattatattatcccctcttttaaagaaacagtcgttatatgctgatgtttcttaaaataactatagtaaagaatcttctagagggaaacatttgtgcttttagggataatcttccttgtgcctcactacatccctaagtgggtatgactcttgttattaccacatgcttttttagtatatttcacaaatttacttttaaatattattttagatacggtgtaacatgtgcaattcagaataattttataacaggtcatgaaaaacataactttagttaggattcacaatatttgttctccacataatgagagaatgaatgagcctttggagatactgatataaggcaattattttttgcaatgttgaatgtgttttttagtttgattctttttttttcccccaatagggcactacctgccatatcatcttgtattactttttgatgtaaagcgactaatatttacactatgccatattttttttaattatagttgtaaattatgaaagatccttgaattttctacagatctacaactactaatgtaacagacaagggcaatcttggtatttaaatctgagcatggcagttctaccataaaaagtactctatttttctaatttctaggatttttaaaataacatttctgtaagtctgacatactaatagtcactcaagcagtaccatttattttagtttgcatatattttcactgtttttaatttaatgtattgagtctaatagactgttttgcaataattagaataaagatttatttcttctaatcaaagatgcataacagctattatctaggggaccaccaaatgtgatttcaaaattttgttaactattacaaatgtaatccttatatagaaattttaattttgtaaagtagtgtataatattgtaatattaaattcttgttcttaaattcaaatatgtattgatcttcaatgtgctgtgttaaatcttgcttctctgaaaagttggagacaagatttgtcttcctttttacagtttgtaattttcactgttttattcctgttaaaaaaaaaaaaaagtcatttgtaccaccatgcagaccattgtttgatctatgctaacttatcaacttggctattc

SEQ ID NO: 282123 - DNA, 3042 bp, Homo sapiens
cctccaggcccagaacggagccgccttggcctcggggtctccctacaccaacggtcctgtccaaaatgcattgctgtcttcacaagagtcagtgagccaaggatacaatttccagcttccaggatcctaccctcatccaataccagcaaagactttgatccagtctctggccagtctaactatggtggttctcagggatctgggcagactcttaatagaccacctgtggcctctaatccagtgacaccttcgcttcatagtggtcctgctccccgaatgccattacctgcttctcagaacccagctactacaccaatgccttctagtagctttcttcctgaagccaacctgccaccacctttgaattggcaatataactatccatccacagcctcacaaacaaaccattgtcctcgtgcatcatcccaaccaactgtatctggaaatacaagtttaaccacaaatcatcaatatgtttcttctggatatccttcacttcaaaatagcttcataaagtcaggtccttctgtacctcccttagtgaatccacctctgcctacaacttttcaaccaggagctcctcatgggccccctccagctggaggcccacccccagtgagggccctcacgcccctgacatcatcatatagagatgtaccccagcccttatttaattcagctgtcaaccaagaaggtattacatcaaataccaataacggatctatggtggtccacagtagttacgacgagattgaaggaggtggcttattggcaacaccacagcttactaacaagaatcccaaaatgagccgaagtgttggatattcatatccctccttaccacctggttatcagaacacaacaccacctggtgcaactggagtaccaccctcttccttgaattacccaagtgggccacaagcctttactcagactcccttaggtgctaatcatttaaccacaagcatgagtggattaagtctacaaccagagggtctaagagttgtcaatcttcttcaagaaagaaacatgcttccgtcaacacctttgaagcctccagttccaaatttgcatgaagacatccagaaactcaactgtaacccagagttatttcgatgcacgctgactagcattcctcagacgcaggccttattgaataaagccaaacttcctttggggctgctgcttcatcctttcaaagacttagtgcaattgcctgtggttacctccagtacaattgtgagatgccgttcatgcaggacgtacatcaatcctttcgtcagctttcttgatcaaaggagatggaagtgtaacttatgttatcgagtcaatgatgttcctgaagaattcttgtacaaccctttgaccagagtttatggagaacctcacagaagaccagaagttcaaaatgctactattgagtttatggctccttcagaatacatgttacgaccacctcagcctccagtgtatctctttgtatttgatgtgtctcacaatgcagtcgaaactggatacttgaattcagtttgccagagtttgttagacaatctggatttgcttcctggcaacactagaacaaaaattggcttcataacatttgacagtacaatccatttctacggtcttcaggaaagtctctctcaacctcagatgctaatagtttcagatattgaagatgtttttatacctatgccagagaacttattagtaaacttaaatgaaagtaaagagctcgtgcaagatttactgaaaactttgccacaaatgtttaccaagactctggagacccagagtgccttgggtcctgcactgcaggctgcctttaagctgatgtctccaactggtggtcgaatgtctgtctttcaaacacaactcccaactcttggagtgggagccctgaaaccacgagaggaaccaaaccacaggtcatctgctaaggatatacacatgacaccatccactgacttctataagaaattagccttggactgttctggtcagcaagttgctgttgacttattccttctcagtggacagtattctgatttggcttctctgggttgtatttctcggtattcagcaggtagtgtctattactatccctcttaccatcatcagcacaacccagtccaagtacagaaattacagaaggaactacagagataccttactcggaagattggctttgaggcagtcatgaggattcggtgcaccaaaggtctttccattcatactttccatggaaacttctttgttaggtcaaccgacttactgtctttgcctaacgtcaacccagacgctgggtatgcagtacagatgtcagtggaagagagtcttactgacactcagttggtttcttttcagtcagcactcttgtatacatccagcaaaggcgaaagaagaattcgtgttcatactttgtgtttgccagtagtttcgactctgaatgatgtctttcttggagctgatgttcaagcaatttcagggttattggccaatatggctgttgacagatctatgactgccagtctgagtgacgctcgggatgctctagtgaatgcagtcattgactccctttcagcttaccgttcttcagtcttaagtaaccagcagcctggactcatggttcctttttctttgcggcttttcccactttttgtgttggctctccttaaacagaaatcattccagactgggacaaatgcacgtctagatgaacgcatttttgctatgtgtcaagtgaaaaaccagcccttggtttaccttatgctcacaactcatcccagtttgtatagagttgacaatctctcagatgagggagcactcaacatcagtgatagaaccatacctcagccccccattcttcagctttcagtggagaagctgagcagagatggagctttcctcatggatgcaggctctgtactgatgctttgggttggaaaaaattgtacacagaattttctcagccaagttctaggagttcaaaactatgcatcaattccacagcctatgccatttagtagtaagtcctgggag

SEQ ID NO: 282124 - DNA, 1585 bp, Homo sapiens
cctccaggcccagaacggagccgccttggcctcggggtctccctacaccaacggtcctgtccaaaatgcattgctgtcttcacaagagtcagtgagccaaggatacaatttccagcttccaggatcctaccctcatccaataccagcaaagactttgatccagtctctggccagtctaactatggtggttctcagggatctgggcagactcttaatagaccacctgtggcctctaatccagtgacaccttcgcttcatagtggtcctgctccccgaatgccattacctgcttctcagaacccagctactacaccaatgccttctagtagctttcttcctgaagccaacctgccaccacctttgaattggcaatataactatccatccacagcctcacaaacaaaccattgtcctcgtgcatcatcccaaccaactgtatctggaaatacaagtttaaccacaaatcatcaatatgtttcttctggatatccttcacttcaaaatagcttcataaagtcaggtccttctgtacctcccttagtgaatccacctctgcctacaacttttcaaccaggagctcctcatgggccccctccagctggaggcccacccccagtgagggccctcacgcccctgacatcatcatatagagatgtaccccagcccttatttaattcagctgtcaaccaagaaggtattacatcaaataccaataacggatctatggtggtccacagtagttacgacgagattgaaggaggtggcttattggcaacaccacagcttactaacaagaatcccaaaatgagccgaagtgttggatattcatatccctccttaccacctggttatcagaacacaacaccacctggtgcaactggagtaccaccctcttccttgaattacccaagtgggccacaagcctttactcagactcccttaggtgctaatcatttaaccacaagcatgagtggattaagtctacaaccagagggtctaagagttgtcaatcttcttcaagaaagaaacatgcttccgtcaacacctttgaagcctccagttccaaatttgcatgaagacatccagaaactcaactgtaacccagagttatttcgatgcacgctgactagcattcctcagacgcaggccttattgaataaagccaaacttcctttggggctgctgcttcatcctttcaaagacttagtgagaccgggtctctcgttgtcacccaggttagagtgcagttccatgatcatagctcactgcagccttgaactcttgggctcaagcagtcctcctgcctcagcctccagacagacaattgcctgtggttacctccagtacaattgtgagatgccgttcatgcaggacgtacatcaatcctttcgtcagctttcttgatcaaaggagatggaagtgtaacttatgttatcgagtcaatgatgttcctgaagaattcttgtacaaccctttgaccagagtttatggagaacctcacagaagaccagaagttcaaaatgctactattgagtttatggctccttcagaatacatgttacgaccacctcctaataataagggc

SEQ ID NO: 282125 - DNA, 997 bp, Homo sapiens
cctccaggcccagaacggagccgccttggcctcggggtctccctacaccaacggtcctgtccaaaatgcattgctgtcttcacaagagtcagtgagccaaggatacaatttccagcttccaggatcctaccctcatccaataccagcaaagactttgatccagtctctggccagtctaactatggtggttctcagggatctgggcagactcttaatagaccacctgtggcctctaatccagtgacaccttcgcttcatagtggtcctgctccccgaatgccattacctgcttctcagaacccagctactacaccaatgccttctagtagctttcttcctgaagccaacctgccaccacctttgaattggcaatataactatccatccacagcctcacaaacaaaccattgtcctcgtgcatcatcccaaccaactgtatctggaaatacaagtttaaccacaaatcatcaatatgtttcttctggatatccttcacttcaaaatagcttcataaagtcaggtccttctgtacctcccttagtgaatccacctctgcctacaacttttcaaccaggagctcctcatgggccccctccagctggaggcccacccccagtgagggccctcacgcccctgacatcatcatatagagatgtaccccagcccttatttaattcagctgtcaaccaagaaggtaagtgaaccaagaaacaaagtcaaatcctcaagttttgacttagggtagaaagatgaatattagctgaattctgtgcattaaaatcacattttttccagaaaatctagttttggttagggatgggctacaggaatttacaatttaaagttcctcaggaattccattgccatccgctgggctgtgactaccattgggaaaaaagctcttagtgttttgttactttttttgttgctatgcggattttttaaaaatcatggctataaagtcaggtggcttttggaggagaattactacttttct

SEQ ID NO: 282126 - DNA, 565 bp, Homo sapiens
ggagacagggtctcaacctccccactagcctgggagtgcagtggtgcaatcttggctcactgcagcctcagcctcccgggctcaaggaatcctcccacatagctgggactataggcatgtaccaccatgcctggctcatttttgtactttttgtaaagacagggttttactgtgttgcccaggctggtctcaaactcctgagttcaagtcattcacttacctcagcctctcaaagtgctgggattacaggcgtgtactactgcacctggcccagataaatattttctaattgggaggctgtaccttttacaaggtagcagacaagaagcagaaaatttgcagtagatacctgtatcattgtggtggttttttggtggttctttggacacatgtaaacagtgctataatagtggaggaggtggcttatttttaaggaagggggtggttaattgcattagtgttatatatttggcacacttttaattattacattttgtttaaaataaatatgtatttcttctttcagatgtttttatacctatgccagagaacttattagtaaact

SEQ ID NO: 282127 - DNA, 510 bp, Homo sapiens
ggcaggtgtatcgcctgagcccaggagttcgaaatcagcctgggcaacatggcaaaacccatctctacaagaaatataaaaattagccaggcatggtggcacgcatctgtagtcccaactattcagaaggctatggtgggaggatcaccggagcctggaggttgagactgcagtgagccatgattatgccactgcactccagcctgtcaacagaggccttgtctcaaaaaagaaaaaaaatgtaattaaaaaaataaaaatttgaaaagtaccatagaccatacattagatatgtaattaaagtaattggatattgttggttttggttaacagacagaccttccagaacttgatacaccagaatctgccagaataatagctttcatctcttggcttagagagcagagaccatttttcccaatactttatgtaataaggtaagttgaattttccatttgctagtagtaaaacaatttgtttggccttgccaggacctgacaagagtatagc

SEQ ID NO: 282128 - DNA, 6028 bp, Homo sapiens
cctccaggcccagaacggagccgccttggcctcggggtctccctacaccaacggtcctgtccaaaatgcattgctgtcttcacaagagtcagtgagccaaggatacaatttccagcttccaggatcctaccctcatccaataccagcaaagactttgatccagtctctggccagtctaactatggtggttctcagggatctgggcagactcttaatagaccacctgtggcctctaatccagtgacaccttcgcttcatagtggtcctgctccccgaatgccattacctgcttctcagaacccagctactacaccaatgccttctagtagctttcttcctgaagccaacctgccaccacctttgaattggcaatataactatccatccacagcctcacaaacaaaccattgtcctcgtgcatcatcccaaccaactgtatctggaaatacaagtttaaccacaaatcatcaatatgtttcttctggatatccttcacttcaaaatagcttcataaagtcaggtccttctgtacctcccttagtgaatccacctctgcctacaacttttcaaccaggagctcctcatgggccccctccagctggaggcccacccccagtgagggccctcacgcccctgacatcatcatatagagatgtaccccagcccttatttaattcagctgtcaaccaagaaggtattacatcaaataccaataacggatctatggtggtccacagtagttacgacgagattgaaggaggtggcttattggcaacaccacagcttactaacaagaatcccaaaatgagccgaagtgttggatattcatatccctccttaccacctggttatcagaacacaacaccacctggtgcaactggagtaccaccctcttccttgaattacccaagtgggccacaagcctttactcagactcccttaggtgctaatcatttaaccacaagcatgagtggattaagtctacaaccagagggtctaagagttgtcaatcttcttcaagaaagaaacatgcttccgtcaacacctttgaagcctccagttccaaatttgcatgaagacatccagaaactcaactgtaacccagagttatttcgatgcacgctgactagcattcctcagacgcaggccttattgaataaagccaaacttcctttggggctgctgcttcatcctttcaaagacttagtgcaattgcctgtggttacctccagtacaattgtgagatgccgttcatgcaggacgtacatcaatcctttcgtcagctttcttgatcaaaggagatggaagtgtaacttatgttatcgagtcaatgatgttcctgaagaattcttgtacaaccctttgaccagagtttatggagaacctcacagaagaccagaagttcaaaatgctactattgagtttatggctccttcagaatacatgttacgaccacctcagcctccagtgtatctctttgtatttgatgtgtctcacaatgcagtcgaaactggatacttgaattcagtttgccagagtttgttagacaatctggatttgcttcctggcaacactagaacaaaaattggcttcataacatttgacagtacaatccatttctacggtcttcaggaaagtctctctcaacctcagatgctaatagtttcagatattgaagatgtttttatacctatgccagagaacttattagtaaacttaaatgaaagtaaagagctcgtgcaagatttactgaaaactttgccacaaatgtttaccaagactctggagacccagagtgccttgggtcctgcactgcaggctgcctttaagctgatgtctccaactggtggtcgaatgtctgtctttcaaacacaactcccaactcttggagtgggagccctgaaaccacgagaggaaccaaaccacaggtcatctgctaaggatatacacatgacaccatccactgacttctataagaaattagccttggactgttctggtcagcaagttgctgttgacttattccttctcagtggacagtattctgatttggcttctctgggttgtatttctcggtattcagcaggtagtgtctattactatccctcttaccatcatcagcacaacccagtccaagtacagaaattacagaaggaactacagagataccttactcggaagattggctttgaggcagtcatgaggattcggtgcaccaaaggtctttccattcatactttccatggaaacttctttgttaggtcaaccgacttactgtctttgcctaacgtcaacccagacgctgggtatgcagtacagatgtcagtggaagagagtcttactgacactcagttggtttcttttcagtcagcactcttgtatacatccagcaaaggcgaaagaagaattcgtgttcatactttgtgtttgccagtagtttcgactctgaatgatgtctttcttggagctgatgttcaagcaatttcagggttattggccaatatggctgttgacagatctatgactgccagtctgagtgacgctcgggatgctctagtgaatgcagtcattgactccctttcagcttaccgttcttcagtcttaagtaaccagcagcctggactcatggttcctttttctttgcggcttttcccactttttgtgttggctctccttaaacagaaatcattccagactgggacaaatgcacgtctagatgaacgcatttttgctatgtgtcaagtgaaaaaccagcccttggtttaccttatgctcacaactcatcccagtttgtatagagttgacaatctctcagatgagggagcactcaacatcagtgatagaaccatacctcagccccccattcttcagctttcagtggagaagctgagcagagatggagctttcctcatggatgcaggctctgtactgatgctttgggttggaaaaaattgtacacagaattttctcagccaagttctaggagttcaaaactatgcatcaattccacagcctatgacagaccttccagaacttgatacaccagaatctgccagaataatagctttcatctcttggcttagagagcagagaccatttttcccaatactttatgtaataagggatgagagtccaatgaaagcaaacttccttcaaaacatgatagaagacagaacagaatctgcattatcatattatgaattcctgttgcatatacagcaacaagtgaataaatgaatgaatgaagaaatttgacttatttttaaggaatgtcacgatagtgcagaatacctggaaatgtgtaataccttctttttctattatgtttgtggactaatgtgatgattgagatgttctcactgtgatttcaacaacctatagcaaataaaagaccacagcagagaatcaaacatgcaactctgaaatactgtatttttcaaatcagaatatagctacgtatgattggatacttttttcttgccaattatgtttgagttgttatggattaaaataagaatattgcagaggcaaagtacattttgtaaaataaagatttctgtgttctacatgtatatttctcatttttaatttttctgaatctttggctgctacatttaaaacctcacaaacctaagtgttgcagggaagttacaaattgattggtagtgatgtttttaaaataaaaacaatggaaagtaaatataatgtaggaaaactagaattcattccccacacgtgtcttttttttttctttgttaagggaaaggatcatgttgactaaaactaaactaattctagtatagcttgagaaaaatatgaagaaacacattcaagctttaaaatctgtcagtattctttatgcttgaagaacaaagtcactttgatttgaagtgagaactatcattaggtggttttctgatttcctgatgaagagttggacatactgtcttaatctatagtgaaaagaatttgagctgtcttcataaacactgggactagcaatgataatagggagataagaaactttaattatcttgatcctttaagtggattttatttggtgcatttctgctctgggtatataataaaagtgggggtttttggtgaaatgagtgaagaaatgaaaggtttctaaagtgctatccaaatacatcagtaacatttttctaaggagtttaattgttaaattggaagtcattcataagaaatatttatgcttgaatatgaaaatctatgaaagcataaatgctgctgtttgatttggtggatattaagattatacacatccaacatattaaagttatgaaagaaacttgacttctgaaaatccttaagagactgctttcttgattcagctagagaaatattatagtcaaaactattgagtgaattttgtttacaaataggtaaattatacatttgtatatttaaagtgctgtgacatagtatctttaagagtttggctcagttttcacagattcattttgtcttaagaatttcttaaatatgttcatgtataatacttgatcaaaatatttttgggttttttgttttgttttaatgggttagaaaatgtttacaatcttggtcttatatgatcaccaatggaatagtaacttccaggtttatatcaatatgagctgactttaactgagttgtttgggatagggaagaagcagtccctctacagtatacaactactgcttgccagctggatcaaaataatcatgttttatgaaaatatctcccttaagcagtgttaaggttggtttgcagtgtgtaagtggcacattgaactggaagttttcttgaaagctgcttcatctattaagaagcaattttcaaattgtagcgaattatattatcccctcttttaaagaaacagtcgttatatgctgatgtttcttaaaataactaaaatgttcctcttaatgtgattttaaatggagttatttgtaggtcctttcttagtagtaaagaatcttctagagggaaacatttgtgcttttagggataatcttccttgtgcctcactacatccctaagtgggtatgactcttgttattaccacatgcttttttagtatatttcacaaatttacttttaaatattattttagatacggtgtaacatgtgcaattcagaataattttataacaggtcatgaaaaacataactttagttaggattcacaatatttgttctccacataatgagagaatgaatgagcctttggagatactgatataaggcaattattttttgcaatgttgaatgtgttttttagtttgattctttttttttcccccaatagggcactacctgccatatcatcttgtattactttttgatgtaaagcgactaatatttacactatgccatattttttttaattatagttgtaaattatgaaagatccttgaattttctacagatctacaactactaatgtaacagacaagggcaatcttggtatttaaatctgagcatggcagttctaccataaaaagtactctatttttctaatttctaggatttttaaaataacatttctgtaagtctgacatactaatagtcactcaagcagtaccatttattttagtttgcatatattttcactgtttttaatttaatgtattgagtctaatagactgttttgcaataattagaataaagatttatttcttctaatcaaagatgcataacagctattatctaggggaccaccaaatgtgatttcaaaattttgttaactattacaaatgtaatccttatatagaaattttaattttgtaaagtagtgtataatattgtaatattaaattcttgttcttaaattcaaatatgtattgatcttcaatgtgctgtgttaaatcttgcttctctgaaaagttggagacaagatttgtcttcctttttacagtttgtaattttcactgttttattcctgttaaaaaaaaaaaaaagtcatttgtaccaccatgcagaccattgtttgatctatgctaacttatcaacttggctattc

SEQ ID NO: 282129 - DNA, 5039 bp, Homo sapiens
taaggtacgaggccgggtgttactagggagagaaagaaacatgcttccgtcaacacctttgaagcctccagttccaaatttgcatgaagacatccagaaactcaactgtaacccagagttatttcgatgcacgctgactagcattcctcagacgcaggccttattgaataaagccaaacttcctttggggctgctgcttcatcctttcaaagacttagtgcaattgcctgtggttacctccagtacaattgtgagatgccgttcatgcaggacgtacatcaatcctttcgtcagctttcttgatcaaaggagatggaagtgtaacttatgttatcgagtcaatgatgttcctgaagaattcttgtacaaccctttgaccagagtttatggagaacctcacagaagaccagaagttcaaaatgctactattgagtttatggctccttcagaatacatgttacgaccacctcagcctccagtgtatctctttgtatttgatgtgtctcacaatgcagtcgaaactggatacttgaattcagtttgccagagtttgttagacaatctggatttgcttcctggcaacactagaacaaaaattggcttcataacatttgacagtacaatccatttctacggtcttcaggaaagtctctctcaacctcagatgctaatagtttcagatattgaagatgtttttatacctatgccagagaacttattagtaaacttaaatgaaagtaaagagctcgtgcaagatttactgaaaactttgccacaaatgtttaccaagactctggagacccagagtgccttgggtcctgcactgcaggctgcctttaagctgatgtctccaactggtggtcgaatgtctgtctttcaaacacaactcccaactcttggagtgggagccctgaaaccacgagaggaaccaaaccacaggtcatctgctaaggatatacacatgacaccatccactgacttctataagaaattagccttggactgttctggtcagcaagttgctgttgacttattccttctcagtggacagtattctgatttggcttctctgggttgtatttctcggtattcagcaggtagtgtctattactatccctcttaccatcatcagcacaacccagtccaagtacagaaattacagaaggaactacagagataccttactcggaagattggctttgaggcagtcatgaggattcggtgcaccaaaggtctttccattcatactttccatggaaacttctttgttaggtcaaccgacttactgtctttgcctaacgtcaacccagacgctgggtatgcagtacagatgtcagtggaagagagtcttactgacactcagttggtttcttttcagtcagcactcttgtatacatccagcaaaggcgaaagaagaattcgtgttcatactttgtgtttgccagtagtttcgactctgaatgatgtctttcttggagctgatgttcaagcaatttcagggttattggccaatatggctgttgacagatctatgactgccagtctgagtgacgctcgggatgctctagtgaatgcagtcattgactccctttcagcttaccgttcttcagtcttaagtaaccagcagcctggactcatggttcctttttctttgcggcttttcccactttttgtgttggctctccttaaacagaaatcattccagactgggacaaatgcacgtctagatgaacgcatttttgctatgtgtcaagtgaaaaaccagcccttggtttaccttatgctcacaactcatcccagtttgtatagagttgacaatctctcagatgagggagcactcaacatcagtgatagaaccatacctcagccccccattcttcagctttcagtggagaagctgagcagagatggagctttcctcatggatgcaggctctgtactgatgctttgggttggaaaaaattgtacacagaattttctcagccaagttctaggagttcaaaactatgcatcaattccacagcctatgacagaccttccagaacttgatacaccagaatctgccagaataatagctttcatctcttggcttagagagcagagaccatttttcccaatactttatgtaataagggatgagagtccaatgaaagcaaacttccttcaaaacatgatagaagacagaacagaatctgcattatcatattatgaattcctgttgcatatacagcaacaagtgaataaatgaatgaatgaagaaatttgacttatttttaaggaatgtcacgatagtgcagaatacctggaaatgtgtaataccttctttttctattatgtttgtggactaatgtgatgattgagatgttctcactgtgatttcaacaacctatagcaaataaaagaccacagcagagaatcaaacatgcaactctgaaatactgtatttttcaaatcagaatatagctacgtatgattggatacttttttcttgccaattatgtttgagttgttatggattaaaataagaatattgcagaggcaaagtacattttgtaaaataaagatttctgtgttctacatgtatatttctcatttttaatttttctgaatctttggctgctacatttaaaacctcacaaacctaagtgttgcagggaagttacaaattgattggtagtgatgtttttaaaataaaaacaatggaaagtaaatataatgtaggaaaactagaattcattccccacacgtgtcttttttttttctttgttaagggaaaggatcatgttgactaaaactaaactaattctagtatagcttgagaaaaatatgaagaaacacattcaagctttaaaatctgtcagtattctttatgcttgaagaacaaagtcactttgatttgaagtgagaactatcattaggtggttttctgatttcctgatgaagagttggacatactgtcttaatctatagtgaaaagaatttgagctgtcttcataaacactgggactagcaatgataatagggagataagaaactttaattatcttgatcctttaagtggattttatttggtgcatttctgctctgggtatataataaaagtgggggtttttggtgaaatgagtgaagaaatgaaaggtttctaaagtgctatccaaatacatcagtaacatttttctaaggagtttaattgttaaattggaagtcattcataagaaatatttatgcttgaatatgaaaatctatgaaagcataaatgctgctgtttgatttggtggatattaagattatacacatccaacatattaaagttatgaaagaaacttgacttctgaaaatccttaagagactgctttcttgattcagctagagaaatattatagtcaaaactattgagtgaattttgtttacaaataggtaaattatacatttgtatatttaaagtgctgtgacatagtatctttaagagtttggctcagttttcacagattcattttgtcttaagaatttcttaaatatgttcatgtataatacttgatcaaaatatttttgggttttttgttttgttttaatgggttagaaaatgtttacaatcttggtcttatatgatcaccaatggaatagtaacttccaggtttatatcaatatgagctgactttaactgagttgtttgggatagggaagaagcagtccctctacagtatacaactactgcttgccagctggatcaaaataatcatgttttatgaaaatatctcccttaagcagtgttaaggttggtttgcagtgtgtaagtggcacattgaactggaagttttcttgaaagctgcttcatctattaagaagcaattttcaaattgtagcgaattatattatcccctcttttaaagaaacagtcgttatatgctgatgtttcttaaaataactaaaatgttcctcttaatgtgattttaaatggagttatttgtaggtcctttcttagtagtaaagaatcttctagagggaaacatttgtgcttttagggataatcttccttgtgcctcactacatccctaagtgggtatgactcttgttattaccacatgcttttttagtatatttcacaaatttacttttaaatattattttagatacggtgtaacatgtgcaattcagaataattttataacaggtcatgaaaaacataactttagttaggattcacaatatttgttctccacataatgagagaatgaatgagcctttggagatactgatataaggcaattattttttgcaatgttgaatgtgttttttagtttgattctttttttttcccccaatagggcactacctgccatatcatcttgtattactttttgatgtaaagcgactaatatttacactatgccatattttttttaattatagttgtaaattatgaaagatccttgaattttctacagatctacaactactaatgtaacagacaagggcaatcttggtatttaaatctgagcatggcagttctaccataaaaagtactctatttttctaatttctaggatttttaaaataacatttctgtaagtctgacatactaatagtcactcaagcagtaccatttattttagtttgcatatattttcactgtttttaatttaatgtattgagtctaatagactgttttgcaataattagaataaagatttatttcttctaatcaaagatgcataacagctattatctaggggaccaccaaatgtgatttcaaaattttgttaactattacaaatgtaatccttatatagaaattttaattttgtaaagtagtgtataatattgtaatattaaattcttgttcttaaattcaaatatgtattgatcttcaatgtgctgtgttaaatcttgcttctctgaaaagttggagacaagatttgtcttcctttttacagtttgtaattttcactgttttattcctgttaaaaaaaaaaaaaagtcatttgtaccaccatgcagaccattgtttgatctatgctaacttatcaacttggctattc

SEQ ID NO: 282130 - DNA, 3666 bp, Homo sapiens
tcgataagggccatagggatatttttcttgtctaattggtttctgggaaagcttcattcaagtcctcaatggtcatctgatcaaatggaattaagttcttcatcttctccactcgataaggccaagggttattggccaatatggctgttgacagatctatgactgccagtctgagtgacgctcgggatgctctagtgaatgcagtcattgactccctttcagcttaccgttcttcagtcttaagtaaccagcagcctggactcatggttcctttttctttgcggcttttcccactttttgtgttggctctccttaaacagaaatcattccagactgggacaaatgcacgtctagatgaacgcatttttgctatgtgtcaagtgaaaaaccagcccttggtttaccttatgctcacaactcatcccagtttgtatagagttgacaatctctcagatgagggagcactcaacatcagtgatagaaccatacctcagccccccattcttcagctttcagtggagaagctgagcagagatggagctttcctcatggatgcaggctctgtactgatgctttgggttggaaaaaattgtacacagaattttctcagccaagttctaggagttcaaaactatgcatcaattccacagcctatgacagaccttccagaacttgatacaccagaatctgccagaataatagctttcatctcttggcttagagagcagagaccatttttcccaatactttatgtaataagggatgagagtccaatgaaagcaaacttccttcaaaacatgatagaagacagaacagaatctgcattatcatattatgaattcctgttgcatatacagcaacaagtgaataaatgaatgaatgaagaaatttgacttatttttaaggaatgtcacgatagtgcagaatacctggaaatgtgtaataccttctttttctattatgtttgtggactaatgtgatgattgagatgttctcactgtgatttcaacaacctatagcaaataaaagaccacagcagagaatcaaacatgcaactctgaaatactgtatttttcaaatcagaatatagctacgtatgattggatacttttttcttgccaattatgtttgagttgttatggattaaaataagaatattgcagaggcaaagtacattttgtaaaataaagatttctgtgttctacatgtatatttctcatttttaatttttctgaatctttggctgctacatttaaaacctcacaaacctaagtgttgcagggaagttacaaattgattggtagtgatgtttttaaaataaaaacaatggaaagtaaatataatgtaggaaaactagaattcattccccacacgtgtcttttttttttctttgttaagggaaaggatcatgttgactaaaactaaactaattctagtatagcttgagaaaaatatgaagaaacacattcaagctttaaaatctgtcagtattctttatgcttgaagaacaaagtcactttgatttgaagtgagaactatcattaggtggttttctgatttcctgatgaagagttggacatactgtcttaatctatagtgaaaagaatttgagctgtcttcataaacactgggactagcaatgataatagggagataagaaactttaattatcttgatcctttaagtggattttatttggtgcatttctgctctgggtatataataaaagtgggggtttttggtgaaatgagtgaagaaatgaaaggtttctaaagtgctatccaaatacatcagtaacatttttctaaggagtttaattgttaaattggaagtcattcataagaaatatttatgcttgaatatgaaaatctatgaaagcataaatgctgctgtttgatttggtggatattaagattatacacatccaacatattaaagttatgaaagaaacttgacttctgaaaatccttaagagactgctttcttgattcagctagagaaatattatagtcaaaactattgagtgaattttgtttacaaataggtaaattatacatttgtatatttaaagtgctgtgacatagtatctttaagagtttggctcagttttcacagattcattttgtcttaagaatttcttaaatatgttcatgtataatacttgatcaaaatatttttgggttttttgttttgttttaatgggttagaaaatgtttacaatcttggtcttatatgatcaccaatggaatagtaacttccaggtttatatcaatatgagctgactttaactgagttgtttgggatagggaagaagcagtccctctacagtatacaactactgcttgccagctggatcaaaataatcatgttttatgaaaatatctcccttaagcagtgttaaggttggtttgcagtgtgtaagtggcacattgaactggaagttttcttgaaagctgcttcatctattaagaagcaattttcaaattgtagcgaattatattatcccctcttttaaagaaacagtcgttatatgctgatgtttcttaaaataactaaaatgttcctcttaatgtgattttaaatggagttatttgtaggtcctttcttagtagtaaagaatcttctagagggaaacatttgtgcttttagggataatcttccttgtgcctcactacatccctaagtgggtatgactcttgttattaccacatgcttttttagtatatttcacaaatttacttttaaatattattttagatacggtgtaacatgtgcaattcagaataattttataacaggtcatgaaaaacataactttagttaggattcacaatatttgttctccacataatgagagaatgaatgagcctttggagatactgatataaggcaattattttttgcaatgttgaatgtgttttttagtttgattctttttttttcccccaatagggcactacctgccatatcatcttgtattactttttgatgtaaagcgactaatatttacactatgccatattttttttaattatagttgtaaattatgaaagatccttgaattttctacagatctacaactactaatgtaacagacaagggcaatcttggtatttaaatctgagcatggcagttctaccataaaaagtactctatttttctaatttctaggatttttaaaataacatttctgtaagtctgacatactaatagtcactcaagcagtaccatttattttagtttgcatatattttcactgtttttaatttaatgtattgagtctaatagactgttttgcaataattagaataaagatttatttcttctaatcaaagatgcataacagctattatctaggggaccaccaaatgtgatttcaaaattttgttaactattacaaatgtaatccttatatagaaattttaattttgtaaagtagtgtataatattgtaatattaaattcttgttcttaaattcaaatatgtattgatcttcaatgtgctgtgttaaatcttgcttctctgaaaagttggagacaagatttgtcttcctttttacagtttgtaattttcactgttttattcctgttaaaaaaaaaaaaaagtcatttgtaccaccatgcagaccattgtttgatctatgctaacttatcaacttggctattc

SEQ ID NO: 282131 - DNA, 5974 bp, Homo sapiens
cctccaggcccagaacggagccgccttggcctcggggtctccctacaccaacggtcctgtccaaaatgcattgctgtcttcacaagagtcagtgagccaaggatacaatttccagcttccaggatcctaccctcatccaataccagcaaagactttgatccagtctctggccagtctaactatggtggttctcagggatctgggcagactcttaatagaccacctgtggcctctaatccagtgacaccttcgcttcatagtggtcctgctccccgaatgccattacctgcttctcagaacccagctactacaccaatgccttctagtagctttcttcctgaagccaacctgccaccacctttgaattggcaatataactatccatccacagcctcacaaacaaaccattgtcctcgtgcatcatcccaaccaactgtatctggaaatacaagtttaaccacaaatcatcaatatgtttcttctggatatccttcacttcaaaatagcttcataaagtcaggtccttctgtacctcccttagtgaatccacctctgcctacaacttttcaaccaggagctcctcatgggccccctccagctggaggcccacccccagtgagggccctcacgcccctgacatcatcatatagagatgtaccccagcccttatttaattcagctgtcaaccaagaaggtattacatcaaataccaataacggatctatggtggtccacagtagttacgacgagattgaaggaggtggcttattggcaacaccacagcttactaacaagaatcccaaaatgagccgaagtgttggatattcatatccctccttaccacctggttatcagaacacaacaccacctggtgcaactggagtaccaccctcttccttgaattacccaagtgggccacaagcctttactcagactcccttaggtgctaatcatttaaccacaagcatgagtggattaagtctacaaccagagggtctaagagttgtcaatcttcttcaagaaagaaacatgcttccgtcaacacctttgaagcctccagttccaaatttgcatgaagacatccagaaactcaactgtaacccagagttatttcgatgcacgctgactagcattcctcagacgcaggccttattgaataaagccaaacttcctttggggctgctgcttcatcctttcaaagacttagtgcaattgcctgtggttacctccagtacaattgtgagatgccgttcatgcaggacgtacatcaatcctttcgtcagctttcttgatcaaaggagatggaagtgtaacttatgttatcgagtcaatgatgttcctgaagaattcttgtacaaccctttgaccagagtttatggagaacctcacagaagaccagaagttcaaaatgctactattgagtttatggctccttcagaatacatgttacgaccacctcagcctccagtgtatctctttgtatttgatgtgtctcacaatgcagtcgaaactggatacttgaattcagtttgccagagtttgttagacaatctggatttgcttcctggcaacactagaacaaaaattggcttcataacatttgacagtacaatccatttctacggtcttcaggaaagtctctctcaacctcagatgctaatagtttcagatattgaagatgtttttatacctatgccagagaacttattagtaaacttaaatgaaagtaaagagctcgtgcaagatttactgaaaactttgccacaaatgtttaccaagactctggagacccagagtgccttgggtcctgcactgcaggctgcctttaagctgatgtctccaactggtggtcgaatgtctgtctttcaaacacaactcccaactcttggagtgggagccctgaaaccacgagaggaaccaaaccacaggtcatctgctaaggatatacacatgacaccatccactgacttctataagaaattagccttggactgttctggtcagcaagttgctgttgacttattccttctcagtggacagtattctgatttggcttctctgggttgtatttctcggtattcagcaggtagtgtctattactatccctcttaccatcatcagcacaacccagtccaagtacagaaattacagaaggaactacagagataccttactcggaagattggctttgaggcagtcatgaggattcggtgcaccaaaggtctttccattcatactttccatggaaacttctttgttaggtcaaccgacttactgtctttgcctaacgtcaacccagacgctgggtatgcagtacagatgtcagtggaagagagtcttactgacactcagttggtttcttttcagtcagcactcttgtatacatccagcaaaggcgaaagaagaattcgtgttcatactttgtgtttgccagtagtttcgactctgaatgatgtctttcttggagctgatgttcaagcaatttcagggttattggccaatatggctgttgacagatctatgactgccagtctgagtgacgctcgggatgctctagtgaatgcagtcattgactccctttcagcttaccgttcttcagtcttaagtaaccagcagcctggactcatggttcctttttctttgcggcttttcccactttttgtgttggctctccttaaacagaaatcattccagactgggacaaatgcacgtctagatgaacgcatttttgctatgtgtcaagtgaaaaaccagcccttggtttaccttatgctcacaactcatcccagtttgtatagagttgacaatctctcagatgagggagcactcaacatcagtgatagaaccatacctcagccccccattcttcagctttcagtggagaagctgagcagagatggagctttcctcatggatgcaggctctgtactgatgctttgggttggaaaaaattgtacacagaattttctcagccaagttctaggagttcaaaactatgcatcaattccacagcctatgacagaccttccagaacttgatacaccagaatctgccagaataatagctttcatctcttggcttagagagcagagaccatttttcccaatactttatgtaataagggatgagagtccaatgaaagcaaacttccttcaaaacatgatagaagacagaacagaatctgcattatcatattatgaattcctgttgcatatacagcaacaagtgaataaatgaatgaatgaagaaatttgacttatttttaaggaatgtcacgatagtgcagaatacctggaaatgtgtaataccttctttttctattatgtttgtggactaatgtgatgattgagatgttctcactgtgatttcaacaacctatagcaaataaaagaccacagcagagaatcaaacatgcaactctgaaatactgtatttttcaaatcagaatatagctacgtatgattggatacttttttcttgccaattatgtttgagttgttatggattaaaataagaatattgcagaggcaaagtacattttgtaaaataaagatttctgtgttctacatgtatatttctcatttttaatttttctgaatctttggctgctacatttaaaacctcacaaacctaagtgttgcagggaagttacaaattgattggtagtgatgtttttaaaataaaaacaatggaaagtaaatataatgtaggaaaactagaattcattccccacacgtgtcttttttttttctttgttaagggaaaggatcatgttgactaaaactaaactaattctagtatagcttgagaaaaatatgaagaaacacattcaagctttaaaatctgtcagtattctttatgcttgaagaacaaagtcactttgatttgaagtgagaactatcattaggtggttttctgatttcctgatgaagagttggacatactgtcttaatctatagtgaaaagaatttgagctgtcttcataaacactgggactagcaatgataatagggagataagaaactttaattatcttgatcctttaagtggattttatttggtgcatttctgctctgggtatataataaaagtgggggtttttggtgaaatgagtgaagaaatgaaaggtttctaaagtgctatccaaatacatcagtaacatttttctaaggagtttaattgttaaattggaagtcattcataagaaatatttatgcttgaatatgaaaatctatgaaagcataaatgctgctgtttgatttggtggatattaagattatacacatccaacatattaaagttatgaaagaaacttgacttctgaaaatccttaagagactgctttcttgattcagctagagaaatattatagtcaaaactattgagtgaattttgtttacaaataggtaaattatacatttgtatatttaaagtgctgtgacatagtatctttaagagtttggctcagttttcacagattcattttgtcttaagaatttcttaaatatgttcatgtataatacttgatcaaaatatttttgggttttttgttttgttttaatgggttagaaaatgtttacaatcttggtcttatatgatcaccaatggaatagtaacttccaggtttatatcaatatgagctgactttaactgagttgtttgggatagggaagaagcagtccctctacagtatacaactactgcttgccagctggatcaaaataatcatgttttatgaaaatatctcccttaagcagtgttaaggttggtttgcagtgtgtaagtggcacattgaactggaagttttcttgaaagctgcttcatctattaagaagcaattttcaaattgtagcgaattatattatcccctcttttaaagaaacagtcgttatatgctgatgtttcttaaaataactaaaatgttcctcttaatgtgattttaaatggagttatttgtaggtcctttcttagtagtaaagaatcttctagagggaaacatttgtgcttttagggataatcttccttgtgcctcactacatccctaagtgggtatgactcttgttattaccacatgcttttttagtatatttcacaaatttacttttaaatattattttagatacggtgtaacatgtgcaattcagaataattttataacaggtcatgatgaatgagcctttggagatactgatataaggcaattattttttgcaatgttgaatgtgttttttagtttgattctttttttttcccccaatagggcactacctgccatatcatcttgtattactttttgatgtaaagcgactaatatttacactatgccatattttttttaattatagttgtaaattatgaaagatccttgaattttctacagatctacaactactaatgtaacagacaagggcaatcttggtatttaaatctgagcatggcagttctaccataaaaagtactctatttttctaatttctaggatttttaaaataacatttctgtaagtctgacatactaatagtcactcaagcagtaccatttattttagtttgcatatattttcactgtttttaatttaatgtattgagtctaatagactgttttgcaataattagaataaagatttatttcttctaatcaaagatgcataacagctattatctaggggaccaccaaatgtgatttcaaaattttgttaactattacaaatgtaatccttatatagaaattttaattttgtaaagtagtgtataatattgtaatattaaattcttgttcttaaattcaaatatgtattgatcttcaatgtgctgtgttaaatcttgcttctctgaaaagttggagacaagatttgtcttcctttttacagtttgtaattttcactgttttattcctgttaaaaaaaaaaaaaagtcatttgtaccaccatgcagaccattgtttgatctatgctaacttatcaacttggctattc

SEQ ID NO: 282132 - DNA, 2782 bp, Homo sapiens
cctccaggcccagaacggagccgccttggcctcggggtctccctacaccaacggtcctgtccaaaatgcattgctgtcttcacaagagtcagtgagccaaggatacaatttccagcttccaggatcctaccctcatccaataccagcaaagactttgatccagtctctggccagtctaactatggtggttctcagggatctgggcagactcttaatagaccacctgtggcctctaatccagtgacaccttcgcttcatagtggtcctgctccccgaatgccattacctgcttctcagaacccagctactacaccaatgccttctagtagctttcttcctgaagccaacctgccaccacctttgaattggcaatataactatccatccacagcctcacaaacaaaccattgtcctcgtgcatcatcccaaccaactgtatctggaaatacaagtttaaccacaaatcatcaatatgtttcttctggatatccttcacttcaaaatagcttcataaagtcaggtccttctgtacctcccttagtgaatccacctctgcctacaacttttcaaccaggagctcctcatgggccccctccagctggaggcccacccccagtgagggccctcacgcccctgacatcatcatatagagatgtaccccagcccttatttaattcagctgtcaaccaagaaggtattacatcaaataccaataacggatctatggtggtccacagtagttacgacgagattgaaggaggtggcttattggcaacaccacagcttactaacaagaatcccaaaatgagccgaagtgttggatattcatatccctccttaccacctggttatcagaacacaacaccacctggtgcaactggagtaccaccctcttccttgaattacccaagtgggccacaagcctttactcagactcccttaggtgctaatcatttaaccacaagcatgagtggattaagtctacaaccagagggtctaagagttgtcaatcttcttcaagaaagaaacatgcttccgtcaacacctttgaagcctccagttccaaatttgcatgaagacatccagaaactcaactgtaacccagagttatttcgatgcacgctgactagcattcctcagacgcaggccttattgaataaagccaaacttcctttggggctgctgcttcatcctttcaaagacttagtgcaattgcctgtggttacctccagtacaattgtgagatgccgttcatgcaggacgtacatcaatcctttcgtcagctttcttgatcaaaggagatggaagtgtaacttatgttatcgagtcaatgatgttcctgaagaattcttgtacaaccctttgaccagagtttatggagaacctcacagaagaccagaagttcaaaatgctactattgagtttatggctccttcagaatacatgttacgaccacctcagcctccagtgtatctctttgtatttgatgtgtctcacaatgcagtcgaaactggatacttgaattcagtttgccagagtttgttagacaatctggatttgcttcctggcaacactagaacaaaaattggcttcataacatttgacagtacaatccatttctacggtcttcaggaaagtctctctcaacctcagatgctaatagtttcagatattgaagatgtttttatacctatgccagagaacttattagtaaacttaaatgaaagtaaagaggtaaggcacattttcctacctgacatgtttaattgaaatattgaaggaatatgtttttgaaatgaactttaagtaaaattttgattatttctgtgacatttctaagatgtgtagcattttatatttgctcttataattagatgaacagctcttgagttcaaccttgagctgatcatttttaagtctaatgaagcaagttatttgtagtagggtagaaaataagcatattccataaaggaggaacacttgaaggaaatctgtcttgtcagccatttgggaagttgggagggttgctgagataaagcttctggtcactacatagaagcacattaggtaggctgctttcagtgccctttgcttttctgattcacagagtgtcattggggtcagttcagaagaaactcttattacctgcctggaaattgccatgagataatacagtgagaggtgaacagaatgtgtctgaaggggggatgttgtctaccctgtacatgcatatatgccgtaggggtaacattttaactagcaagtctatggtctctgctgttggcaatggtgactgtgccatagtgcgaagtatttttttccccattaactctatttgtacaacctaacctgtaaaggtagttgtttttcttttgtagtgatattactagttggcaaagttactggatatcttagatttgcaacagggaagagctaaactcgctttggaacttacaagaataaagtatgtagaggtgatggagaaggccatatttcatggcattaaaatacatcaaatctctaaactgtgatggttcttttggatacattttggacttatagtcttgctggactactgcatgtgcaagaactgtaaggcccaactttgatttgtcttgcttgccaatttataatgttgacttaaaatggctttcttgtcatttgaccaacttcattgtttagtgtctgtagattctctgaccatcatcatgactcaatgtcttgtctattgtatgagatactgacttaatgtgaaataaaattttaattatgacaaatgagt

SEQ ID NO: 282133 - DNA, 2131 bp, Homo sapiens
gcaggcgcggaggtctgacggagacagcgcgtgcgcggcgtcgccgggcttgcgatgaacttccggctgtcaagctcccggccgggctgactcaagcggaggcgcgcggaacagtcgccgaggcgattcccgcccaggctcctgtaaccgccaggcagcggccccgccatgtcccagccccggaccccagagcaggcactggatacaccgggggactgccccccaggcaggagagacgaggacgctggggaggggatccagtgctcccaacgcatgctcagcttcagtgacgccctgctgtccatcatcgccaccgtcatgatcctgcctgtgacccacacggagatctccccagaacagcagttcgacagaagtgtacagaggcttctggcaacacggattgccgtctacctgatgacctttctcatcgtgacagtggcctgggcagcacacacaaggttgttccaagttgttgggaaaacagacgacacacttgccctgctcaacctggcctgcatgatgaccatcaccttcctgccttacacgttttcgttaatggtgaccttccctgatgtgcctctgggcatcttcttgttctgtgtgtgtgtgatcgccatcggggtcgtgcaggcactgattgtggggtacgcattccacttcccgcacctgctgagcccgcagatccagcgctctgcccacagggctctgtaccgacgacacgtcctgggcatcgtcctccaaggcccggccctgtgctttgcagcggccatcttctctctcttctttgtccccttgtcttacctgctgatggtgactgtcatcctcctcccctatgtcagcaaggtcaccggctggtgcagagacaggctcctgggccacagggagccctcggctcacccagtggaagtcttctcgtttgacctccacgagccactcagcaaggagcgcgtggaagccttcagcgacggagtctacgccatcgtggccacgcttctcatcctggacatctgcgaagacaacgtcccggaccccaaggatgtgaaggagaggttcagcggcagcctcgtggccgccctgagtgcgaccgggccgcgcttcctggcgtacttcggctccttcgccacagtgggactgctgtggttcgcccaccactcactcttcctgcatgtgcgcaaggccacgcgggccatggggctgctgaacacgctctcgctggccttcgtgggtggcctcccactagcctaccagcagacctcggccttcgcccggcagccccgcgatgagctggagcgcgtgcgtgtcagctgcaccatcatcttcctggccagcatcttccagctggccatgtggaccacggcgctgctgcaccaggcggagacgctgcagccctcggtgtggtttggcggccgggagcatgtgctcatgttcgccaagctggcgctgtacccctgtgccagcctgctggccttcgcctccacctgcctgctgagcaggttcagtgtgggcatcttccacctcatgcagatcgccgtgccctgcgccttcctgttgctgcgcctgctcgtgggcctggccctggccaccctgcgggtcctgcggggcctcgcccggcccgaacaccccccgccagcccccacgggccaggacgacccacagtcccagctcctccctgccccctgctagcagccacagagcccactcccagccgtcctcaccagagatggaccagggaggacaggatgctgggcaggggaagccaagtcacgggcaggccgcagtggttcttgcgtggcctggttttattttcattgtgaaatatcatgctcttatttcagtcctcaaaaaaaaaaaacaaaaaaaaaaaaaaaaaaaaaaaaaaaaaaaaaaaaaaaaaaaaagaaaaaacagaaacaacaaaaaacaaacaacaacaaagaaacagcgggcgcccgcgcattaaagaatacaccctcgccgggcggagccccacgactcagatacccccacccgcagcatctttatttacagatcagagagcggccaccataaattgggcggcacttctataataaaccaggagacgcgtcgcccctcgcgtctcacccacccgctgtcgagtggaacatccccg

SEQ ID NO: 282134 - DNA, 2545 bp, Homo sapiens
cggctggtacggccggaagtatgggatctcccggccgggctgactcaagcggaggcgcgcggaacagtcgccgaggcgattcccgcccaggctcctgtaaccgccaggcagcggccccgccatgtcccagccccggaccccagagcaggcactggatacaccgggggactgccccccaggcaggagagacgaggacgctggggaggggatccagtgctcccaacgcatgctcagcttcagtgacgccctgctgtccatcatcgccaccgtcatgatcctgcctgtgacccacacggagatctccccagaacaggtaacggggcaggctgtgctctgcgtggtgtggccctgcgaagatatagggtccccgaggctcgacctggcacagggtgctgaccctgcacgcctcgaagcttctgaggcttaggaggcagaggcgggaggcgggggcctccttggaaagggagggagccaacaagtcctgctcagcctgtgctcaccccggcggaggtcctggcctcctgggagggtgggagactgggctcctagggctctgtttccgagttcagtggacaaaggcagcaccctggaagtgagccagaggacaggttggaagaggaaggttccgggcctgccccaaggacagaagtttcctctgcgggagggcagctgccccagcaggcaggccccttacgtagctgctctgagtaaacgcggccagcgccccgtctcagcggggacactcccaccccggctgctcctgcaggcctggagcagttcgacagaagtgtacagaggcttctggcaacacggattgccgtctacctgatgacctttctcatcgtgacagtggcctgggcagcacacacaaggttgttccaagttgttgggaaaacagacgacacacttgccctgctcaacctggcctgcatgatgaccatcaccttcctgccttacacgttttcgttaatggtgaccttccctgatgtgcctctgggcatcttcttgttctgtgtgtgtgtgatcgccatcggggtcgtgcaggcactgattgtggggtacgcattccacttcccgcacctgctgagcccgcagatccagcgctctgcccacagggctctgtaccgacgacacgtcctgggcatcgtcctccaaggcccggccctgtgctttgcagcggccatcttctctctcttctttgtccccttgtcttacctgctgatggtgactgtcatcctcctcccctatgtcagcaaggtcaccggctggtgcagagacaggctcctgggccacagggagccctcggctcacccagtggaagtcttctcgtttgacctccacgagccactcagcaaggagcgcgtggaagccttcagcgacggagtctacgccatcgtggccacgcttctcatcctggacatctgcgaagacaacgtcccggaccccaaggatgtgaaggagaggttcagcggcagcctcgtggccgccctgagtgcgaccgggccgcgcttcctggcgtacttcggctccttcgccacagtgggactgctgtggttcgcccaccactcactcttcctgcatgtgcgcaaggccacgcgggccatggggctgctgaacacgctctcgctggccttcgtgggtggcctcccactagcctaccagcagacctcggccttcgcccggcagccccgcgatgagctggagcgcgtgcgtgtcagctgcaccatcatcttcctggccagcatcttccagctggccatgtggaccacggcgctgctgcaccaggcggagacgctgcagccctcggtgtggtttggcggccgggagcatgtgctcatgttcgccaagctggcgctgtacccctgtgccagcctgctggccttcgcctccacctgcctgctgagcaggttcagtgtgggcatcttccacctcatgcagatcgccgtgccctgcgccttcctgttgctgcgcctgctcgtgggcctggccctggccaccctgcgggtcctgcggggcctcgcccggcccgaacaccccccgccagcccccacgggccaggacgacccacagtcccagctcctccctgccccctgctagcagccacagagcccactcccagccgtcctcaccagagatggaccagggaggacaggatgctgggcaggggaagccaagtcacgggcaggccgcagtggttcttgcgtggcctggttttattttcattgtgaaatatcatgctcttatttcagtcctcaaaaaaaaaaaacaaaaaaaaaaaaaaaaaaaaaaaaaaaaaaaaaaaaaaaaaaaaagaaaaaacagaaacaacaaaaaacaaacaacaacaaagaaacagcgggcgcccgcgcattaaagaatacaccctcgccgggcggagccccacgactcagatacccccacccgcagcatctttatttacagatcagagagcggccaccataaattgggcggcacttctataataaaccaggagacgcgtcgcccctcgcgtctcacccacccgctgtcgagtggaacatccccg

SEQ ID NO: 282135 - DNA, 2336 bp, Homo sapiens
gcaggcgcggaggtctgacggagacagcgcgtgcgcggcgtcgccgggcttgcgatgaacttccggctgtcaagctcccggccgggctgactcaagcggaggcgcgcggaacagtcgccgaggcgattcccgcccaggctcctgtaaccgccaggcagcggccccgccatgtcccagccccggaccccagagcaggcactggatacaccgggggactgccccccaggcaggagagacgaggacgctggggaggggatccagtgctcccaacgcatgctcagcttcagtgacgccctgctgtccatcatcgccaccgtcatgatcctgcctgtgacccacacggagatctccccagaacagtggacaaaggcagcaccctggaagtgagccagaggacaggttggaagaggaaggttccgggcctgccccaaggacagaagtttcctctgcgggagggcagctgccccagcaggcaggccccttacgtagctgctctgagtaaacgcggccagcgccccgtctcagcggggacactcccaccccggctgctcctgcaggcctggagcagttcgacagaagtgtacagaggcttctggcaacacggattgccgtctacctgatgacctttctcatcgtgacagtggcctgggcagcacacacaaggttgttccaagttgttgggaaaacagacgacacacttgccctgctcaacctggcctgcatgatgaccatcaccttcctgccttacacgttttcgttaatggtgaccttccctgatgtgcctctgggcatcttcttgttctgtgtgtgtgtgatcgccatcggggtcgtgcaggcactgattgtggggtacgcattccacttcccgcacctgctgagcccgcagatccagcgctctgcccacagggctctgtaccgacgacacgtcctgggcatcgtcctccaaggcccggccctgtgctttgcagcggccatcttctctctcttctttgtccccttgtcttacctgctgatggtgactgtcatcctcctcccctatgtcagcaaggtcaccggctggtgcagagacaggctcctgggccacagggagccctcggctcacccagtggaagtcttctcgtttgacctccacgagccactcagcaaggagcgcgtggaagccttcagcgacggagtctacgccatcgtggccacgcttctcatcctggacatctgcgaagacaacgtcccggaccccaaggatgtgaaggagaggttcagcggcagcctcgtggccgccctgagtgcgaccgggccgcgcttcctggcgtacttcggctccttcgccacagtgggactgctgtggttcgcccaccactcactcttcctgcatgtgcgcaaggccacgcgggccatggggctgctgaacacgctctcgctggccttcgtgggtggcctcccactagcctaccagcagacctcggccttcgcccggcagccccgcgatgagctggagcgcgtgcgtgtcagctgcaccatcatcttcctggccagcatcttccagctggccatgtggaccacggcgctgctgcaccaggcggagacgctgcagccctcggtgtggtttggcggccgggagcatgtgctcatgttcgccaagctggcgctgtacccctgtgccagcctgctggccttcgcctccacctgcctgctgagcaggttcagtgtgggcatcttccacctcatgcagatcgccgtgccctgcgccttcctgttgctgcgcctgctcgtgggcctggccctggccaccctgcgggtcctgcggggcctcgcccggcccgaacaccccccgccagcccccacgggccaggacgacccacagtcccagctcctccctgccccctgctagcagccacagagcccactcccagccgtcctcaccagagatggaccagggaggacaggatgctgggcaggggaagccaagtcacgggcaggccgcagtggttcttgcgtggcctggttttattttcattgtgaaatatcatgctcttatttcagtcctcaaaaaaaaaaaacaaaaaaaaaaaaaaaaaaaaaaaaaaaaaaaaaaaaaaaaaaaaagaaaaaacagaaacaacaaaaaacaaacaacaacaaagaaacagcgggcgcccgcgcattaaagaatacaccctcgccgggcggagccccacgactcagatacccccacccgcagcatctttatttacagatcagagagcggccaccataaattgggcggcacttctataataaaccaggagacgcgtcgcccctcgcgtctcacccacccgctgtcgagtggaacatccccg

SEQ ID NO: 282136 - DNA, 2771 bp, Homo sapiens
gcaggcgcggaggtctgacggagacagcgcgtgcgcggcgtcgccgggcttgcgatgaacttccggctgtcaagctcccggccgggctgactcaagcggaggcgcgcggaacagtcgccgaggcgattcccgcccaggctcctgtaaccgccaggcagcggccccgccatgtcccagccccggaccccagagcaggcactggatacaccgggggactgccccccaggcaggagagacgaggacgctggggaggggatccagtgctcccaacgcatgctcagcttcagtgacgccctgctgtccatcatcgccaccgtcatggtctgtacggggcccctgcttaggcctgccccaccccgagcctctcgaggcactgcccagcccacctcagacctgtctaggtcttgccagcatctgccctcgagtccccagtactgccacacccaatccaacaagcgtctcttgctctcctgcttccttctgtctctttgccccctcagatcctgcctgtgacccacacggagatctccccagaacaggtaacggggcaggctgtgctctgcgtggtgtggccctgcgaagatatagggtccccgaggctcgacctggcacagggtgctgaccctgcacgcctcgaagcttctgaggcttaggaggcagaggcgggaggcgggggcctccttggaaagggagggagccaacaagtcctgctcagcctgtgctcaccccggcggaggtcctggcctcctgggagggtgggagactgggctcctagggctctgtttccgagttcagtggacaaaggcagcaccctggaagtgagccagaggacaggttggaagaggaaggttccgggcctgccccaaggacagaagtttcctctgcgggagggcagctgccccagcaggcaggccccttacgtagctgctctgagtaaacgcggccagcgccccgtctcagcggggacactcccaccccggctgctcctgcaggcctggagcagttcgacagaagtgtacagaggcttctggcaacacggattgccgtctacctgatgacctttctcatcgtgacagtggcctgggcagcacacacaaggttgttccaagttgttgggaaaacagacgacacacttgccctgctcaacctggcctgcatgatgaccatcaccttcctgccttacacgttttcgttaatggtgaccttccctgatgtgcctctgggcatcttcttgttctgtgtgtgtgtgatcgccatcggggtcgtgcaggcactgattgtggggtacgcattccacttcccgcacctgctgagcccgcagatccagcgctctgcccacagggctctgtaccgacgacacgtcctgggcatcgtcctccaaggcccggccctgtgctttgcagcggccatcttctctctcttctttgtccccttgtcttacctgctgatggtgactgtcatcctcctcccctatgtcagcaaggtcaccggctggtgcagagacaggctcctgggccacagggagccctcggctcacccagtggaagtcttctcgtttgacctccacgagccactcagcaaggagcgcgtggaagccttcagcgacggagtctacgccatcgtggccacgcttctcatcctggacatctgcgaagacaacgtcccggaccccaaggatgtgaaggagaggttcagcggcagcctcgtggccgccctgagtgcgaccgggccgcgcttcctggcgtacttcggctccttcgccacagtgggactgctgtggttcgcccaccactcactcttcctgcatgtgcgcaaggccacgcgggccatggggctgctgaacacgctctcgctggccttcgtgggtggcctcccactagcctaccagcagacctcggccttcgcccggcagccccgcgatgagctggagcgcgtgcgtgtcagctgcaccatcatcttcctggccagcatcttccagctggccatgtggaccacggcgctgctgcaccaggcggagacgctgcagccctcggtgtggtttggcggccgggagcatgtgctcatgttcgccaagctggcgctgtacccctgtgccagcctgctggccttcgcctccacctgcctgctgagcaggttcagtgtgggcatcttccacctcatgcagatcgccgtgccctgcgccttcctgttgctgcgcctgctcgtgggcctggccctggccaccctgcgggtcctgcggggcctcgcccggcccgaacaccccccgccagcccccacgggccaggacgacccacagtcccagctcctccctgccccctgctagcagccacagagcccactcccagccgtcctcaccagagatggaccagggaggacaggatgctgggcaggggaagccaagtcacgggcaggccgcagtggttcttgcgtggcctggttttattttcattgtgaaatatcatgctcttatttcagtcctcaaaaaaaaaaaacaaaaaaaaaaaaaaaaaaaaaaaaaaaaaaaaaaaaaaaaaaaaagaaaaaacagaaacaacaaaaaacaaacaacaacaaagaaacagcgggcgcccgcgcattaaagaatacaccctcgccgggcggagccccacgactcagatacccccacccgcagcatctttatttacagatcagagagcggccaccataaattgggcggcacttctataataaaccaggagacgcgtcgcccctcgcgtctcacccacccgctgtcgagtggaacatccccg

SEQ ID NO: 282137 - DNA, 2212 bp, Homo sapiens
cggctggtacggccggaagtatgggatctcccggccgggctgactcaagcggaggcgcgcggaacagtcgccgaggcgattcccgcccagctcccctgccctgagacagcctccggtgcttctgctgtgtcccaggaaacaagcctgaagcaagcactcaccatccctcaagaatgtgccctgacctaccttcctcaccacggtggcatcagggccaggctcctgtaaccgccaggcagcggccccgccatgtcccagccccggaccccagagcaggcactggatacaccgggggactgccccccaggcaggagagacgaggacgctggggaggggatccagtgctcccaacgcatgctcagcttcagtgacgccctgctgtccatcatcgccaccgtcatgatcctgcctgtgacccacacggagatctccccagaacagcagttcgacagaagtgtacagaggcttctggcaacacggattgccgtctacctgatgacctttctcatcgtgacagtggcctgggcagcacacacaaggttgttccaagttgttgggaaaacagacgacacacttgccctgctcaacctggcctgcatgatgaccatcaccttcctgccttacacgttttcgttaatggtgaccttccctgatgtgcctctgggcatcttcttgttctgtgtgtgtgtgatcgccatcggggtcgtgcaggcactgattgtggggtacgcattccacttcccgcacctgctgagcccgcagatccagcgctctgcccacagggctctgtaccgacgacacgtcctgggcatcgtcctccaaggcccggccctgtgctttgcagcggccatcttctctctcttctttgtccccttgtcttacctgctgatggtgactgtcatcctcctcccctatgtcagcaaggtcaccggctggtgcagagacaggctcctgggccacagggagccctcggctcacccagtggaagtcttctcgtttgacctccacgagccactcagcaaggagcgcgtggaagccttcagcgacggagtctacgccatcgtggccacgcttctcatcctggacatctgcgaagacaacgtcccggaccccaaggatgtgaaggagaggttcagcggcagcctcgtggccgccctgagtgcgaccgggccgcgcttcctggcgtacttcggctccttcgccacagtgggactgctgtggttcgcccaccactcactcttcctgcatgtgcgcaaggccacgcgggccatggggctgctgaacacgctctcgctggccttcgtgggtggcctcccactagcctaccagcagacctcggccttcgcccggcagccccgcgatgagctggagcgcgtgcgtgtcagctgcaccatcatcttcctggccagcatcttccagctggccatgtggaccacggcgctgctgcaccaggcggagacgctgcagccctcggtgtggtttggcggccgggagcatgtgctcatgttcgccaagctggcgctgtacccctgtgccagcctgctggccttcgcctccacctgcctgctgagcaggttcagtgtgggcatcttccacctcatgcagatcgccgtgccctgcgccttcctgttgctgcgcctgctcgtgggcctggccctggccaccctgcgggtcctgcggggcctcgcccggcccgaacaccccccgccagcccccacgggccaggacgacccacagtcccagctcctccctgccccctgctagcagccacagagcccactcccagccgtcctcaccagagatggaccagggaggacaggatgctgggcaggggaagccaagtcacgggcaggccgcagtggttcttgcgtggcctggttttattttcattgtgaaatatcatgctcttatttcagtcctcaaaaaaaaaaaacaaaaaaaaaaaaaaaaaaaaaaaaaaaaaaaaaaaaaaaaaaaaagaaaaaacagaaacaacaaaaaacaaacaacaacaaagaaacagcgggcgcccgcgcattaaagaatacaccctcgccgggcggagccccacgactcagatacccccacccgcagcatctttatttacagatcagagagcggccaccataaattgggcggcacttctataataaaccaggagacgcgtcgcccctcgcgtctcacccacccgctgtcgagtggaacatccccg

SEQ ID NO: 282138 - DNA, 2092 bp, Homo sapiens
gcaggcgcggaggtctgacggagacagcgcgtgcgcggcgtcgccgggcttgcgatgaacttccggctgtcaagctcccggccgggctgactcaagcggaggcgcgcggaacagtcgccgaggcgattcccgcccaggctcctgtaaccgccaggcagcggccccgccatgtcccagccccggaccccagagcaggcactggatacaccgggggactgccccccaggcaggagagacgaggacgctggggaggggatccagtgctcccaacgcatgctcagcttcagtgacgccctgctgtccatcatcgccaccgtcatgcagttcgacagaagtgtacagaggcttctggcaacacggattgccgtctacctgatgacctttctcatcgtgacagtggcctgggcagcacacacaaggttgttccaagttgttgggaaaacagacgacacacttgccctgctcaacctggcctgcatgatgaccatcaccttcctgccttacacgttttcgttaatggtgaccttccctgatgtgcctctgggcatcttcttgttctgtgtgtgtgtgatcgccatcggggtcgtgcaggcactgattgtggggtacgcattccacttcccgcacctgctgagcccgcagatccagcgctctgcccacagggctctgtaccgacgacacgtcctgggcatcgtcctccaaggcccggccctgtgctttgcagcggccatcttctctctcttctttgtccccttgtcttacctgctgatggtgactgtcatcctcctcccctatgtcagcaaggtcaccggctggtgcagagacaggctcctgggccacagggagccctcggctcacccagtggaagtcttctcgtttgacctccacgagccactcagcaaggagcgcgtggaagccttcagcgacggagtctacgccatcgtggccacgcttctcatcctggacatctgcgaagacaacgtcccggaccccaaggatgtgaaggagaggttcagcggcagcctcgtggccgccctgagtgcgaccgggccgcgcttcctggcgtacttcggctccttcgccacagtgggactgctgtggttcgcccaccactcactcttcctgcatgtgcgcaaggccacgcgggccatggggctgctgaacacgctctcgctggccttcgtgggtggcctcccactagcctaccagcagacctcggccttcgcccggcagccccgcgatgagctggagcgcgtgcgtgtcagctgcaccatcatcttcctggccagcatcttccagctggccatgtggaccacggcgctgctgcaccaggcggagacgctgcagccctcggtgtggtttggcggccgggagcatgtgctcatgttcgccaagctggcgctgtacccctgtgccagcctgctggccttcgcctccacctgcctgctgagcaggttcagtgtgggcatcttccacctcatgcagatcgccgtgccctgcgccttcctgttgctgcgcctgctcgtgggcctggccctggccaccctgcgggtcctgcggggcctcgcccggcccgaacaccccccgccagcccccacgggccaggacgacccacagtcccagctcctccctgccccctgctagcagccacagagcccactcccagccgtcctcaccagagatggaccagggaggacaggatgctgggcaggggaagccaagtcacgggcaggccgcagtggttcttgcgtggcctggttttattttcattgtgaaatatcatgctcttatttcagtcctcaaaaaaaaaaaacaaaaaaaaaaaaaaaaaaaaaaaaaaaaaaaaaaaaaaaaaaaaagaaaaaacagaaacaacaaaaaacaaacaacaacaaagaaacagcgggcgcccgcgcattaaagaatacaccctcgccgggcggagccccacgactcagatacccccacccgcagcatctttatttacagatcagagagcggccaccataaattgggcggcacttctataataaaccaggagacgcgtcgcccctcgcgtctcacccacccgctgtcgagtggaacatccccg

SEQ ID NO: 282139 - DNA, 2279 bp, Homo sapiens
cggctggtacggccggaagtatgggatctcccggccgggctgactcaagcggaggcgcgcggaacagtcgccgaggcgattcccgcccaggctcctgtaaccgccaggcagcggccccgccatgtcccagccccggaccccagagcaggcactggatacaccgggggactgccccccaggcaggagagacgaggacgctggggaggggatccagtgctcccaacgcatgctcagcttcagtgacgccctgctgtccatcatcgccaccgtcatgatcctgcctgtgacccacacggagatctccccagaacaggtaacggggcaggctgtgctctgcgtggtgtggccctgcgaagatatagggtccccgaggctcgacctggcacagggtgctgaccctgcacgcctcgaagcttctgaggcttaggaggcagaggcgggaggcgggggcctccttggaaagggagggagccaacaagtcctgctcagcctgtgctcaccccggcggaggtcctggcctcctgggagggtgggagactgggctcctagggctctgtttccgagttcagtggacaaaggcagcaccctggaagtgagccagaggacaggttggaagaggaaggttccgggcctgccccaaggacagaagtttcctctgcgggagggcagctgccccagcaggcaggccccttacttttcgttaatggtgaccttccctgatgtgcctctgggcatcttcttgttctgtgtgtgtgtgatcgccatcggggtcgtgcaggcactgattgtggggtacgcattccacttcccgcacctgctgagcccgcagatccagcgctctgcccacagggctctgtaccgacgacacgtcctgggcatcgtcctccaaggcccggccctgtgctttgcagcggccatcttctctctcttctttgtccccttgtcttacctgctgatggtgactgtcatcctcctcccctatgtcagcaaggtcaccggctggtgcagagacaggctcctgggccacagggagccctcggctcacccagtggaagtcttctcgtttgacctccacgagccactcagcaaggagcgcgtggaagccttcagcgacggagtctacgccatcgtggccacgcttctcatcctggacatctgcgaagacaacgtcccggaccccaaggatgtgaaggagaggttcagcggcagcctcgtggccgccctgagtgcgaccgggccgcgcttcctggcgtacttcggctccttcgccacagtgggactgctgtggttcgcccaccactcactcttcctgcatgtgcgcaaggccacgcgggccatggggctgctgaacacgctctcgctggccttcgtgggtggcctcccactagcctaccagcagacctcggccttcgcccggcagccccgcgatgagctggagcgcgtgcgtgtcagctgcaccatcatcttcctggccagcatcttccagctggccatgtggaccacggcgctgctgcaccaggcggagacgctgcagccctcggtgtggtttggcggccgggagcatgtgctcatgttcgccaagctggcgctgtacccctgtgccagcctgctggccttcgcctccacctgcctgctgagcaggttcagtgtgggcatcttccacctcatgcagatcgccgtgccctgcgccttcctgttgctgcgcctgctcgtgggcctggccctggccaccctgcgggtcctgcggggcctcgcccggcccgaacaccccccgccagcccccacgggccaggacgacccacagtcccagctcctccctgccccctgctagcagccacagagcccactcccagccgtcctcaccagagatggaccagggaggacaggatgctgggcaggggaagccaagtcacgggcaggccgcagtggttcttgcgtggcctggttttattttcattgtgaaatatcatgctcttatttcagtcctcaaaaaaaaaaaacaaaaaaaaaaaaaaaaaaaaaaaaaaaaaaaaaaaaaaaaaaaaagaaaaaacagaaacaacaaaaaacaaacaacaacaaagaaacagcgggcgcccgcgcattaaagaatacaccctcgccgggcggagccccacgactcagatacccccacccgcagcatctttatttacagatcagagagcggccaccataaattgggcggcacttctataataaaccaggagacgcgtcgcccctcgcgtctcacccacccgctgtcgagtggaacatccccg

SEQ ID NO: 282140 - DNA, 1896 bp, Homo sapiens
cggctggtacggccggaagtatgggatctcccggccgggctgactcaagcggaggcgcgcggaacagtcgccgaggcgattcccgcccagcagttcgacagaagtgtacagaggcttctggcaacacggattgccgtctacctgatgacctttctcatcgtgacagtggcctgggcagcacacacaaggttgttccaagttgttgggaaaacagacgacacacttgccctgctcaacctggccgcatcatggctgtgatgccctccctccctccagcctgcatgatgaccatcaccttcctgccttacacgttttcgttaatggtgaccttccctgatgtgcctctgggcatcttcttgttctgtgtgtgtgtgatcgccatcggggtcgtgcaggcactgattgtggggtacgcattccacttcccgcacctgctgagcccgcagatccagcgctctgcccacagggctctgtaccgacgacacgtcctgggcatcgtcctccaaggcccggccctgtgctttgcagcggccatcttctctctcttctttgtccccttgtcttacctgctgatggtgactgtcatcctcctcccctatgtcagcaaggtcaccggctggtgcagagacaggctcctgggccacagggagccctcggctcacccagtggaagtcttctcgtttgacctccacgagccactcagcaaggagcgcgtggaagccttcagcgacggagtctacgccatcgtggccacgcttctcatcctggacatctgcgaagacaacgtcccggaccccaaggatgtgaaggagaggttcagcggcagcctcgtggccgccctgagtgcgaccgggccgcgcttcctggcgtacttcggctccttcgccacagtgggactgctgtggttcgcccaccactcactcttcctgcatgtgcgcaaggccacgcgggccatggggctgctgaacacgctctcgctggccttcgtgggtggcctcccactagcctaccagcagacctcggccttcgcccggcagccccgcgatgagctggagcgcgtgcgtgtcagctgcaccatcatcttcctggccagcatcttccagctggccatgtggaccacggcgctgctgcaccaggcggagacgctgcagccctcggtgtggtttggcggccgggagcatgtgctcatgttcgccaagctggcgctgtacccctgtgccagcctgctggccttcgcctccacctgcctgctgagcaggttcagtgtgggcatcttccacctcatgcagatcgccgtgccctgcgccttcctgttgctgcgcctgctcgtgggcctggccctggccaccctgcgggtcctgcggggcctcgcccggcccgaacaccccccgccagcccccacgggccaggacgacccacagtcccagctcctccctgccccctgctagcagccacagagcccactcccagccgtcctcaccagagatggaccagggaggacaggatgctgggcaggggaagccaagtcacgggcaggccgcagtggttcttgcgtggcctggttttattttcattgtgaaatatcatgctcttatttcagtcctcaaaaaaaaaaaacaaaaaaaaaaaaaaaaaaaaaaaaaaaaaaaaaaaaaaaaaaaaagaaaaaacagaaacaacaaaaaacaaacaacaacaaagaaacagcgggcgcccgcgcattaaagaatacaccctcgccgggcggagccccacgactcagatacccccacccgcagcatctttatttacagatcagagagcggccaccataaattgggcggcacttctataataaaccaggagacgcgtcgcccctcgcgtctcacccacccgctgtcgagtggaacatccccg

SEQ ID NO: 282141 - DNA, 2002 bp, Homo sapiens
gcaggcgcggaggtctgacggagacagcgcgtgcgcggcgtcgccgggcttgcgatgaacttccggctgtcaagctcccggccgggctgactcaagcggaggcgcgcggaacagtcgccgaggcgattcccgcccaggctcctgtaaccgccaggcagcggccccgccatgtcccagccccggaccccagagcaggcactggatacaccgggggactgccccccaggcaggagagacgaggacgctggggaggggatccagtgctcccaacgcatgctcagcttcagtgacgccctgctgtccatcatcgccaccgtcatgatcctgcctgtgacccacacggagatctccccagaacagcagttcgacagaagtgtacagaggcttctggcaacacggattgccgtctacctgatgacctttctcatcgtgacagtggcctgggcagcacacacaaggttgttccaagttgttgggaaaacagacgacacacttgccctgctcaacctggcctgcatgatgaccatcaccttcctgccttacacgttttcgttaatggtgaccttccctgatgtgcctctgggcatcttcttgttctgtgtgtgtgtgatcgccatcggggtcgtgcaggcactgattgtggggtacgcattccacttcccgcacctgctgagcccgcagatccagcgctctgcccacagggctctgtaccgacgacacgtcctgggcatcgtcctccaaggcccggccctgtgctttgcagcggccatcttctctctcttctttgtccccttgtcttacctgctgatggtgactgtcatcctcctcccctatgtcagcaaggtcaccggctggtgcagagacaggctcctgggccacagggagccctcggctcacccagtggaagtcttctcgtttgacctccacgagccactcagcaaggagcgcgtggaagccttcagcgacggagtctacgccatcgtggccacgcttctcatcctggacatctgcgaagacaacgtcccggaccccaaggatgtgaaggagaggttcagcggcagcctcgtggccgccctgagtgcgaccgggccgcgcttcctggcgtacttcggctccttcgccacagtgggactgctgtggttcgcccaccactcactcttcctgcatgtgcgcaaggccacgcgggccatggggctgctgaacacgctctcgctggccttcgtgggtggcctcccactagcctaccagcagacctcggccttcgcccggcagccccgcgatgagctggagcgcgtgcgtgtcagctgcaccatcatcttcctggccagcatcttccagctggccatgtggaccacggcgctgctgcaccaggcggagacgctgcagccctcggtgtggtttggcggccgggagcatgtgctcatgttcgccaagctggcgctgtacccctgtgccagcctgctggccttcgcctccacctgcctgctgagcaggttcagtgtgggcatcttccacctcatgcagatcgccgtgccctgcgccttcctgttgtagcagccacagagcccactcccagccgtcctcaccagagatggaccagggaggacaggatgctgggcaggggaagccaagtcacgggcaggccgcagtggttcttgcgtggcctggttttattttcattgtgaaatatcatgctcttatttcagtcctcaaaaaaaaaaaacaaaaaaaaaaaaaaaaaaaaaaaaaaaaaaaaaaaaaaaaaaaaagaaaaaacagaaacaacaaaaaacaaacaacaacaaagaaacagcgggcgcccgcgcattaaagaatacaccctcgccgggcggagccccacgactcagatacccccacccgcagcatctttatttacagatcagagagcggccaccataaattgggcggcacttctataataaaccaggagacgcgtcgcccctcgcgtctcacccacccgctgtcgagtggaacatccccg

SEQ ID NO: 282142 - DNA, 1107 bp, Homo sapiens
gcaggcgcggaggtctgacggagacagcgcgtgcgcggcgtcgccgggcttgcgatgaacttccggctgtcaagctcccggccgggctgactcaagcggaggcgcgcggaacagtcgccgaggcgattcccgcccaggctcctgtaaccgccaggcagcggccccgccatgtcccagccccggaccccagagcaggcactggatacaccgggggactgccccccaggcaggagagacgaggacgctggggaggggatccagtgctcccaacgcatgctcagcttcagtgacgccctgctgtccatcatcgccaccgtcatgatcctgcctgtgacccacacggagatctccccagaacagcagttcgacagaagtgtacagaggcttctggcaacacggattgccgtctacctgatgacctttctcatcgtgacagtggcctgggcagcacacacaaggttgttccaagttgttgggaaaacagacgacacacttgccctgctcaacctggcctgcatgatgaccatcaccttcctgccttacacgttttcgttaatggtgaccttccctgatgtgcctctgggcatcttcttgttctgtgtgtgtgtgatcgccatcggggtcgtgcaggcactgattgtggggtacgcattccacttcccgcacctgctgagcccgcagatccagcgctctgcccacagggctctgtaccgacgacacgtcctgggcatcgtcctccaaggcccggccctgtgctttgcagcggccatcttctctctcttctttgtccccttgtcttacctgctgatggtgactgtcatcctcctcccctatgtcagcaaggtcaccggctggtgcagagacaggctcctgggccacagggagccctcggctcacccagtggaagtcttctcgtttgacctccacgagccactcagcaaggagcgcgtggaagccttcagcgacggagtctacgccatcgtggccacgcttctcatcctggacatctgcgaagacaacgtcccggaccccaaggatgtgaaggagaggttcagcggcagccggtgaccttgctgacataggggaggagatgcgcgtaaggccaga

SEQ ID NO: 282143 - DNA, 876 bp, Homo sapiens
cggctggtacggccggaagtatgggatctcccggccgggctgactcaagcggaggcgcgcggaacagtcgccgaggcgattcccgcccaggtagttcagcgccccagtccagctcccggctcctgtaaccgccaggcagcggccccgccatgtcccagccccggaccccagagcaggcactggatacaccgggggactgccccccaggcaggagagacgaggacgctggggaggggatccagtgctcccaacgcatgctcagcttcagtgacgccctgctgtccatcatcgccaccgtcatgatcctgcctgtgacccacacggagatctccccagaacagcagttcgacagaagtgtacagaggcttctggcaacacggattgccgtctacctgatgacctttctcatcgtgacagtggcctgggcagcacacacaaggttgttccaagttgttgggaaaacagacgacacacttgccctgctcaacctggcctgcatgatgaccatcaccttcctgccttacacgttttcgttaatggtgaccttccctgatgtgcctctgggcatcttcttgttctgtgtgtgtgtgatcgccatcggggtcgtgcaggcactgattgtggggtacgcattccacttcccgcacctgctgagcccgcagatccagcgctctgcccacagggctctgtaccgacgacacgtcctgggcatcgtcctccaaggcccggccctgtgctttgcagcggccatcttctctctcttctttgtccccttgtcttacctgctgatggtgactgtcatcctcctcccctatgtcagcaaggtcaccggctggtgcagagacaggctcctgggtaggtgatgactgggtgggc

SEQ ID NO: 282144 - DNA, 433 bp, Homo sapiens
ggcaggggaagccaagtcacgggcaggccgcagtggttcttgcgtggcctggttttattttcattgtgaaatatcatgctcttatttcagtcctcaaattgttctccactttttgcggagagaggagtttcacaggaactggaaatgtgctttatggcatttgcctatccactctctccaacctgaagacacgttgccaagctcacctacccgaggggcagcccactcccagcccctttgaggcctatacagagctggtggggtcgggggtgccaagccaggccctcccctcccctcggttgttgacacaaagatgaggaagagatggtaggatagtgacgcccagactgtatttgtcctggatataaattactgttgcattcaggcagcgataaatacagaggggcccggtgtgcagggcacagaccccacc

SEQ ID NO: 282145 - DNA, 1161 bp, Homo sapiens
aacttaggctagtagagactccgtggtgatcggccgagggcgaagacaacgtcccggaccccaaggatgtgaaggagaggttcagcggcagcctcgtggccgccctgagtgcgaccgggccgcgcttcctggcgtacttcggctccttcgccacagtgggactgctgtggttcgcccaccactcactcttcctgcatgtgcgcaaggccacgcgggccatggggctgctgaacacgctctcgctggccttcgtgggtggcctcccactagcctaccagcagacctcggccttcgcccggcagccccgcgatgagctggagcgcgtgcgtgtcagctgcaccatcatcttcctggccagcatcttccagctggccatgtggaccacggcgctgctgcaccaggcggagacgctgcagccctcggtgtggtttggcggccgggagcatgtgctcatgttcgccaagctggcgctgtacccctgtgccagcctgctggccttcgcctccacctgcctgctgagcaggttcagtgtgggcatcttccacctcatgcagatcgccgtgccctgcgccttcctgttgctgcgcctgctcgtgggcctggccctggccaccctgcgggtcctgcggggcctcgcccggcccgaacaccccccgccagcccccacgggccaggacgacccacagtcccagctcctccctgccccctgctagcagccacagagcccactcccagccgtcctcaccagagatggaccagggaggacaggatgctgggcaggggaagccaagtcacgggcaggccgcagtggttcttgcgtggcctggttttattttcattgtgaaatatcatgctcttatttcagtcctcaaaaaaaaaaaacaaaaaaaaaaaaaaaaaaaaaaaaaaaaaaaaaaaaaaaaaaaaagaaaaaacagaaacaacaaaaaacaaacaacaacaaagaaacagcgggcgcccgcgcattaaagaatacaccctcgccgggcggagccccacgactcagatacccccacccgcagcatctttatttacagatcagagagcggccaccataaattgggcggcacttctataataaaccaggagacgcgtcgcccctcgcgtctcacccacccgctgtcgagtggaacatccccg

SEQ ID NO: 282146 - DNA, 2592 bp, Homo sapiens
gcaggcgcggaggtctgacggagacagcgcgtgcgcggcgtcgccgggcttgcgatgaacttccggctgtcaagctcccggccgggctgactcaagcggaggcgcgcggaacagtcgccgaggcgattcccgcccaggctcctgtaaccgccaggcagcggccccgccatgtcccagccccggaccccagagcaggcactggatacaccgggggactgccccccaggcaggagagacgaggacgctggggaggggatccagtgctcccaacgcatgctcagcttcagtgacgccctgctgtccatcatcgccaccgtcatgatcctgcctgtgacccacacggagatctccccagaacaggtaacggggcaggctgtgctctgcgtggtgtggccctgcgaagatatagggtccccgaggctcgacctggcacagggtgctgaccctgcacgcctcgaagcttctgaggcttaggaggcagaggcgggaggcgggggcctccttggaaagggagggagccaacaagtcctgctcagcctgtgctcaccccggcggaggtcctggcctcctgggagggtgggagactgggctcctagggctctgtttccgagttcagtggacaaaggcagcaccctggaagtgagccagaggacaggttggaagaggaaggttccgggcctgccccaaggacagaagtttcctctgcgggagggcagctgccccagcaggcaggccccttacgtagctgctctgagtaaacgcggccagcgccccgtctcagcggggacactcccaccccggctgctcctgcaggcctggagcagttcgacagaagtgtacagaggcttctggcaacacggattgccgtctacctgatgacctttctcatcgtgacagtggcctgggcagcacacacaaggttgttccaagttgttgggaaaacagacgacacacttgccctgctcaacctggcctgcatgatgaccatcaccttcctgccttacacgttttcgttaatggtgaccttccctgatgtgcctctgggcatcttcttgttctgtgtgtgtgtgatcgccatcggggtcgtgcaggcactgattgtggggtacgcattccacttcccgcacctgctgagcccgcagatccagcgctctgcccacagggctctgtaccgacgacacgtcctgggcatcgtcctccaaggcccggccctgtgctttgcagcggccatcttctctctcttctttgtccccttgtcttacctgctgatggtgactgtcatcctcctcccctatgtcagcaaggtcaccggctggtgcagagacaggctcctgggccacagggagccctcggctcacccagtggaagtcttctcgtttgacctccacgagccactcagcaaggagcgcgtggaagccttcagcgacggagtctacgccatcgtggccacgcttctcatcctggacatctgcgaagacaacgtcccggaccccaaggatgtgaaggagaggttcagcggcagcctcgtggccgccctgagtgcgaccgggccgcgcttcctggcgtacttcggctccttcgccacagtgggactgctgtggttcgcccaccactcactcttcctgcatgtgcgcaaggccacgcgggccatggggctgctgaacacgctctcgctggccttcgtgggtggcctcccactagcctaccagcagacctcggccttcgcccggcagccccgcgatgagctggagcgcgtgcgtgtcagctgcaccatcatcttcctggccagcatcttccagctggccatgtggaccacggcgctgctgcaccaggcggagacgctgcagccctcggtgtggtttggcggccgggagcatgtgctcatgttcgccaagctggcgctgtacccctgtgccagcctgctggccttcgcctccacctgcctgctgagcaggttcagtgtgggcatcttccacctcatgcagatcgccgtgccctgcgccttcctgttgctgcgcctgctcgtgggcctggccctggccaccctgcgggtcctgcggggcctcgcccggcccgaacaccccccgccagcccccacgggccaggacgacccacagtcccagctcctccctgccccctgctagcagccacagagcccactcccagccgtcctcaccagagatggaccagggaggacaggatgctgggcaggggaagccaagtcacgggcaggccgcagtggttcttgcgtggcctggttttattttcattgtgaaatatcatgctcttatttcagtcctcaaaaaaaaaaaacaaaaaaaaaaaaaaaaaaaaaaaaaaaaaaaaaaaaaaaaaaaaagaaaaaacagaaacaacaaaaaacaaacaacaacaaagaaacagcgggcgcccgcgcattaaagaatacaccctcgccgggcggagccccacgactcagatacccccacccgcagcatctttatttacagatcagagagcggccaccataaattgggcggcacttctataataaaccaggagacgcgtcgcccctcgcgtctcacccacccgctgtcgagtggaacatccccg

SEQ ID NO: 282147 - DNA, 1908 bp, Homo sapiens
gcaggcgcggaggtctgacggagacagcgcgtgcgcggcgtcgccgggcttgcgatgaacttccggctgtcaagctcccggccgggctgactcaagcggaggcgcgcggaacagtcgccgaggcgattcccgcccagcagttcgacagaagtgtacagaggcttctggcaacacggattgccgtctacctgatgacctttctcatcgtgacagtggcctgggcagcacacacaaggttgttccaagttgttgggaaaacagacgacacacttgccctgctcaacctggcctgcatgatgaccatcaccttcctgccttacacgttttcgttaatggtgaccttccctgatgtgcctctgggcatcttcttgttctgtgtgtgtgtgatcgccatcggggtcgtgcaggcactgattgtggggtacgcattccacttcccgcacctgctgagcccgcagatccagcgctctgcccacagggctctgtaccgacgacacgtcctgggcatcgtcctccaaggcccggccctgtgctttgcagcggccatcttctctctcttctttgtccccttgtcttacctgctgatggtgactgtcatcctcctcccctatgtcagcaaggtcaccggctggtgcagagacaggctcctgggccacagggagccctcggctcacccagtggaagtcttctcgtttgacctccacgagccactcagcaaggagcgcgtggaagccttcagcgacggagtctacgccatcgtggccacgcttctcatcctggacatctgcgaagacaacgtcccggaccccaaggatgtgaaggagaggttcagcggcagcctcgtggccgccctgagtgcgaccgggccgcgcttcctggcgtacttcggctccttcgccacagtgggactgctgtggttcgcccaccactcactcttcctgcatgtgcgcaaggccacgcgggccatggggctgctgaacacgctctcgctggccttcgtgggtggcctcccactagcctaccagcagacctcggccttcgcccggcagccccgcgatgagctggagcgcgtgcgtgtcagctgcaccatcatcttcctggccagcatcttccagctggccatgtggaccacggcgctgctgcaccaggcggagacgctgcagccctcggtgtggtttggcggccgggagcatgtgctcatgttcgccaagctggcgctgtacccctgtgccagcctgctggccttcgcctccacctgcctgctgagcaggttcagtgtgggcatcttccacctcatgcagatcgccgtgccctgcgccttcctgttgctgcgcctgctcgtgggcctggccctggccaccctgcgggtcctgcggggcctcgcccggcccgaacaccccccgccagcccccacgggccaggacgacccacagtcccagctcctccctgccccctgctagcagccacagagcccactcccagccgtcctcaccagagatggaccagggaggacaggatgctgggcaggggaagccaagtcacgggcaggccgcagtggttcttgcgtggcctggttttattttcattgtgaaatatcatgctcttatttcagtcctcaaaaaaaaaaaacaaaaaaaaaaaaaaaaaaaaaaaaaaaaaaaaaaaaaaaaaaaaagaaaaaacagaaacaacaaaaaacaaacaacaacaaagaaacagcgggcgcccgcgcattaaagaatacaccctcgccgggcggagccccacgactcagatacccccacccgcagcatctttatttacagatcagagagcggccaccataaattgggcggcacttctataataaaccaggagacgcgtcgcccctcgcgtctcacccacccgctgtcgagtggaacatccccg

SEQ ID NO: 282148 - DNA, 1784 bp, Homo sapiens
gcaggcgcggaggtctgacggagacagcgcgtgcgcggcgtcgccgggcttgcgatgaacttccggctgtcaagctcccggccgggctgactcaagcggaggcgcgcggaacagtcgccgaggcgattcccgcccaggctcctgtaaccgccaggcagcggccccgccatgtcccagccccggaccccagagcaggcactggatacaccgggggactgccccccaggcaggagagacgaggacgctggggaggggatccagtgctcccaacgcatgctcagcttcagtgacgccctgctgtccatcatcgccaccgtcatgatcctgcctgtgacccacacggagatctccccagaacagcagttcgacagaagtgtacagaggcttctggcaacacggattgccgtctacctgatgacctttctcatcgtgacagtggcctgggcagcacacacaaggttgttccaagttgttgggaaaacagacgacacacttgccctgctcaacctggcctgcatgatgaccatcaccttcctgccttacacgttttcgttaatggtgaccttccctgatgtgcctctgggcatcttcttgttctgtgtgtgtgtgatcgccatcggggtcgtgcaggcactgattgtggggtacgcattccacttcccgcacctgctgagcccgcagatccagcgctctgcccacagggctctgtaccgacgacacgtcctgggcatcgtcctccaaggcccggccctgtgctttgcagcggccatcttctctctcttctttgtccccttgtcttacctgctgatggtgactgtcatcctcctcccctatgtcagcaaggtcaccggctggtgcagagacaggctcctgggccacagggagccctcggctcacccagtggaagtcttctcgtttgacctccacgagccactcagcaaggagcgcgtggaagccttcagcgacggagtctacgccatcgtggccacgcttctcatcctggacatctgcgaagacaacgtcccggaccccaaggatgtgaaggagaggttcagcggcagcctcgtggccgccctgagtgcgaccgggccgcgcttcctggcgtacttcggctccttcgccacagtgggactgctgtggttcgcccaccactcactcttcctgcatgtgcgcaaggccacgcgggccatggggctgctgaacacgctctcgctggccttcgtgggtggcctcccactagcctaccagcagacctcggccttcgcccggcagccccgcgatgagctggagcgcgtgcgtgtcagctgcaccatcatcttcctggccagcatcttccagctggccatgtggaccacggcgctgctgcaccaggcggagacgctgcagccctcggtgtggtttggcggccgggagcatgtgctcatgttcgccaagctggcgctgtacccctgtgccagcctgctggccttcgcctccacctgcctgctgagcaggttcagtgtgggcatcttccacctcatgcagatcgccgtgccctgcgccttcctgttgctgcgcctgctcgtgggcctggccctggccaccctgcgggtcctgcggggcctcgcccggcccgaacaccccccgccagcccccacgggccaggacgacccacagtcccagctcctccctgccccctgctagcagccacagagcccactcccagccgtcctcaccagagatggaccagggaggacaggatgctgggcaggggaagccaagtaaaataccaacacaagagagga

SEQ ID NO: 282149 - DNA, 2768 bp, Homo sapiens
cggctggtacggccggaagtatgggatctcccggccgggctgactcaagcggaggcgcgcggaacagtcgccgaggcgattcccgcccaggctcctgtaaccgccaggcagcggccccgccatgtcccagccccggaccccagagcaggcactggatacaccgggggactgccccccaggcaggagagacgaggacgctggggaggggatccagtgctcccaacgcatgctcagcttcagtgacgccctgctgtccatcatcgccaccgtcatggtctgtacggggcccctgcttaggcctgccccaccccgagcctctcgaggcactgcccagcccacctcagacctgtctaggtcttgccagcatccttgggtcccccagctcctcaggcagcttaggggggcccagcactgccctcgagtccccagtactgccacacccaatccaacaagcgtctcttgctctcctgcttccttctgtctctttgccccctcagatcctgcctgtgacccacacggagatctccccagaacaggtaacggggcaggctgtgctctgcgtggtgtggccctgcgaagatatagggtccccgaggctcgacctggcacagggtgctgaccctgcacgcctcgaagcttctgaggcttaggaggcagaggcgggaggcgggggcctccttggaaagggagggagccaacaagtcctgctcagcctgtgctcaccccggcggaggtcctggcctcctgggagggtgggagactgggctcctagggctctgtttccgagttcagtggacaaaggcagcaccctggaagtgagccagaggacaggttggaagaggaaggttccgggcctgccccaaggacagaagtttcctctgcgggagggcagctgccccagcaggcaggccccttacgtagctgctctgagtaaacgcggccagcgccccgtctcagcggggacactcccaccccggctgctcctgcaggcctggagcagttcgacagaagtgtacagaggcttctggcaacacggattgccgtctacctgatgacctttctcatcgtgacagtggcctgggcagcacacacaaggttgttccaagttgttgggaaaacagacgacacacttgccctgctcaacctggcctgcatgatgaccatcaccttcctgccttacacgttttcgttaatggtgaccttccctgatgtgcctctgggcatcttcttgttctgtgtgtgtgtgatcgccatcggggtcgtgcaggcactgattgtggggtacgcattccacttcccgcacctgctgagcccgcagatccagcgctctgcccacagggctctgtaccgacgacacgtcctgggcatcgtcctccaaggcccggccctgtgctttgcagcggccatcttctctctcttctttgtccccttgtcttacctgctgatggtgactgtcatcctcctcccctatgtcagcaaggtcaccggctggtgcagagacaggctcctgggccacagggagccctcggctcacccagtggaagtcttctcgtttgacctccacgagccactcagcaaggagcgcgtggaagccttcagcgacggagtctacgccatcgtggccacgcttctcatcctggacatctgcgaagacaacgtcccggaccccaaggatgtgaaggagaggttcagcggcagcctcgtggccgccctgagtgcgaccgggccgcgcttcctggcgtacttcggctccttcgccacagtgggactgctgtggttcgcccaccactcactcttcctgcatgtgcgcaaggccacgcgggccatggggctgctgaacacgctctcgctggccttcgtgggtggcctcccactagcctaccagcagacctcggccttcgcccggcagccccgcgatgagctggagcgcgtgcgtgtcagctgcaccatcatcttcctggccagcatcttccagctggccatgtggaccacggcgctgctgcaccaggcggagacgctgcagccctcggtgtggtttggcggccgggagcatgtgctcatgttcgccaagctggcgctgtacccctgtgccagcctgctggccttcgcctccacctgcctgctgagcaggttcagtgtgggcatcttccacctcatgcagatcgccgtgccctgcgccttcctgttgctgcgcctgctcgtgggcctggccctggccaccctgcgggtcctgcggggcctcgcccggcccgaacaccccccgccagcccccacgggccaggacgacccacagtcccagctcctccctgccccctgctagcagccacagagcccactcccagccgtcctcaccagagatggaccagggaggacaggatgctgggcaggggaagccaagtcacgggcaggccgcagtggttcttgcgtggcctggttttattttcattgtgaaatatcatgctcttatttcagtcctcaaaaaaaaaaaacaaaaaaaaaaaaaaaaaaaaaaaaaaaaaaaaaaaaaaaaaaaaagaaaaaacagaaacaacaaaaaacaaacaacaacaaagaaacagcgggcgcccgcgcattaaagaatacaccctcgccgggcggagccccacgactcagatacccccacccgcagcatctttatttacagatcagagagcggccaccataaattgggcggcacttctataataaaccaggagacgcgtcgcccctcgcgtctcacccacccgctgtcgagtggaacatccccg

SEQ ID NO: 282150 - DNA, 1900 bp, Homo sapiens
cggctggtacggccggaagtatgggatctcccggccgggctgactcaagcggaggcgcgcggaacagtcgccgaggcgattcccgcccagatcctgcctgtgacccacacggagatctccccagaacagcagttcgacagaagtgtacagaggcttctggcaacacggattgccgtctacctgatgacctttctcatcgtgacagtggcctgggcagcacacacaaggttgttccaagttgttgggaaaacagacgacacacttgccctgctcaacctggcctgcatgatgaccatcaccttcctgccttacacgttttcgttaatggtgaccttccctgatgtgcctctgggcatcttcttgttctgtgtgtgtgtgatcgccatcggggtcgtgcaggcactgattgtggggtacgcattccacttcccgcacctgctgagcccgcagatccagcgctctgcccacagggctctgtaccgacgacacgtcctgggcatcgtcctccaaggcccggccctgtgctttgcagcggccatcttctctctcttctttgtccccttgtcttacctgctgatggtgactgtcatcctcctcccctatgtcagcaaggtcaccggctggtgcagagacaggctcctgggccacagggagccctcggctcacccagtggaagtcttctcgtttgacctccacgagccactcagcaaggagcgcgtggaagccttcagcgacggagtctacgccatcgtggccacgcttctcatcctggacatctgcgaagacaacgtcccggaccccaaggatgtgaaggagaggttcagcggcagcctcgtggccgccctgagtgcgaccgggccgcgcttcctggcgtacttcggctccttcgccacagtgggactgctgtggttcgcccaccactcactcttcctgcatgtgcgcaaggccacgcgggccatggggctgctgaacacgctctcgctggccttcgtgggtggcctcccactagcctaccagcagacctcggccttcgcccggcagccccgcgatgagctggagcgcgtgcgtgtcagctgcaccatcatcttcctggccagcatcttccagctggccatgtggaccacggcgctgctgcaccaggcggagacgctgcagccctcggtgtggtttggcggccgggagcatgtgctcatgttcgccaagctggcgctgtacccctgtgccagcctgctggccttcgcctccacctgcctgctgagcaggttcagtgtgggcatcttccacctcatgcagatcgccgtgccctgcgccttcctgttgctgcgcctgctcgtgggcctggccctggccaccctgcgggtcctgcggggcctcgcccggcccgaacaccccccgccagcccccacgggccaggacgacccacagtcccagctcctccctgccccctgctagcagccacagagcccactcccagccgtcctcaccagagatggaccagggaggacaggatgctgggcaggggaagccaagtcacgggcaggccgcagtggttcttgcgtggcctggttttattttcattgtgaaatatcatgctcttatttcagtcctcaaaaaaaaaaaacaaaaaaaaaaaaaaaaaaaaaaaaaaaaaaaaaaaaaaaaaaaaagaaaaaacagaaacaacaaaaaacaaacaacaacaaagaaacagcgggcgcccgcgcattaaagaatacaccctcgccgggcggagccccacgactcagatacccccacccgcagcatctttatttacagatcagagagcggccaccataaattgggcggcacttctataataaaccaggagacgcgtcgcccctcgcgtctcacccacccgctgtcgagtggaacatccccg

SEQ ID NO: 282151 - DNA, 1671 bp, Homo sapiens
tagacggcaatccgtgttgccagaagcctctgtacacttctgtcgaacgggcctgcatgatgaccatcaccttcctgccttacacgttttcgttaatggtgaccttccctgatgtgcctctgggcatcttcttgttctgtgtgtgtgtgatcgccatcggggtcgtgcaggcactgattgtggggtacgcattccacttcccgcacctgctgagcccgcagatccagcgctctgcccacagggctctgtaccgacgacacgtcctgggcatcgtcctccaaggcccggccctgtgctttgcagcggccatcttctctctcttctttgtccccttgtcttacctgctgatggtgactgtcatcctcctcccctatgtcagcaaggtcaccggctggtgcagagacaggctcctgggccacagggagccctcggctcacccagtggaagtcttctcgtttgacctccacgagccactcagcaaggagcgcgtggaagccttcagcgacggagtctacgccatcgtggccacgcttctcatcctggacatctgcgaagacaacgtcccggaccccaaggatgtgaaggagaggttcagcggcagcctcgtggccgccctgagtgcgaccgggccgcgcttcctggcgtacttcggctccttcgccacagtgggactgctgtggttcgcccaccactcactcttcctgcatgtgcgcaaggccacgcgggccatggggctgctgaacacgctctcgctggccttcgtgggtggcctcccactagcctaccagcagacctcggccttcgcccggcagccccgcgatgagctggagcgcgtgcgtgtcagctgcaccatcatcttcctggccagcatcttccagctggccatgtggaccacggcgctgctgcaccaggcggagacgctgcagccctcggtgtggtttggcggccgggagcatgtgctcatgttcgccaagctggcgctgtacccctgtgccagcctgctggccttcgcctccacctgcctgctgagcaggttcagtgtgggcatcttccacctcatgcagatcgccgtgccctgcgccttcctgttgctgcgcctgctcgtgggcctggccctggccaccctgcgggtcctgcggggcctcgcccggcccgaacaccccccgccagcccccacgggccaggacgacccacagtcccagctcctccctgccccctgctagcagccacagagcccactcccagccgtcctcaccagagatggaccagggaggacaggatgctgggcaggggaagccaagtcacgggcaggccgcagtggttcttgcgtggcctggttttattttcattgtgaaatatcatgctcttatttcagtcctcaaaaaaaaaaaacaaaaaaaaaaaaaaaaaaaaaaaaaaaaaaaaaaaaaaaaaaaaagaaaaaacagaaacaacaaaaaacaaacaacaacaaagaaacagcgggcgcccgcgcattaaagaatacaccctcgccgggcggagccccacgactcagatacccccacccgcagcatctttatttacagatcagagagcggccaccataaattgggcggcacttctataataaaccaggagacgcgtcgcccctcgcgtctcacccacccgctgtcgagtggaacatccccg

SEQ ID NO: 282152 - DNA, 2331 bp, Homo sapiens
ttgcatttttaatagagatgaggtttcaccaagttggccaggctggtcttgaactcctgacctcaggtgatctgcccacctcggcctcccaaagtgctgggattacaggtgtaagccaccgtgcccggccatcgtaatgtttgaatttgcttttttacatcttccatccttttggagtgtcttgttccctcgtcatagttcagcactgtgaccaccttggggttagacactatggttttatatcctgtacttgatattctcgagtccaagtctcctgatgctcttctctgctgtcgtgtgcatttttaaaaacgggaagcaaacgttcattggcatctgatctctaaggcccaggtgccagggatgctccagggtgagctgcctgattgtgcaggccagctgaggctccccttgggagggacctgccgaagagaggcagcagcgtggggccgggacagtgacctctcctccacctggagccatggccaggggagctgcccctcccagcaacttcctgcccttgctgcctccagtctgtctcctgcccccaacccccacccctcacccctcgccctctgcgtattgttctggaggacagaagtctgtctggggctgcatgaggaccactgtccttcacgtcccgatgttgaaggacgacactgttcccggctttctgggtggtgccgtcagaaggcagcagccctgacaagggggttcccacagcctccctgtggagggagttggcctcctgagacccccatgtgcatctgagaaccatggaggcaagccctctgcagatcttcagccagggtgttgtgtgggtggctccgagggctggaagctggcgagggaacagacctcgctgccccacagcaggctggtcctgcccagcaaacacaggagagcctcggccagagagggctgcagcccagggcccccagcagcactctgggccagcagggttgggctcccattagcacagagcagaagggtgccagtttctatggaatttcagatgaacagcacgtaacagtcagtgtgccaaatacacataaatacggcgttctgaaatttagcacactgggaagtccacatggttcatctgaaaacgtgccagatccaggcagccctgacaggcgctcagccaccctgctggggcctgtgtggccacggcaaggccggcacaaatgcatctattcactgttctcagcgaagacaacgtcccggaccccaaggatgtgaaggagaggttcagcggcagcctcgtggccgccctgagtgcgaccgggccgcgcttcctggcgtacttcggctccttcgccacagtgggactgctgtggttcgcccaccactcactcttcctgcatgtgcgcaaggccacgcgggccatggggctgctgaacacgctctcgctggccttcgtgggtggcctcccactagcctaccagcagacctcggccttcgcccggcagccccgcgatgagctggagcgcgtgcgtgtcagctgcaccatcatcttcctggccagcatcttccagctggccatgtggaccacggcgctgctgcaccaggcggagacgctgcagccctcggtgtggtttggcggccgggagcatgtgctcatgttcgccaagctggcgctgtacccctgtgccagcctgctggccttcgcctccacctgcctgctgagcaggttcagtgtgggcatcttccacctcatgcagatcgccgtgccctgcgccttcctgttgctgcgcctgctcgtgggcctggccctggccaccctgcgggtcctgcggggcctcgcccggcccgaacaccccccgccagcccccacgggccaggacgacccacagtcccagctcctccctgccccctgctagcagccacagagcccactcccagccgtcctcaccagagatggaccagggaggacaggatgctgggcaggggaagccaagtcacgggcaggccgcagtggttcttgcgtggcctggttttattttcattgtgaaatatcatgctcttatttcagtcctcaaaaaaaaaaaacaaaaaaaaaaaaaaaaaaaaaaaaaaaaaaaaaaaaaaaaaaaaagaaaaaacagaaacaacaaaaaacaaacaacaacaaagaaacagcgggcgcccgcgcattaaagaatacaccctcgccgggcggagccccacgactcagatacccccacccgcagcatctttatttacagatcagagagcggccaccataaattgggcggcacttctataataaaccaggagacgcgtcgcccctcgcgtctcacccacccgctgtcgagtggaacatccccg

SEQ ID NO: 282153 - DNA, 1268 bp, Homo sapiens
gcaggcgcggaggtctgacggagacagcgcgtgcgcggcgtcgccgggcttgcgatgaacttccggctgtcaagctcccggccgggctgactcaagcggaggcgcgcggaacagtcgccgaggcgattcccgcccaggctcctgtaaccgccaggcagcggccccgccatgtcccagccccggaccccagagcaggcactggatacaccgggggactgccccccaggcaggagagacgaggacgctggggaggggatccagtgctcccaacgcatgctcagcttcagtgacgccctgctgtccatcatcgccaccgtcatgatcctgcctgtgacccacacggagatctccccagaacaggtaacggggcaggctgtgctctgcgtggtgtggccctgcgaagatatagggtccccgaggctcgacctggcacagggtgctgaccctgcacgcctcgaagcttctgaggcttaggaggcagaggcgggaggcgggggcctccttggaaagggagggagccaacaagtcctgctcagcctgtgctcaccccggcggaggtcctggcctcctgggagggtgggagactgggctcctagggctctgtttccgagttcagtggacaaaggcagcaccctggaagtgagccagaggacaggttggaagaggaaggttccgggcctgccccaaggacagaagtttcctctgcgggagggcagctgccccagcaggcaggccccttacgtagctgctctgagtaaacgcggccagcgccccgtctcagcggggacactcccaccccggctgctcctgcaggcctggagcagttcgacagaagtgtacagaggcttctggcaacacggattgccgtctacctgatgacctttctcatcgtgacagtggcctgggcagcacacacaaggttgttccaagttgttgggaaaacagacgacacacttgccctgctcaacctggcctgcatgatgaccatcaccttcctgccttacacggtgagcaacaccaggcccctgacaccctgaggctttgctgggcaccactggatttgacctgtcctcaaaagcagaccagctggatggcccagggcccaggccacacggttgtagagaagagagaaggttctggggagagccagctgttgggctgttgggggcttctttcaggctggcggggaggggaggcagtggccccgatgagggagtcaccggcgctcccagctcccacccggccctgagcccacagccccctgccca

SEQ ID NO: 282154 - DNA, 293 bp, Homo sapiens
gaaggtcagttcacacgaggtataggaaggagtctaacatttatttttttcttaagcctcacctagccttttattcacaccaccaagtctaggttagaatgtatctgagcagtgaaaggaccagaatgcatagttatcaaagggcagtttttcccttgctaaaacctaaattcattttttagactctgctagcagttttagatataatgttacaacatgtgttttgttctccaggacctgatttaaataaatgtgataaaaataggctaagttttttgtcatccagggctgct

SEQ ID NO: 282155 - DNA, 2242 bp, Homo sapiens
gttaattctattcatttattatggcagaagtattttaaagtaaattagacaaatcatgacatttcatacccaatactttaacatgcatctctaaaaaccaatttcttacaaagccacataattttattacgcctaataaggagacgtagcagggtagtgtgaaggaggggaaatcgtggcgatgggttaggtatacacttagaatgaagtgcagactccacacggaggccctcccgaggcccaaccggacctgacctgggtttgcttctctgtcttcacctgccagcactaacccgcagctatactccagccacacaggacttctttgagttctttcagtgaccaatctctttctcgcctcagggcctttgtactggcggttccttccgccggacacgtcgggtttcctcgtttttgcggactggcgctttctgatttcagagactctccgcaacagaaccatctcaagtgggtctacctcctcgcctttttttgttgttgttgttgcttggctgcgcttctgacagggcaggccgtgatgatgtttgtttatgagttaggtctgactgttcgttggtgcttaagatccccaccgggtccctagggcctgtgcgtaccgcgcacctgtgcacgtcctgcgcgcagctgcaggcgactccgctctggctcgtcgctgctgtttcctgctgggggtgccgaccctgtcccacgctagctgggtgacttcccccaaccgcagagacagcggcgacccggggcctcagacctgcccccgcatctcgccggcgccaggcagtgggaagtcaggttcttccgccacctcccagccaggactctgccaccctccctcaggatgcctgagggccccgagctgcacctggccagccagtttgtgaatgaggcctgcagggcgctggtgttcggcggctgcgtggagaagtcctctgtcagccgcaaccctgaggtgccctttgagagcagtgcctaccgcatctcagcttcagcccgcggcaaggagctgcgcctgatactgagccctctgcctggggcccagccccaacaggagccactggccctggtcttccgcttcggcatgtccggctcttttcagctggtgccccgcgaggagctgccacgccatgcccacctgcgcttttacacggccccgcctggcccccggctcgccctatgtttcgtggacatccgccggttcggccgctgggaccttgggggaaagtggcagccgggccgcgggccctgtgtcttgcaggagtaccagcagttcaggggagaatgtgctacgaaacctagcggataaggcctttgaccggcccatctgcgaggccctcctggaccagaggttcttcaatggcattggcaactatctgcgggcagagatcctgtaccggctgaagatccccccctttgagaaggcccgctcggtcctggaggccctgcagcagcacaggccgagcccggagctgaccctgagccagaagataaggaccaagctgcagaatccagacctgctggagctatgtcactcagtgcccaaggaagtggtccagttggggggcagaggctacgggtcagagagcggggaggaggactttgctgcctttcgagcctggctgcgctgctatggcatgccaggcatgagctccctgcaggaccggcatggccgtaccatctggttccagggggatcctggaccgttggcacccaaagcgcaagtcccgcaaaaagaaatccaaggccacacagctgagtcctgaggacagagtggaggacgctttgcctccaagcaaggccccttccaggacacgaagggcaaagagagaccttcctaagaggactgcaacccagcggcctgaggggaccagcctccagcaggacccagaagctcccacagtgcccaagaaggggaggaggaaggggcgacaggcagcctctggccactgcagaccccggaaggtcaaggctgacatcccatccttggaaccagaggggacctcagcctcttagcaggaggctctccttgcttgcactcaccctttcttattgtcttgccctgcatctgggggtctgaatttttgggagcaggcaatatctgaaggtgcaaacaggccctacggctgttccctgcacaactctcatggttttaattgtaccccatcttccacatctttaaagctcatgtgaaaaatgctgcatttttaataaactgatacatttgaacttc

SEQ ID NO: 282156 - DNA, 1382 bp, Homo sapiens
tgcccatgagacaggcaggacaaggattcttttatatatttatacacacacacacacacacacacacacgcacgtttatatatatttttggtagagataggatcttgccatgttgcctggactagcctcaaactgggctcaagtgatcctcccacatctgcctctaagtagctaggactacaggctcacaccaccacaccgggctaattgttaaaaattttttttgtagagacagggtctccctatgttgcccaggctggtattgaactcctggcccctagggattctcccatctaagcttcccaaagtgtcgggattacaggtgtggccactgcacagggccaggacaaggattcttaatcccactccaggatgggaaacccatggccgagtgggaagaaaccagctgaggtcacatcaccagaggagggagagtgtggcccctgactcagtccatcagcttgtgtagctgaggtctgggccaggtctaaccaggctccccactcctcccaacctgagcctgccctctgatctctgcctgttcctctgtcccacagggggcagaggctacgggtcagagagcggggaggaggactttgctgcctttcgagcctggctgcgctgctatggcatgccaggcatgagctccctgcaggaccggcatggccgtaccatctggttccagggggatcctggaccgttggcacccaaaggtaagctactcctaatgtaataggctaagagagcagaaaggacttcacgcctgcaagggctacagcacccttctccaccctatccccctgcaaccctgggagtcacccctgggcaggataggaccctccaactccaacaccagtgtcctgcagggcgcaagtcccgcaaaaagaaatccaaggccacacagctgagtcctgaggacagagtggaggacgctttgcctccaagcaaggccccttccaggacacgaagggcaaagagagaccttcctaagaggactgcaacccagcggcctgaggggaccagcctccagcaggacccagaagctcccacagtgcccaagaaggggaggaggaaggggcgacaggcagcctctggccactgcagaccccggaaggtcaaggctgacatcccatccttggaaccagaggggacctcagcctcttagcaggaggctctccttgcttgcactcaccctttcttattgtcttgccctgcatctgggggtctgaatttttgggagcaggcaatatctgaaggtgcaaacaggccctacggctgttccctgcacaactctcatggttttaattgtaccccatcttccacatctttaaagctcatgtgaaaaatgctgcatttttaataaactgatacatttgaacttc

SEQ ID NO: 282157 - DNA, 1343 bp, Homo sapiens
gttaattctattcatttattatggcagaagtattttaaagtaaattagacaaatcatgacatttcatacccaatactttaacatgcatctctaaaaaccaatttcttacaaagccacataattttattacgcctaataaggagacgtagcagggtagtgtgaaggaggggaaatcgtggcgatgggttaggtatacacttagaatgaagtgcagactccacacggaggccctcccgaggcccaaccggacctgacctgggtttgcttctctgtcttcacctgccagcactaacccgcagctatactccagccacacaggacttctttgagttctttcagtgaccaatctctttctcgcctcagggcctttgtactggcggttccttccgccggacacgtcgggtttcctcgtttttgcggactggcgctttctgatttcagagactctccgcaacagaaccatctcaagtgggtctacctcctcgcctttttttgttgttgttgttgcttggctgcgcttctgacagggcaggccgtgatgatgtttgtttatgagttaggtctgactgttcgttggtgcttaagatccccaccgggtccctagggcctgtgcgtaccgcgcacctgtgcacgtcctgcgcgcagctgcaggcgactccgctctggctcgtcgctgctgtttcctgctgggggtgccgaccctgtcccacgctagctgggtgacttcccccaaccgcagagacagcggcgacccggggcctcagacctgcccccgcatctcgccggcgccaggcagtgggaagtcaggttcttccgccacctcccagccaggctgaagatccccccctttgagaaggcccgctcggtcctggaggccctgcagcagcacaggccgagcccggagctgaccctgagccagaagataaggaccaagctgcagaatccagacctgctggagctatgtcactcagtgcccaaggaagtggtccagttgggtgaggccaaagatggcagcaacctctgcttcagcaaatgattgtgtaaccctggggcacttgtccctctctggacctgattcaccgatttggaagtttgtagccctagctgatactcaatggactaggcctcctcacttgtcaatagtgtttccaggctgggcgcagtggctcatgcctgtaatcccagcacttcgggaggccgagtggggtggctcacctgaggtcaggagttcgagaccatcctggccaacatggtgaaaccccatctttactaaaaatgcaaaaaattagccaggtgtggtggtgggcacctgtaatctcagctactcgggaggatgaggcagg

SEQ ID NO: 282158 - DNA, 800 bp, Homo sapiens
tcaccttgatgttcccatttaacagataggaaaacgggggcagggagaagaggaactgtaactcccagtttccttccccttgcacccagaaacaggttctctgagcccctctccccatcccatggagggtggggatgggtcttacgcacccagaccgtgttcctccagggagaatgtgctacgaaacctagcggataaggcctttgaccggcccatctgcgaggccctcctggaccagaggttcttcaatggcattggcaactatctgcgggcagagatcctgtaccggctgaagatccccccctttgagaaggcccgctcggtcctggaggccctgcagcagcacaggccgagcccggagctgaccctgagccagaagataaggaccaagctgcagaatccagacctgctggagctatgtcactcagtgcccaaggaagtggtccagttgggtgaggccaaagatggcagcaacctctgcttcagcaaatgattgtgtaaccctggggcacttgtccctctctggacctgattcaccgatttggaagtttgtagccctagctgatactcaatggactaggcctcctcacttgtcaatagtgtttccaggctgggcgcagtggctcatgcctgtaatcccagcacttcgggaggccgagtggggtggctcacctgaggtcaggagttcgagaccatcctggccaacatggtgaaaccccatctttactaaaaatgcaaaaaattagccaggtgtggtggtgggcacctgtaatctcagctactcgggaggatgaggcagg

SEQ ID NO: 282159 - DNA, 742 bp, Homo sapiens
tcaccttgatgttcccatttaacagataggaaaacgggggcagggagaagaggaactgtaactcccagtttccttccccttgcacccagaaacaggttctctgagcccctctccccatcccatggagggtggggatgggtcttacgcacccagaccgtgttcctccacctcctggaccagaggttcttcaatggcattggcaactatctgcgggcagagatcctgtaccggctgaagatccccccctttgagaaggcccgctcggtcctggaggccctgcagcagcacaggccgagcccggagctgaccctgagccagaagataaggaccaagctgcagaatccagacctgctggagctatgtcactcagtgcccaaggaagtggtccagttgggtgaggccaaagatggcagcaacctctgcttcagcaaatgattgtgtaaccctggggcacttgtccctctctggacctgattcaccgatttggaagtttgtagccctagctgatactcaatggactaggcctcctcacttgtcaatagtgtttccaggctgggcgcagtggctcatgcctgtaatcccagcacttcgggaggccgagtggggtggctcacctgaggtcaggagttcgagaccatcctggccaacatggtgaaaccccatctttactaaaaatgcaaaaaattagccaggtgtggtggtgggcacctgtaatctcagctactcgggaggatgaggcagg

SEQ ID NO: 282160 - DNA, 2780 bp, Homo sapiens
gttaattctattcatttattatggcagaagtattttaaagtaaattagacaaatcatgacatttcatacccaatactttaacatgcatctctaaaaaccaatttcttacaaagccacataattttattacgcctaataaggagacgtagcagggtagtgtgaaggaggggaaatcgtggcgatgggttaggtatacacttagaatgaagtgcagactccacacggaggccctcccgaggcccaaccggacctgacctgggtttgcttctctgtcttcacctgccagcactaacccgcagctatactccagccacacaggacttctttgagttctttcagtgaccaatctctttctcgcctcagggcctttgtactggcggttccttccgccggacacgtcgggtttcctcgtttttgcggactggcgctttctgatttcagagactctccgcaacagaaccatctcaagtgggtctacctcctcgcctttttttgttgttgttgttgcttggctgcgcttctgacagggcaggccgtgatgatgtttgtttatgagttaggtctgactgttcgttggtgcttaagatccccaccgggtccctagggcctgtgcgtaccgcgcacctgtgcacgtcctgcgcgcagctgcaggcgactccgctctggctcgtcgctgctgtttcctgctgggggtgccgaccctgtcccacgctagctgggtgacttcccccaaccgcagagacagcggcgacccggggcctcagacctgcccccgcatctcgccggcgccaggcagtgggaagtcaggttcttccgccacctcccagccaggactctgccaccctccctcaggatgcctgagggccccgagctgcacctggccagccagtttgtgaatgaggcctgcagggcgctggtgttcggcggctgcgtggagaagtcctctgtcagccgcaaccctgaggtgccctttgagagcagtgcctaccgcatctcagcttcagcccgcggcaaggagctgcgcctgatactgagccctctgcctggggcccagccccaacaggagccactggccctggtcttccgcttcggcatgtccggctcttttcagctggtgccccgcgaggagctgccacgccatgcccacctgcgcttttacacggccccgcctggcccccggctcgccctatgtttcgtggacatccgccggttcggccgctgggaccttgggggaaagtggcagccgggccgcgggccctgtgtcttgcaggagtaccagcagttcaggggagaatgtgctacgaaacctagcggataaggcctttgaccggcccatctgcgaggccctcctggaccagaggttcttcaatggcattggcaactatctgcgggcagagatcctgtaccggctgaagatccccccctttgagaaggcccgctcggtcctggaggccctgcagcagcacaggccgagcccggagctgaccctgagccagaagataaggaccaagctgcagaatccagacctgctggagctatgtcactcagtgcccaaggaagtggtccagttggggggcagaggctacgggtcagagagcggggaggaggactttgctgcctttcgagcctggctgcgctgctatggcatgccaggcatgagctccctgcaggaccggcatggccgtaccatctggttccaggttgggccctactgttcacacaggcagagaccccaggaggctgatgggtggaaacgtggggtcacaataactggggtggtgatgctcagggtctgtctagaccctccaaggaccacactgttcctgagggtcacacccctcccctcccatgcgtcccagggttgcagctagtggaagtagcccaaggcaggtagcccaagtgaaagtagccaagggcagagcagctttgctgatgtggactctaacatgggggatgtcctagaggcttcctaagggagaagctacactgatctggatgggtgtgtgtgagtcctgcctctccaaggaataccgcccctgtgccaacccaggctgattcctgaattatccccatcccattttagggggatcctggaccgttggcacccaaaggtaagctactcctaatgtaataggctaagagagcagaaaggacttcacgcctgcaagggctacagcacccttctccaccctatccccctgcaaccctgggagtcacccctgggcaggataggaccctccaactccaacaccagtgtcctgcagggcgcaagtcccgcaaaaagaaatccaaggccacacagctgagtcctgaggacagagtggaggacgctttgcctccaagcaaggccccttccaggacacgaagggcaaagagagaccttcctaagaggactgcaacccagcggcctgaggggaccagcctccagcaggacccagaagctcccacagtgcccaagaaggggaggaggaaggggcgacaggcagcctctggccactgcagaccccggaaggtcaaggctgacatcccatccttggaaccagaggggacctcagcctcttagcaggaggctctccttgcttgcactcaccctttcttattgtcttgccctgcatctgggggtctgaatttttgggagcaggcaatatctgaaggtgcaaacaggccctacggctgttccctgcacaactctcatggttttaattgtaccccatcttccacatctttaaagctcatgtgaaaaatgctgcatttttaataaactgatacatttgaacttc

SEQ ID NO: 282161 - DNA, 2936 bp, Homo sapiens
gttaattctattcatttattatggcagaagtattttaaagtaaattagacaaatcatgacatttcatacccaatactttaacatgcatctctaaaaaccaatttcttacaaagccacataattttattacgcctaataaggagacgtagcagggtagtgtgaaggaggggaaatcgtggcgatgggttaggtatacacttagaatgaagtgcagactccacacggaggccctcccgaggcccaaccggacctgacctgggtttgcttctctgtcttcacctgccagcactaacccgcagctatactccagccacacaggacttctttgagttctttcagtgaccaatctctttctcgcctcagggcctttgtactggcggttccttccgccggacacgtcgggtttcctcgtttttgcggactggcgctttctgatttcagagactctccgcaacagaaccatctcaagtgggtctacctcctcgcctttttttgttgttgttgttgcttggctgcgcttctgacagggcaggccgtgatgatgtttgtttatgagttaggtctgactgttcgttggtgcttaagatccccaccgggtccctagggcctgtgcgtaccgcgcacctgtgcacgtcctgcgcgcagctgcaggcgactccgctctggctcgtcgctgctgtttcctgctgggggtgccgaccctgtcccacgctagctgggtgacttcccccaaccgcagagacagcggcgacccggggcctcagacctgcccccgcatctcgccggcgccaggcagtgggaagtcaggttcttccgccacctcccagccaggactctgccaccctccctcaggatgcctgagggccccgagctgcacctggccagccagtttgtgaatgaggcctgcagggcgctggtgttcggcggctgcgtggagaagtcctctgtcagccgcaaccctgaggtgccctttgagagcagtgcctaccgcatctcagcttcagcccgcggcaaggagctgcgcctgatactgagccctctgcctggggcccagccccaacaggagccactggccctggtcttccgcttcggcatgtccggctcttttcagctggtgccccgcgaggagctgccacgccatgcccacctgcgcttttacacggccccgcctggcccccggctcgccctatgtttcgtggacatccgccggttcggccgctgggaccttgggggaaagtggcagccgggccgcgggccctgtgtcttgcaggagtaccagcagttcagggtctcgctctgttgcctaggctagagtacagtggcgccatcacagctcattgcagccttaacctccagggctcagagaaacaggttctctgagcccctctccccatcccatggagggtggggatgggtcttacgcacccagaccgtgttcctccagggagaatgtgctacgaaacctagcggataaggcctttgaccggcccatctgcgaggccctcctggaccagaggttcttcaatggcattggcaactatctgcgggcagagatcctgtaccggctgaagatccccccctttgagaaggcccgctcggtcctggaggccctgcagcagcacaggccgagcccggagctgaccctgagccagaagataaggaccaagctgcagaatccagacctgctggagctatgtcactcagtgcccaaggaagtggtccagttggggggcagaggctacgggtcagagagcggggaggaggactttgctgcctttcgagcctggctgcgctgctatggcatgccaggcatgagctccctgcaggaccggcatggccgtaccatctggttccaggttgggccctactgttcacacaggcagagaccccaggaggctgatgggtggaaacgtggggtcacaataactggggtggtgatgctcagggtctgtctagaccctccaaggaccacactgttcctgagggtcacacccctcccctcccatgcgtcccagggttgcagctagtggaagtagcccaaggcaggtagcccaagtgaaagtagccaagggcagagcagctttgctgatgtggactctaacatgggggatgtcctagaggcttcctaagggagaagctacactgatctggatgggtgtgtgtgagtcctgcctctccaaggaataccgcccctgtgccaacccaggctgattcctgaattatccccatcccattttagggggatcctggaccgttggcacccaaaggtaagctactcctaatgtaataggctaagagagcagaaaggacttcacgcctgcaagggctacagcacccttctccaccctatccccctgcaaccctgggagtcacccctgggcaggataggaccctccaactccaacaccagtgtcctgcagggcgcaagtcccgcaaaaagaaatccaaggccacacagctgagtcctgaggacagagtggaggacgctttgcctccaagcaaggccccttccaggacacgaagggcaaagagagaccttcctaagaggactgcaacccagcggcctgaggggaccagcctccagcaggacccagaagctcccacagtgcccaagaaggggaggaggaaggggcgacaggcagcctctggccactgcagaccccggaaggtcaaggctgacatcccatccttggaaccagaggggacctcagcctcttagcaggaggctctccttgcttgcactcaccctttcttattgtcttgccctgcatctgggggtctgaatttttgggagcaggcaatatctgaaggtgcaaacaggccctacggctgttccctgcacaactctcatggttttaattgtaccccatcttccacatctttaaagctcatgtgaaaaatgctgcatttttaataaactgatacatttgaacttc

SEQ ID NO: 282162 - DNA, 3545 bp, Homo sapiens
gttaattctattcatttattatggcagaagtattttaaagtaaattagacaaatcatgacatttcatacccaatactttaacatgcatctctaaaaaccaatttcttacaaagccacataattttattacgcctaataaggagacgtagcagggtagtgtgaaggaggggaaatcgtggcgatgggttaggtatacacttagaatgaagtgcagactccacacggaggccctcccgaggcccaaccggacctgacctgggtttgcttctctgtcttcacctgccagcactaacccgcagctatactccagccacacaggacttctttgagttctttcagtgaccaatctctttctcgcctcagggcctttgtactggcggttccttccgccggacacgtcgggtttcctcgtttttgcggactggcgctttctgatttcagagactctccgcaacagaaccatctcaagtgggtctacctcctcgcctttttttgttgttgttgttgcttggctgcgcttctgacagggcaggccgtgatgatgtttgtttatgagttaggtctgactgttcgttggtgcttaagatccccaccgggtccctagggcctgtgcgtaccgcgcacctgtgcacgtcctgcgcgcagctgcaggcgactccgctctggctcgtcgctgctgtttcctgctgggggtgccgaccctgtcccacgctagctgggtgacttcccccaaccgcagagacagcggcgacccggggcctcagacctgcccccgcatctcgccggcgccaggcagtgggaagtcaggttcttccgccacctcccagccaggcacaccttcgcctccgattccgaaccgcccggggacagaggcaagtggcaaagcagggagggcggaggtgaggagtcgataccccccaccccagggaccaggcgctgccgcgggccctttccctcccccaggcccggggcaggagctcggggagcccttcctggtgcccgccgtcctcctgcggagccatggggagcggctccagcgcatggcggcagcccgcccgcctcgtcctggcccctgccctgacccgggggcggccgcggggatgtccggtccgtggggcaggcccggttctcgctgcggccaagcggccgattcggccgctcccgccgctcccccgcgccaggccgagcttcgctctttccctcggtggtgagcggccagatccaggcgggtcctaagtgtggggggaggggggcgcagggaggggcggccacgcgatcctaagaccctttcagatggtgggagagcctggagaaagagacagcgtgtgcggagggggtgctccctcagatggggggtcaggaagtctccctcaagtgtctgggacagagggacagcaggggccaaggcggagatgagatccgtgagtgaggggagccgggaagaagtaaggctgcagccgcggccccgcaaggattgggactttcgtctaaacgcggtggaagcccatggaaggaagcggttagcagcaaggcagagtcctgctccctctgcagccccagctcccagcgccctgggctttccaggcacctgtccgggactctgccaccctccctcaggatgcctgagggccccgagctgcacctggccagccagtttgtgaatgaggcctgcagggcgctggtgttcggcggctgcgtggagaagtcctctgtcagccgcaaccctgaggtgccctttgagagcagtgcctaccgcatctcagcttcagcccgcggcaaggagctgcgcctgatactgagccctctgcctggggcccagccccaacaggagccactggccctggtcttccgcttcggcatgtccggctcttttcagctggtgccccgcgaggagctgccacgccatgcccacctgcgcttttacacggccccgcctggcccccggctcgccctatgtttcgtggacatccgccggttcggccgctgggaccttgggggaaagtggcagccgggccgcgggccctgtgtcttgcaggagtaccagcagttcaggggagaatgtgctacgaaacctagcggataaggcctttgaccggcccatctgcgaggccctcctggaccagaggttcttcaatggcattggcaactatctgcgggcagagatcctgtaccggctgaagatccccccctttgagaaggcccgctcggtcctggaggccctgcagcagcacaggccgagcccggagctgaccctgagccagaagataaggaccaagctgcagaatccagacctgctggagctatgtcactcagtgcccaaggaagtggtccagttggggggcagaggctacgggtcagagagcggggaggaggactttgctgcctttcgagcctggctgcgctgctatggcatgccaggcatgagctccctgcaggaccggcatggccgtaccatctggttccaggttgggccctactgttcacacaggcagagaccccaggaggctgatgggtggaaacgtggggtcacaataactggggtggtgatgctcagggtctgtctagaccctccaaggaccacactgttcctgagggtcacacccctcccctcccatgcgtcccagggttgcagctagtggaagtagcccaaggcaggtagcccaagtgaaagtagccaagggcagagcagctttgctgatgtggactctaacatgggggatgtcctagaggcttcctaagggagaagctacactgatctggatgggtgtgtgtgagtcctgcctctccaaggaataccgcccctgtgccaacccaggctgattcctgaattatccccatcccattttagggggatcctggaccgttggcacccaaaggtaagctactcctaatgtaataggctaagagagcagaaaggacttcacgcctgcaagggctacagcacccttctccaccctatccccctgcaaccctgggagtcacccctgggcaggataggaccctccaactccaacaccagtgtcctgcagggcgcaagtcccgcaaaaagaaatccaaggccacacagctgagtcctgaggacagagtggaggacgctttgcctccaagcaaggccccttccaggacacgaagggcaaagagagaccttcctaagaggactgcaacccagcggcctgaggggaccagcctccagcaggacccagaagctcccacagtgcccaagaaggggaggaggaaggggcgacaggcagcctctggccactgcagaccccggaaggtcaaggctgacatcccatccttggaaccagaggggacctcagcctcttagcaggaggctctccttgcttgcactcaccctttcttattgtcttgccctgcatctgggggtctgaatttttgggagcaggcaatatctgaaggtgcaaacaggccctacggctgttccctgcacaactctcatggttttaattgtaccccatcttccacatctttaaagctcatgtgaaaaatgctgcatttttaataaactgatacatttgaacttc

SEQ ID NO: 282163 - DNA, 2625 bp, Homo sapiens
gttaattctattcatttattatggcagaagtattttaaagtaaattagacaaatcatgacatttcatacccaatactttaacatgcatctctaaaaaccaatttcttacaaagccacataattttattacgcctaataaggagacgtagcagggtagtgtgaaggaggggaaatcgtggcgatgggttaggtatacacttagaatgaagtgcagactccacacggaggccctcccgaggcccaaccggacctgacctgggtttgcttctctgtcttcacctgccagcactaacccgcagctatactccagccacacaggacttctttgagttctttcagtgaccaatctctttctcgcctcagggcctttgtactggcggttccttccgccggacacgtcgggtttcctcgtttttgcggactggcgctttctgatttcagagactctccgcaacagaaccatctcaagtgggtctacctcctcgcctttttttgttgttgttgttgcttggctgcgcttctgacagggcaggccgtgatgatgtttgtttatgagttaggtctgactgttcgttggtgcttaagatccccaccgggtccctagggcctgtgcgtaccgcgcacctgtgcacgtcctgcgcgcagctgcaggcgactccgctctggctcgtcgctgctgtttcctgctgggggtgccgaccctgtcccacgctagctgggtgacttcccccaaccgcagagacagcggcgacccggggcctcagacctgcccccgcatctcgccggcgccaggcagtgggaagtcaggttcttccgccacctcccagccaggactctgccaccctccctcaggatgcctgagggccccgagctgcacctggccagccagtttgtgaatgaggcctgcagggcgctggtgttcggcggctgcgtggagaagtcctctgtcagccgcaaccctgaggtgccctttgagagcagtgcctaccgcatctcagcttcagcccgcggcaaggagctgcgcctgatactgagccctctgcctggggcccagccccaacaggagccactggccctggtcttccgcttcggcatgtccggctcttttcagctggtgccccgcgaggagctgccacgccatgcccacctgcgcttttacacggccccgcctggcccccggctcgccctatgtttcgtggacatccgccggttcggccgctgggaccttgggggaaagtggcagccgggccgcgggccctgtgtcttgcaggagtaccagcagttcaggggagaatgtgctacgaaacctagcggataaggcctttgaccggcccatctgcgaggccctcctggaccagaggttcttcaatggcattggcaactatctgcgggcagagatcctgtaccggctgaagatccccccctttgagaaggcccgctcggtcctggaggccctgcagcagcacaggccgagcccggagctgaccctgagccagaagataaggaccaagctgcagaatccagacctgctggagctatgtcactcagtgcccaaggaagtggtccagttggggggcagaggctacgggtcagagagcggggaggaggactttgctgcctttcgagcctggctgcgctgctatggcatgccaggcatgagctccctgcaggaccggcatggccgtaccatctggttccaggttgggccctactgttcacacaggcagagaccccaggaggctgatgggtggaaacgtggggtcacaataactggggtggtgatgctcagggtctgtctagaccctccaaggaccacactgttcctgagggtcacacccctcccctcccatgcgtcccagggttgcagctagtggaagtagcccaaggcaggtagcccaagtgaaagtagccaagggcagagcagctttgctgatgtggactctaacatgggggatgtcctagaggcttcctaagggagaagctacactgatctggatgggtgtgtgtgagtcctgcctctccaaggaataccgcccctgtgccaacccaggctgattcctgaattatccccatcccattttagggggatcctggaccgttggcacccaaagcgcaagtcccgcaaaaagaaatccaaggccacacagctgagtcctgaggacagagtggaggacgctttgcctccaagcaaggccccttccaggacacgaagggcaaagagagaccttcctaagaggactgcaacccagcggcctgaggggaccagcctccagcaggacccagaagctcccacagtgcccaagaaggggaggaggaaggggcgacaggcagcctctggccactgcagaccccggaaggtcaaggctgacatcccatccttggaaccagaggggacctcagcctcttagcaggaggctctccttgcttgcactcaccctttcttattgtcttgccctgcatctgggggtctgaatttttgggagcaggcaatatctgaaggtgcaaacaggccctacggctgttccctgcacaactctcatggttttaattgtaccccatcttccacatctttaaagctcatgtgaaaaatgctgcatttttaataaactgatacatttgaacttc

SEQ ID NO: 282164 - DNA, 2945 bp, Homo sapiens
gttaattctattcatttattatggcagaagtattttaaagtaaattagacaaatcatgacatttcatacccaatactttaacatgcatctctaaaaaccaatttcttacaaagccacataattttattacgcctaataaggagacgtagcagggtagtgtgaaggaggggaaatcgtggcgatgggttaggtatacacttagaatgaagtgcagactccacacggaggccctcccgaggcccaaccggacctgacctgggtttgcttctctgtcttcacctgccagcactaacccgcagctatactccagccacacaggacttctttgagttctttcagtgaccaatctctttctcgcctcagggcctttgtactggcggttccttccgccggacacgtcgggtttcctcgtttttgcggactggcgctttctgatttcagagactctccgcaacagaaccatctcaagtgggtctacctcctcgcctttttttgttgttgttgttgcttggctgcgcttctgacagggcaggccgtgatgatgtttgtttatgagttaggtctgactgttcgttggtgcttaagatccccaccgggtccctagggcctgtgcgtaccgcgcacctgtgcacgtcctgcgcgcagctgcaggcgactccgctctggctcgtcgctgctgtttcctgctgggggtgccgaccctgtcccacgctagctgggtgacttcccccaaccgcagagacagcggcgacccggggcctcagacctgcccccgcatctcgccggcgccaggcagtgggaagtcaggttcttccgccacctcccagccaggatttggagcctcacgttctcccgcaaaacgagccctgtgggtgccaggccaggggcggctcccaggtgtggagggggcaaggtacgggcgtctgccgtcgctaagtgcccccttccacttaaggcacaccttcgcctccgattccgaaccgcccggggacagaggactctgccaccctccctcaggatgcctgagggccccgagctgcacctggccagccagtttgtgaatgaggcctgcagggcgctggtgttcggcggctgcgtggagaagtcctctgtcagccgcaaccctgaggtgccctttgagagcagtgcctaccgcatctcagcttcagcccgcggcaaggagctgcgcctgatactgagccctctgcctggggcccagccccaacaggagccactggccctggtcttccgcttcggcatgtccggctcttttcagctggtgccccgcgaggagctgccacgccatgcccacctgcgcttttacacggccccgcctggcccccggctcgccctatgtttcgtggacatccgccggttcggccgctgggaccttgggggaaagtggcagccgggccgcgggccctgtgtcttgcaggagtaccagcagttcaggggagaatgtgctacgaaacctagcggataaggcctttgaccggcccatctgcgaggccctcctggaccagaggttcttcaatggcattggcaactatctgcgggcagagatcctgtaccggctgaagatccccccctttgagaaggcccgctcggtcctggaggccctgcagcagcacaggccgagcccggagctgaccctgagccagaagataaggaccaagctgcagaatccagacctgctggagctatgtcactcagtgcccaaggaagtggtccagttggggggcagaggctacgggtcagagagcggggaggaggactttgctgcctttcgagcctggctgcgctgctatggcatgccaggcatgagctccctgcaggaccggcatggccgtaccatctggttccaggttgggccctactgttcacacaggcagagaccccaggaggctgatgggtggaaacgtggggtcacaataactggggtggtgatgctcagggtctgtctagaccctccaaggaccacactgttcctgagggtcacacccctcccctcccatgcgtcccagggttgcagctagtggaagtagcccaaggcaggtagcccaagtgaaagtagccaagggcagagcagctttgctgatgtggactctaacatgggggatgtcctagaggcttcctaagggagaagctacactgatctggatgggtgtgtgtgagtcctgcctctccaaggaataccgcccctgtgccaacccaggctgattcctgaattatccccatcccattttagggggatcctggaccgttggcacccaaaggtaagctactcctaatgtaataggctaagagagcagaaaggacttcacgcctgcaagggctacagcacccttctccaccctatccccctgcaaccctgggagtcacccctgggcaggataggaccctccaactccaacaccagtgtcctgcagggcgcaagtcccgcaaaaagaaatccaaggccacacagctgagtcctgaggacagagtggaggacgctttgcctccaagcaaggccccttccaggacacgaagggcaaagagagaccttcctaagaggactgcaacccagcggcctgaggggaccagcctccagcaggacccagaagctcccacagtgcccaagaaggggaggaggaaggggcgacaggcagcctctggccactgcagaccccggaaggtcaaggctgacatcccatccttggaaccagaggggacctcagcctcttagcaggaggctctccttgcttgcactcaccctttcttattgtcttgccctgcatctgggggtctgaatttttgggagcaggcaatatctgaaggtgcaaacaggccctacggctgttccctgcacaactctcatggttttaattgtaccccatcttccacatctttaaagctcatgtgaaaaatgctgcatttttaataaactgatacatttgaacttc

SEQ ID NO: 282165 - DNA, 2200 bp, Homo sapiens
ctcccagcggctcccagcgcgctcccgggcaccgcccgttctggcgttaaccctttagtggctgcagtggcgacgagcggaacggagtgcgggttcccggggagggggcgtgcaggatcgggttgtggggggtgcgctgtagggctaaggagaagatgagctttggggggccctgaggaggaggggagtcaggattaaccgaggacagggtcgcagcgggggcatggggaggacgggcccgagagcgccgctcctccccaaaactaggatttggagcctcacgttctcccgcaaaacgagccctgcacaccttcgcctccgattccgaaccgcccggggacagaggcaagtggcaaagcagggagggcggaggactctgccaccctccctcaggatgcctgagggccccgagctgcacctggccagccagtttgtgaatgaggcctgcagggcgctggtgttcggcggctgcgtggagaagtcctctgtcagccgcaaccctgaggtgccctttgagagcagtgcctaccgcatctcagcttcagcccgcggcaaggagctgcgcctgatactgagccctctgcctggggcccagccccaacaggagccactggccctggtcttccgcttcggcatgtccggctcttttcagctggtgccccgcgaggagctgccacgccatgcccacctgcgcttttacacggccccgcctggcccccggctcgccctatgtttcgtggacatccgccggttcggccgctgggaccttgggggaaagtggcagccgggccgcgggccctgtgtcttgcaggagtaccagcagttcaggctgaagatccccccctttgagaaggcccgctcggtcctggaggccctgcagcagcacaggccgagcccggagctgaccctgagccagaagataaggaccaagctgcagaatccagacctgctggagctatgtcactcagtgcccaaggaagtggtccagttggggggcagaggctacgggtcagagagcggggaggaggactttgctgcctttcgagcctggctgcgctgctatggcatgccaggcatgagctccctgcaggaccggcatggccgtaccatctggttccaggttgggccctactgttcacacaggcagagaccccaggaggctgatgggtggaaacgtggggtcacaataactggggtggtgatgctcagggtctgtctagaccctccaaggaccacactgttcctgagggtcacacccctcccctcccatgcgtcccagggttgcagctagtggaagtagcccaaggcaggtagcccaagtgaaagtagccaagggcagagcagctttgctgatgtggactctaacatgggggatgtcctagaggcttcctaagggagaagctacactgatctggatgggtgtgtgtgagtcctgcctctccaaggaataccgcccctgtgccaacccaggctgattcctgaattatccccatcccattttagggggatcctggaccgttggcacccaaaggtaagctactcctaatgtaataggctaagagagcagaaaggacttcacgcctgcaagggctacagcacccttctccaccctatccccctgcaaccctgggagtcacccctgggcaggataggaccctccaactccaacaccagtgtcctgcagggcgcaagtcccgcaaaaagaaatccaaggccacacagctgagtcctgaggacagagtggaggacgctttgcctccaagcaaggccccttccaggacacgaagggcaaagagagaccttcctaagaggactgcaacccagcggcctgaggggaccagcctccagcaggacccagaagctcccacagtgcccaagaaggggaggaggaaggggcgacaggcagcctctggccactgcagaccccggaaggtcaaggctgacatcccatccttggaaccagaggggacctcagcctcttagcaggaggctctccttgcttgcactcaccctttcttattgtcttgccctgcatctgggggtctgaatttttgggagcaggcaatatctgaaggtgcaaacaggccctacggctgttccctgcacaactctcatggttttaattgtaccccatcttccacatctttaaagctcatgtgaaaaatgctgcatttttaataaactgatacatttgaacttc

SEQ ID NO: 282166 - DNA, 1697 bp, Homo sapiens
cgagtcttgctctgtcgcccaggctggagtgcaggggcgcaatctcggctcactgcaagctccgcctcccggttcacaccattctcctgcctcagcctcccgagtagctgggactacaggcgcccaccaccacgcccggctaatttttgtattttttgtagagacagggtctccctatgttgcccaggctggtattgaactcctggcccctagggattctcccatctaagcttcccaaagtgtcgggattacaggtgtggccactgcacagggccaggacaaggattcttaatcccactccaggatgggaaacccatggccgagtgggaagaaaccagctgaggtcacatcaccagaggagggagagtgtggcccctgactcagtccatcagcttgtgtagctgaggtctgggccaggtctaaccaggctccccactcctcccaacctgagcctgccctctgatctctgcctgttcctctgtcccacagggggcagaggctacgggtcagagagcggggaggaggactttgctgcctttcgagcctggctgcgctgctatggcatgccaggcatgagctccctgcaggaccggcatggccgtaccatctggttccaggttgggccctactgttcacacaggcagagaccccaggaggctgatgggtggaaacgtggggtcacaataactggggtggtgatgctcagggtctgtctagaccctccaaggaccacactgttcctgagggtcacacccctcccctcccatgcgtcccagggttgcagctagtggaagtagcccaaggcaggtagcccaagtgaaagtagccaagggcagagcagctttgctgatgtggactctaacatgggggatgtcctagaggcttcctaagggagaagctacactgatctggatgggtgtgtgtgagtcctgcctctccaaggaataccgcccctgtgccaacccaggctgattcctgaattatccccatcccattttagggggatcctggaccgttggcacccaaaggtaagctactcctaatgtaataggctaagagagcagaaaggacttcacgcctgcaagggctacagcacccttctccaccctatccccctgcaaccctgggagtcacccctgggcaggataggaccctccaactccaacaccagtgtcctgcagggcgcaagtcccgcaaaaagaaatccaaggccacacagctgagtcctgaggacagagtggaggacgctttgcctccaagcaaggccccttccaggacacgaagggcaaagagagaccttcctaagaggactgcaacccagcggcctgaggggaccagcctccagcaggacccagaagctcccacagtgcccaagaaggggaggaggaaggggcgacaggcagcctctggccactgcagaccccggaaggtcaaggctgacatcccatccttggaaccagaggggacctcagcctcttagcaggaggctctccttgcttgcactcaccctttcttattgtcttgccctgcatctgggggtctgaatttttgggagcaggcaatatctgaaggtgcaaacaggccctacggctgttccctgcacaactctcatggttttaattgtaccccatcttccacatctttaaagctcatgtgaaaaatgctgcatttttaataaactgatacatttgaacttc

SEQ ID NO: 282167 - DNA, 2720 bp, Homo sapiens
gttaattctattcatttattatggcagaagtattttaaagtaaattagacaaatcatgacatttcatacccaatactttaacatgcatctctaaaaaccaatttcttacaaagccacataattttattacgcctaataaggagacgtagcagggtagtgtgaaggaggggaaatcgtggcgatgggttaggtatacacttagaatgaagtgcagactccacacggaggccctcccgaggcccaaccggacctgacctgggtttgcttctctgtcttcacctgccagcactaacccgcagctatactccagccacacaggacttctttgagttctttcagtgaccaatctctttctcgcctcagggcctttgtactggcggttccttccgccggacacgtcgggtttcctcgtttttgcggactggcgctttctgatttcagagactctccgcaacagaaccatctcaagtgggtctacctcctcgcctttttttgttgttgttgttgcttggctgcgcttctgacagggcaggccgtgatgatgtttgtttatgagttaggtctgactgttcgttggtgcttaagatccccaccgggtccctagggcctgtgcgtaccgcgcacctgtgcacgtcctgcgcgcagctgcaggcgactccgctctggctcgtcgctgctgtttcctgctgggggtgccgaccctgtcccacgctagctgggtgacttcccccaaccgcagagacagcggcgacccggggcctcagacctgcccccgcatctcgccggcgccaggcagtgggaagtcaggttcttccgccacctcccagccaggactctgccaccctccctcaggatgcctgagggccccgagctgcacctggccagccagtttgtgaatgaggcctgcagggcgctggtgttcggcggctgcgtggagaagtcctctgtcagccgcaaccctgaggtgccctttgagagcagtgcctaccgcatctcagcttcagcccgcggcaaggagctgcgcctgatactgagccctctgcctggggcccagccccaacaggagccactggccctggtcttccgcttcggcatgtccggctcttttcagctggtgccccgcgaggagctgccacgccatgcccacctgcgcttttacacggccccgcctggcccccggctcgccctatgtttcgtggacatccgccggttcggccgctgggaccttgggggaaagtggcagccgggccgcgggccctgtgtcttgcaggagtaccagcagttcaggggagaatgtgctacgaaacctagcggataaggcctttgaccggcccatctgcgaggccctcctggaccagaggttcttcaatggcattggcaactatctgcgggcagagatcctgtaccggctgaagatccccccctttgagaaggcccgctcggtcctggaggccctgcagcagcacaggccgagcccggagctgaccctgagccagaagataaggaccaagctgcagaatccagacctgctggagctatgtcactcagtgcccaaggaagtggtccagttggggggcagaggctacgggtcagagagcggggaggaggactttgctgcctttcgagcctggctgcgctgctatggcatgccaggcatgagctccctgcaggaccggcatggccgtaccatctggttccaggttgggccctactgttcacacaggcagagaccccaggaggctgatgggtggaaacgtggggtcacaataactggggtggtgatgctcagggtctgtctagaccctccaaggaccacactgttcctgagggtcacacccctcccctcccatgcgtcccagggttgcagctagtggaagtagcccaaggcaggtagcccaagtgaaagtagccaagggcagagcagctttgctgatgtggactctaacatgggggatgtcctagaggcttcctaagggagaagctacactgatctggatgggtgtgtgtgagtcctgcctctccaaggaataccgcccctgtgccaacccaggctgattcctgaattatccccatcccattttagggggatcctggaccgttggcacccaaaggtaagctactcctaatgtaataggctaagagagcagaaaggacttcacgcctgcaagggctacagcacccttctccaccctatccccctgcaaccctgggagtcacccctgggcaggataggaccctccaactccaacaccagtgtcctgcaggggacgctttgcctccaagcaaggccccttccaggacacgaagggcaaagagagaccttcctaagaggactgcaacccagcggcctgaggggaccagcctccagcaggacccagaagctcccacagtgcccaagaaggggaggaggaaggggcgacaggcagcctctggccactgcagaccccggaaggtcaaggctgacatcccatccttggaaccagaggggacctcagcctcttagcaggaggctctccttgcttgcactcaccctttcttattgtcttgccctgcatctgggggtctgaatttttgggagcaggcaatatctgaaggtgcaaacaggccctacggctgttccctgcacaactctcatggttttaattgtaccccatcttccacatctttaaagctcatgtgaaaaatgctgcatttttaataaactgatacatttgaacttc

SEQ ID NO: 282168 - DNA, 836 bp, Homo sapiens
ccccctggtcccctcaggccgctgggttgcagtcctcttaggaaggtctctctctgcctttcgagcctggctgcgctgctatggcatgccaggcatgagctccctgcaggaccggcatggccgtaccatctggttccagggggatcctggaccgttggcacccaaaggtaagctactcctaatgtaataggctaagagagcagaaaggacttcacgcctgcaagggctacagcacccttctccaccctatccccctgcaaccctgggagtcacccctgggcaggataggaccctccaactccaacaccagtgtcctgcagggcgcaagtcccgcaaaaagaaatccaaggccacacagctgagtcctgaggacagagtggaggacgctttgcctccaagcaaggccccttccaggacacgaagggcaaagagagaccttcctaagaggactgcaacccagcggcctgaggggaccagcctccagcaggacccagaagctcccacagtgcccaagaaggggaggaggaaggggcgacaggcagcctctggccactgcagaccccggaaggtcaaggctgacatcccatccttggaaccagaggggacctcagcctcttagcaggaggctctccttgcttgcactcaccctttcttattgtcttgccctgcatctgggggtctgaatttttgggagcaggcaatatctgaaggtgcaaacaggccctacggctgttccctgcacaactctcatggttttaattgtaccccatcttccacatctttaaagctcatgtgaaaaatgctgcatttttaataaactgatacatttgaacttc

SEQ ID NO: 282169 - DNA, 3085 bp, Homo sapiens
gttaattctattcatttattatggcagaagtattttaaagtaaattagacaaatcatgacatttcatacccaatactttaacatgcatctctaaaaaccaatttcttacaaagccacataattttattacgcctaataaggagacgtagcagggtagtgtgaaggaggggaaatcgtggcgatgggttaggtatacacttagaatgaagtgcagactccacacggaggccctcccgaggcccaaccggacctgacctgggtttgcttctctgtcttcacctgccagcactaacccgcagctatactccagccacacaggacttctttgagttctttcagtgaccaatctctttctcgcctcagggcctttgtactggcggttccttccgccggacacgtcgggtttcctcgtttttgcggactggcgctttctgatttcagagactctccgcaacagaaccatctcaagtgggtctacctcctcgcctttttttgttgttgttgttgcttggctgcgcttctgacagggcaggccgtgatgatgtttgtttatgagttaggtctgactgttcgttggtgcttaagatccccaccgggtccctagggcctgtgcgtaccgcgcacctgtgcacgtcctgcgcgcagctgcaggcgactccgctctggctcgtcgctgctgtttcctgctgggggtgccgaccctgtcccacgctagctgggtgacttcccccaaccgcagagacagcggcgacccggggcctcagacctgcccccgcatctcgccggcgccaggcagtgggaagtcaggttcttccgccacctcccagccaggactctgccaccctccctcaggatgcctgagggccccgagctgcacctggccagccagtttgtgaatgaggcctgcagggcgctggtgttcggcggctgcgtggagaagtcctctgtcagccgcaaccctgaggtgccctttgagagcagtgcctaccgcatctcagcttcagcccgcggcaaggagctgcgcctgatactgagccctctgcctggggcccagccccaacaggagccactggccctggtcttccgcttcggcatgtccggctcttttcagctggtgccccgcgaggagctgccacgccatgcccacctgcgcttttacacggccccgcctggcccccggctcgccctatgtttcgtggacatccgccggttcggccgctgggaccttgggggaaagtggcagccgggccgcgggccctgtgtcttgcaggagtaccagcagttcaggggagaatgtgctacgaaacctagcggataaggcctttgaccggcccatctgcgaggccctcctggaccagaggttcttcaatggcattggcaactatctgcgggcagagatcctgtaccggctgaagatccccccctttgagaaggcccgctcggtcctggaggccctgcagcagcacaggccgagcccggagctgaccctgagccagaagataaggaccaagctgcagaatccagacctgctggagctatgtcactcagtgcccaaggaagtggtccagttggggggcagaggctacgggtcagagagcggggaggaggactttgctgcctttcgagcctggctgcgctgctatggcatgccaggcatgagctccctgcaggaccggcatggccgtaccatctggttccaggttgggccctactgttcacacaggcagagaccccaggaggctgatgggtggaaacgtggggtcacaataactggggtggtgatgctcagggtctgtctagaccctccaaggaccacactgttcctgagggtcacacccctcccctcccatgcgtcccagggttgcagctagtggaagtagcccaaggcaggtagcccaagtgaaagtagccaagggcagagcagctttgctgatgtggactctaacatgggggatgtcctagaggcttcctaagggagaagctacactgatctggatgggtgtgtgtgagtcctgcctctccaaggaataccgcccctgtgccaacccaggctgattcctgaattatccccatcccattttagggggatcctggaccgttggcacccaaaggtaagctactcctaatgtaataggctaagagagcagaaaggacttcacgcctgcaagggctacagcacccttctccaccctatccccctgcaaccctgggagtcacccctgggcaggataggaccctccaactccaacaccagtgtcctgcagggcgcaagtcccgcaaaaagaaatccaaggccacacagctgagtcctgaggacagagtggaggtatggctgcctgctcccgcctcctcccctgcactctgcagccctggctgcccctcccaggcagctgccttaccctaagagggcggggggagtggtgggccctaaccaacctctgaactgctttctgagcccctcagggacccgtgtctcctccatccaggacgctttgcctccaagcaaggccccttccaggacacgaagggcaaagagagaccttcctaagaggactgcaacccagcggcctgaggggaccagcctccagcaggacccagaagctcccacagtgcccaagaaggggaggaggaaggggcgacaggcagcctctggtgggctttcctcatcactcccagaaactggctctacaggagaggatgggatggtggcctaggagcgcgtgtacaaaggtgggagaaaggctgccatggcagcccctggagtcttagctgaccatcttgcctgttcttcccccaggccactgcagaccccggaaggtcaaggctgacatcccatccttggaaccagaggggacctcagcctcttagcaggaggctctccttgcttgcactcaccctttcttattgtcttgccctgcatctgggggtctgaatttttgggagcaggcaatatctgaaggtgcaaacaggccctacggctgttccctgcacaactctcatggttttaattgtaccccatcttccacatctttaaagctcatgtgaaaaatgctgcatttttaataaactgatacatttgaacttc

SEQ ID NO: 282170 - DNA, 3339 bp, Homo sapiens
gttaattctattcatttattatggcagaagtattttaaagtaaattagacaaatcatgacatttcatacccaatactttaacatgcatctctaaaaaccaatttcttacaaagccacataattttattacgcctaataaggagacgtagcagggtagtgtgaaggaggggaaatcgtggcgatgggttaggtatacacttagaatgaagtgcagactccacacggaggccctcccgaggcccaaccggacctgacctgggtttgcttctctgtcttcacctgccagcactaacccgcagctatactccagccacacaggacttctttgagttctttcagtgaccaatctctttctcgcctcagggcctttgtactggcggttccttccgccggacacgtcgggtttcctcgtttttgcggactggcgctttctgatttcagagactctccgcaacagaaccatctcaagtgggtctacctcctcgcctttttttgttgttgttgttgcttggctgcgcttctgacagggcaggccgtgatgatgtttgtttatgagttaggtctgactgttcgttggtgcttaagatccccaccgggtccctagggcctgtgcgtaccgcgcacctgtgcacgtcctgcgcgcagctgcaggcgactccgctctggctcgtcgctgctgtttcctgctgggggtgccgaccctgtcccacgctagctgggtgacttcccccaaccgcagagacagcggcgacccggggcctcagacctgcccccgcatctcgccggcgccaggcagtgggaagtcaggttcttccgccacctcccagccaggactctgccaccctccctcaggatgcctgagggccccgagctgcacctggccagccagtttgtgaatgaggcctgcagggcgctggtgttcggcggctgcgtggagaagtcctctgtcagccgcaaccctgaggtgccctttgagagcagtgcctaccgcatctcagcttcagcccgcggcaaggagctgcgcctgatactgagccctctgcctggggcccagccccaacaggagccactggccctggtcttccgcttcggcatgtccggctcttttcagctggtgccccgcgaggagctgccacgccatgcccacctgcgcttttacacggccccgcctggcccccggctcgccctatgtttcgtggacatccgccggttcggccgctgggaccttgggggaaagtggcagccgggccgcgggccctgtgtcttgcaggagtaccagcagttcaggggagaatgtgctacgaaacctagcggataaggcctttgaccggcccatctgcgaggccctcctggaccagaggttcttcaatggcattggcaactatctgcgggcagagatcctgtaccggctgaagatccccccctttgagaaggcccgctcggtcctggaggccctgcagcagcacaggccgagcccggagctgaccctgagccagaagataaggaccaagctgcagaatccagacctgctggagctatgtcactcagtgcccaaggaagtggtccagttggggggcagaggctacgggtcagagagcggggaggaggactttgctgcctttcgagcctggctgcgctgctatggcatgccaggcatgagctccctgcaggaccggcatggccgtaccatctggttccaggttgggccctactgttcacacaggcagagaccccaggaggctgatgggtggaaacgtggggtcacaataactggggtggtgatgctcagggtctgtctagaccctccaaggaccacactgttcctgagggtcacacccctcccctcccatgcgtcccagggttgcagctagtggaagtagcccaaggcaggtagcccaagtgaaagtagccaagggcagagcagctttgctgatgtggactctaacatgggggatgtcctagaggcttcctaagggagaagctacactgatctggatgggtgtgtgtgagtcctgcctctccaaggaataccgcccctgtgccaacccaggctgattcctgaattatccccatcccattttagggggatcctggaccgttggcacccaaaggtaagctactcctaatgtaataggctaagagagcagaaaggacttcacgcctgcaagggctacagcacccttctccaccctatccccctgcaaccctgggagtcacccctgggcaggataggaccctccaactccaacaccagtgtcctgcagggcgcaagtcccgcaaaaagaaatccaaggccacacagctgagtcctgaggacagagtggaggtatggctgcctgctcccgcctcctcccctgcactctgcagccctggctgcccctcccaggcagctgccttaccctaagagggcggggggagtggtgggccctaaccaacctctgaactgctttctgagcccctcagggacccgtgtctcctccatccaggacgctttgcctccaagcaaggccccttccaggacacgaagggcaaagagagaccttcctaagaggactgcaacccagcggcctgaggggaccagcctccagcaggacccagaagctcccacagtgcccaagaaggggaggaggaaggggcgacaggcagcctctggccactgcagaccccggaaggtcaaggctgacatcccatccttggaaccagaggggacctcagcctcttagcaggaggctctccttgcttgcactcaccctttcttattgtcttgccctgcatctgggggtctgaatttttgggagcaggcaatatctgaaggtgcaaacaggccctacggctgttccctgcacaactctcatggttttaattgtaccccatcttccacatctttaaagctcatgtgaaaaatgctgcatttttaataaactgatacatttgaacttcttggcacctcttggtctgagatggccaggtaggaagggcctgctgtccggtcctggtgacagaaggcccagctcctcacaaggcaaactgagcccccatcccagtcctcaaggctctgactctatcagaggacagtttgcctctgcaaggacagcccctcagaggtggtacaaagaccctggccccaggcagcccaggagccagagctcctccagtccagattctccagggtccagggctgccccctcatcctggcaggagccaggcaaaacccacccttcggcccctccccagccccaggcccaggccctttacctgctggcacaggggaggggcttctcaactcatggtctcttcactggcttttggtggctcgaggtccccagtctctcctgtggg

SEQ ID NO: 282171 - DNA, 744 bp, Homo sapiens
tcaccttgatgttcccatttaacagataggaagaaacaggttctctgagcccctctccccatcccatggagggtggggatgggtcttacgcacccagaccgtgttcctccagggagaatgtgctacgaaacctagcggataaggcctttgaccggcccatctgcgaggccctcctggaccagaggttcttcaatggcattggcaactatctgcgggcagagatcctgtaccggctgaagatccccccctttgagaaggcccgctcggtcctggaggccctgcagcagcacaggccgagcccggagctgaccctgagccagaagataaggaccaagctgcagaatccagacctgctggagctatgtcactcagtgcccaaggaagtggtccagttgggtgaggccaaagatggcagcaacctctgcttcagcaaatgattgtgtaaccctggggcacttgtccctctctggacctgattcaccgatttggaagtttgtagccctagctgatactcaatggactaggcctcctcacttgtcaatagtgtttccaggctgggcgcagtggctcatgcctgtaatcccagcacttcgggaggccgagtggggtggctcacctgaggtcaggagttcgagaccatcctggccaacatggtgaaaccccatctttactaaaaatgcaaaaaattagccaggtgtggtggtgggcacctgtaatctcagctactcgggaggatgaggcagg

SEQ ID NO: 282172 - DNA, 194 bp, Homo sapiens
cagccgcagctggccacatgcccatctgaccctccgagttctcctctaaaaatggggctgacagccgctacctcacaaagtccacaccgggctcaacccgctgccttcctccccaacaggactctgccaccctccctcaggatgcctgagggccccgagctgcacctggccagccagtttgtgaatgaggcctg

SEQ ID NO: 282173 - DNA, 1870 bp, Homo sapiens
ctcccagcggctcccagcgcgctcccgggcaccgcccgttctggcgttaaccctttagtggctgcagtggcgacgagcggaacggagtgcgggttcccggggagggggcgtgcaggatcgggttgtggggggtgcgctgtagggctaaggagaagatgagctttggggggccctgaggaggaggggagtcaggattaaccgaggacagggtcgcagcgggggcatggggaggacgggcccgagagcgccgctcctccccaaaactaggatttggagcctcacgttctcccgcaaaacgagccctgtgggtgccaggccaggggcggctcccaggtgtggagggggcaaggtacgggcgtctgccgtcgctaagtgcccccttccacttaaggcacaccttcgcctccgattccgaaccgcccggggacagaggcaagtggcaaagcagggagggcggaggactctgccaccctccctcaggatgcctgagggccccgagctgcacctggccagccagtttgtgaatgaggcctgcagggcgctggtgttcggcggctgcgtggagaagtcctctgtcagccgcaaccctgaggtgccctttgagagcagtgcctaccgcatctcagcttcagcccgcggcaaggagctgcgcctgatactgagccctctgcctggggcccagccccaacaggagccactggccctggtcttccgcttcggcatgtccggctcttttcagctggtgccccgcgaggagctgccacgccatgcccacctgcgcttttacacggccccgcctggcccccggctcgccctatgtttcgtggacatccgccggttcggccgctgggaccttgggggaaagtggcagccgggccgcgggccctgtgtcttgcaggagtaccagcagttcaggggagaatgtgctacgaaacctagcggataaggcctttgaccggcccatctgcgaggccctcctggaccagaggttcttcaatggcattggcaactatctgcgggcagagatcctgtaccggctgaagatccccccctttgagaaggcccgctcggtcctggaggccctgcagcagcacaggccgagcccggagctgaccctgagccagaagataaggaccaagctgcagaatccagacctgctggagctatgtcactcagtgcccaaggaagtggtccagttggggggcagaggctacgggtcagagagcggggaggaggactttgctgcctttcgagcctggctgcgctgctatggcatgccaggcatgagctccctgcaggaccggcatggccgtaccatctggttccagggggatcctggaccgttggcacccaaagcgcaagtcccgcaaaaagaaatccaaggccacacagctgagtcctgaggacagagtggaggacgctttgcctccaagcaaggccccttccaggacacgaagggcaaagagagaccttcctaagaggactgcaacccagcggcctgaggggaccagcctccagcaggacccagaagctcccacagtgcccaagaaggggaggaggaaggggcgacaggcagcctctggccactgcagaccccggaaggtcaaggctgacatcccatccttggaaccagaggggacctcagcctcttagcaggaggctctccttgcttgcactcaccctttcttattgtcttgccctgcatctgggggtctgaatttttgggagcaggcaatatctgaaggtgcaaacaggccctacggctgttccctgcacaactctcatggttttaattgtaccccatcttccacatctttaaagctcatgtgaaaaatgctgcatttttaataaactgatacatttgaacttc

SEQ ID NO: 282174 - DNA, 3105 bp, Homo sapiens
ctcccagcggctcccagcgcgctcccgggcaccgcccgttctggcgttaaccctttagtggctgcagtggcgacgagcggaacggagtgcgggttcccggggagggggcgtgcaggatcgggttgtggggggtgcgctgtagggctaaggagaagatgagctttggggggccctgaggaggaggggagtcaggattaaccgaggacagggtcgcagcgggggcatggggaggacgggcccgagagcgccgctcctccccaaaactaggatttggagcctcacgttctcccgcaaaacgagccctgtgggtgccaggccaggggcggctcccaggtgtggagggggcaaggtacgggcgtctgccgtcgctaagtgcccccttccacttaaggcacaccttcgcctccgattccgaaccgcccggggacagaggcaagtggcaaagcagggagggcggaggtgaggagtcgataccccccaccccagggaccaggcgctgccgcgggccctttccctcccccaggcccggggcaggagctcggggagcccttcctggtgcccgccgtcctcctgcggagccatggggagcggctccagcgcatggcggcagcccgcccgcctcgtcctggcccctgccctgacccgggggcggccgcggggatgtccggtccgtggggcaggcccggttctcgctgcggccaagcggccgattcggccgctcccgccgctcccccgcgccaggccgagcttcgctctttccctcggtggtgagcggccagatccaggcgggtcctaagtgtggggggaggggggcgcagggaggggcggccacgcgatcctaagaccctttcagatggtgggagagcctggagaaagagacagcgtgtgcggagggggtgctccctcagatggggggtcaggaagtctccctcaagtgtctgggacagagggacagcaggggccaaggcggagatgagatccgtgagtgaggggagccgggaagaagtaaggctgcagccgcggccccgcaaggattgggactttcgtctaaacgcggtggaagcccatggaaggaagcggttagcagcaaggcagagtcctgctccctctgcagccccagctcccagcgccctgggctttccaggcacctgtccgggactctgccaccctccctcaggatgcctgagggccccgagctgcacctggccagccagtttgtgaatgaggcctgcagggcgctggtgttcggcggctgcgtggagaagtcctctgtcagccgcaaccctgaggtgccctttgagagcagtgcctaccgcatctcagcttcagcccgcggcaaggagctgcgcctgatactgagccctctgcctggggcccagccccaacaggagccactggccctggtcttccgcttcggcatgtccggctcttttcagctggtgccccgcgaggagctgccacgccatgcccacctgcgcttttacacggccccgcctggcccccggctcgccctatgtttcgtggacatccgccggttcggccgctgggaccttgggggaaagtggcagccgggccgcgggccctgtgtcttgcaggagtaccagcagttcaggggagaatgtgctacgaaacctagcggataaggcctttgaccggcccatctgcgaggccctcctggaccagaggttcttcaatggcattggcaactatctgcgggcagagatcctgtaccggctgaagatccccccctttgagaaggcccgctcggtcctggaggccctgcagcagcacaggccgagcccggagctgaccctgagccagaagataaggaccaagctgcagaatccagacctgctggagctatgtcactcagtgcccaaggaagtggtccagttggggggcagaggctacgggtcagagagcggggaggaggactttgctgcctttcgagcctggctgcgctgctatggcatgccaggcatgagctccctgcaggaccggcatggccgtaccatctggttccaggttgggccctactgttcacacaggcagagaccccaggaggctgatgggtggaaacgtggggtcacaataactggggtggtgatgctcagggtctgtctagaccctccaaggaccacactgttcctgagggtcacacccctcccctcccatgcgtcccagggttgcagctagtggaagtagcccaaggcaggtagcccaagtgaaagtagccaagggcagagcagctttgctgatgtggactctaacatgggggatgtcctagaggcttcctaagggagaagctacactgatctggatgggtgtgtgtgagtcctgcctctccaaggaataccgcccctgtgccaacccaggctgattcctgaattatccccatcccattttagggggatcctggaccgttggcacccaaaggtaagctactcctaatgtaataggctaagagagcagaaaggacttcacgcctgcaagggctacagcacccttctccaccctatccccctgcaaccctgggagtcacccctgggcaggataggaccctccaactccaacaccagtgtcctgcagggcgcaagtcccgcaaaaagaaatccaaggccacacagctgagtcctgaggacagagtggaggacgctttgcctccaagcaaggccccttccaggacacgaagggcaaagagagaccttcctaagaggactgcaacccagcggcctgaggggaccagcctccagcaggacccagaagctcccacagtgcccaagaaggggaggaggaaggggcgacaggcagcctctggccactgcagaccccggaaggtcaaggctgacatcccatccttggaaccagaggggacctcagcctcttagcaggaggctctccttgcttgcactcaccctttcttattgtcttgccctgcatctgggggtctgaatttttgggagcaggcaatatctgaaggtgcaaacaggccctacggctgttccctgcacaactctcatggttttaattgtaccccatcttccacatctttaaagctcatgtgaaaaatgctgcatttttaataaactgatacatttgaacttc

SEQ ID NO: 282175 - DNA, 2346 bp, Homo sapiens
gttaattctattcatttattatggcagaagtattttaaagtaaattagacaaatcatgacatttcatacccaatactttaacatgcatctctaaaaaccaatttcttacaaagccacataattttattacgcctaataaggagacgtagcagggtagtgtgaaggaggggaaatcgtggcgatgggttaggtatacacttagaatgaagtgcagactccacacggaggccctcccgaggcccaaccggacctgacctgggtttgcttctctgtcttcacctgccagcactaacccgcagctatactccagccacacaggacttctttgagttctttcagtgaccaatctctttctcgcctcagggcctttgtactggcggttccttccgccggacacgtcgggtttcctcgtttttgcggactggcgctttctgatttcagagactctccgcaacagaaccatctcaagtgggtctacctcctcgcctttttttgttgttgttgttgcttggctgcgcttctgacagggcaggccgtgatgatgtttgtttatgagttaggtctgactgttcgttggtgcttaagatccccaccgggtccctagggcctgtgcgtaccgcgcacctgtgcacgtcctgcgcgcagctgcaggcgactccgctctggctcgtcgctgctgtttcctgctgggggtgccgaccctgtcccacgctagctgggtgacttcccccaaccgcagagacagcggcgacccggggcctcagacctgcccccgcatctcgccggcgccaggcagtgggaagtcaggttcttccgccacctcccagccaggactctgccaccctccctcaggatgcctgagggccccgagctgcacctggccagccagtttgtgaatgaggcctgcagggcgctggtgttcggcggctgcgtggagaagtcctctgtcagccgcaaccctgaggtgccctttgagagcagtgcctaccgcatctcagcttcagcccgcggcaaggagctgcgcctgatactgagccctctgcctggggcccagccccaacaggagccactggccctggtcttccgcttcggcatgtccggctcttttcagctggtgccccgcgaggagctgccacgccatgcccacctgcgcttttacacggccccgcctggcccccggctcgccctatgtttcgtggacatccgccggttcggccgctgggaccttgggggaaagtggcagccgggccgcgggccctgtgtcttgcaggagtaccagcagttcaggggagaatgtgctacgaaacctagcggataaggcctttgaccggcccatctgcgaggccctcctggaccagaggttcttcaatggcattggcaactatctgcgggcagagatcctgtaccggctgaagatccccccctttgagaaggcccgctcggtcctggaggccctgcagcagcacaggccgagcccggagctgaccctgagccagaagataaggaccaagctgcagaatccagacctgctggagctatgtcactcagtgcccaaggaagtggtccagttggggggcagaggctacgggtcagagagcggggaggaggactttgctgcctttcgagcctggctgcgctgctatggcatgccaggcatgagctccctgcaggaccggcatggccgtaccatctggttccaggctaagagagcagaaaggacttcacgcctgcaagggctacagcacccttctccaccctatccccctgcaaccctgggagtcacccctgggcaggataggaccctccaactccaacaccagtgtcctgcagggcgcaagtcccgcaaaaagaaatccaaggccacacagctgagtcctgaggacagagtggaggacgctttgcctccaagcaaggccccttccaggacacgaagggcaaagagagaccttcctaagaggactgcaacccagcggcctgaggggaccagcctccagcaggacccagaagctcccacagtgcccaagaaggggaggaggaaggggcgacaggcagcctctggccactgcagaccccggaaggtcaaggctgacatcccatccttggaaccagaggggacctcagcctcttagcaggaggctctccttgcttgcactcaccctttcttattgtcttgccctgcatctgggggtctgaatttttgggagcaggcaatatctgaaggtgcaaacaggccctacggctgttccctgcacaactctcatggttttaattgtaccccatcttccacatctttaaagctcatgtgaaaaatgctgcatttttaataaactgatacatttgaacttc

SEQ ID NO: 282176 - DNA, 2473 bp, Homo sapiens
ctcccagcggctcccagcgcgctcccgggcaccgcccgttctggcgttaaccctttagtggctgcagtggcgacgagcggaacggagtgcgggttcccggggagggggcgtgcaggatcgggttgtggggggtgcgctgtagggctaaggagaagatgagctttggggggccctgaggaggaggggagtcaggattaaccgaggacagggtcgcagcgggggcatggggaggacgggcccgagagcgccgctcctccccaaaactaggatttggagcctcacgttctcccgcaaaacgagccctgtgggtgccaggccaggggcggctcccaggtgtggagggggcaaggtacgggcgtctgccgtcgctaagtgcccccttccacttaaggcacaccttcgcctccgattccgaaccgcccggggacagaggcaagtggcaaagcagggagggcggaggtgaggagtcgataccccccaccccagggaccaggcgctgccgcgggccctttccctcccccaggcccggggcaggagctcggggagcccttcctggtgcccgccgtcctcctgcggagccatggggagcggctccagcgcatggcggcagcccgcccgcctcgtcctggcccctgccctgacccgggggcggccgcggggatgtccggtccgtggggcaggcccggttctcgctgcggccaagcggccgattcggccgctcccgccgctcccccgcgccaggccgagcttcgctctttccctcggtggtgagcggccagatccaggcgggtcctaagtgtggggggaggggggcgcagggaggggcggccacgcgatcctaagaccctttcagatggtgggagagcctggagaaagagacagcgtgtgcggagggggtgctccctcagatggggggtcaggaagtctccctcaagtgtctgggacagagggacagcaggggccaaggcggagatgagatccgtgagtgaggggagccgggaagaagtaaggctgcagccgcggccccgcaaggattgggactttcgtctaaacgcggtggaagcccatggaaggaagcggttagcagcaaggcagagtcctgctccctctgcagccccagctcccagcgccctgggctttccaggcacctgtccgggactctgccaccctccctcaggatgcctgagggccccgagctgcacctggccagccagtttgtgaatgaggcctgcagggcgctggtgttcggcggctgcgtggagaagtcctctgtcagccgcaaccctgaggtgccctttgagagcagtgcctaccgcatctcagcttcagcccgcggcaaggagctgcgcctgatactgagccctctgcctggggcccagccccaacaggagccactggccctggtcttccgcttcggcatgtccggctcttttcagctggtgccccgcgaggagctgccacgccatgcccacctgcgcttttacacggccccgcctggcccccggctcgccctatgtttcgtggacatccgccggttcggccgctgggaccttgggggaaagtggcagccgggccgcgggccctgtgtcttgcaggagtaccagcagttcaggctgaagatccccccctttgagaaggcccgctcggtcctggaggccctgcagcagcacaggccgagcccggagctgaccctgagccagaagataaggaccaagctgcagaatccagacctgctggagctatgtcactcagtgcccaaggaagtggtccagttggggggatcctggaccgttggcacccaaaggtaagctactcctaatgtaataggctaagagagcagaaaggacttcacgcctgcaagggctacagcacccttctccaccctatccccctgcaaccctgggagtcacccctgggcaggataggaccctccaactccaacaccagtgtcctgcagggcgcaagtcccgcaaaaagaaatccaaggccacacagctgagtcctgaggacagagtggaggacgctttgcctccaagcaaggccccttccaggacacgaagggcaaagagagaccttcctaagaggactgcaacccagcggcctgaggggaccagcctccagcaggacccagaagctcccacagtgcccaagaaggggaggaggaaggggcgacaggcagcctctggccactgcagaccccggaaggtcaaggctgacatcccatccttggaaccagaggggacctcagcctcttagcaggaggctctccttgcttgcactcaccctttcttattgtcttgccctgcatctgggggtctgaatttttgggagcaggcaatatctgaaggtgcaaacaggccctacggctgttccctgcacaactctcatggttttaattgtaccccatcttccacatctttaaagctcatgtgaaaaatgctgcatttttaataaactgatacatttgaacttc

SEQ ID NO: 282177 - DNA, 2821 bp, Homo sapiens
gttaattctattcatttattatggcagaagtattttaaagtaaattagacaaatcatgacatttcatacccaatactttaacatgcatctctaaaaaccaatttcttacaaagccacataattttattacgcctaataaggagacgtagcagggtagtgtgaaggaggggaaatcgtggcgatgggttaggtatacacttagaatgaagtgcagactccacacggaggccctcccgaggcccaaccggacctgacctgggtttgcttctctgtcttcacctgccagcactaacccgcagctatactccagccacacaggacttctttgagttctttcagtgaccaatctctttctcgcctcagggcctttgtactggcggttccttccgccggacacgtcgggtttcctcgtttttgcggactggcgctttctgatttcagagactctccgcaacagaaccatctcaagtgggtctacctcctcgcctttttttgttgttgttgttgcttggctgcgcttctgacagggcaggccgtgatgatgtttgtttatgagttaggtctgactgttcgttggtgcttaagatccccaccgggtccctagggcctgtgcgtaccgcgcacctgtgcacgtcctgcgcgcagctgcaggcgactccgctctggctcgtcgctgctgtttcctgctgggggtgccgaccctgtcccacgctagctgggtgacttcccccaaccgcagagacagcggcgacccggggcctcagacctgcccccgcatctcgccggcgccaggcagtgggaagtcaggttcttccgccacctcccagccaggcacaccttcgcctccgattccgaaccgcccggggacagaggactctgccaccctccctcaggatgcctgagggccccgagctgcacctggccagccagtttgtgaatgaggcctgcagggcgctggtgttcggcggctgcgtggagaagtcctctgtcagccgcaaccctgaggtgccctttgagagcagtgcctaccgcatctcagcttcagcccgcggcaaggagctgcgcctgatactgagccctctgcctggggcccagccccaacaggagccactggccctggtcttccgcttcggcatgtccggctcttttcagctggtgccccgcgaggagctgccacgccatgcccacctgcgcttttacacggccccgcctggcccccggctcgccctatgtttcgtggacatccgccggttcggccgctgggaccttgggggaaagtggcagccgggccgcgggccctgtgtcttgcaggagtaccagcagttcaggggagaatgtgctacgaaacctagcggataaggcctttgaccggcccatctgcgaggccctcctggaccagaggttcttcaatggcattggcaactatctgcgggcagagatcctgtaccggctgaagatccccccctttgagaaggcccgctcggtcctggaggccctgcagcagcacaggccgagcccggagctgaccctgagccagaagataaggaccaagctgcagaatccagacctgctggagctatgtcactcagtgcccaaggaagtggtccagttggggggcagaggctacgggtcagagagcggggaggaggactttgctgcctttcgagcctggctgcgctgctatggcatgccaggcatgagctccctgcaggaccggcatggccgtaccatctggttccaggttgggccctactgttcacacaggcagagaccccaggaggctgatgggtggaaacgtggggtcacaataactggggtggtgatgctcagggtctgtctagaccctccaaggaccacactgttcctgagggtcacacccctcccctcccatgcgtcccagggttgcagctagtggaagtagcccaaggcaggtagcccaagtgaaagtagccaagggcagagcagctttgctgatgtggactctaacatgggggatgtcctagaggcttcctaagggagaagctacactgatctggatgggtgtgtgtgagtcctgcctctccaaggaataccgcccctgtgccaacccaggctgattcctgaattatccccatcccattttagggggatcctggaccgttggcacccaaaggtaagctactcctaatgtaataggctaagagagcagaaaggacttcacgcctgcaagggctacagcacccttctccaccctatccccctgcaaccctgggagtcacccctgggcaggataggaccctccaactccaacaccagtgtcctgcagggcgcaagtcccgcaaaaagaaatccaaggccacacagctgagtcctgaggacagagtggaggacgctttgcctccaagcaaggccccttccaggacacgaagggcaaagagagaccttcctaagaggactgcaacccagcggcctgaggggaccagcctccagcaggacccagaagctcccacagtgcccaagaaggggaggaggaaggggcgacaggcagcctctggccactgcagaccccggaaggtcaaggctgacatcccatccttggaaccagaggggacctcagcctcttagcaggaggctctccttgcttgcactcaccctttcttattgtcttgccctgcatctgggggtctgaatttttgggagcaggcaatatctgaaggtgcaaacaggccctacggctgttccctgcacaactctcatggttttaattgtaccccatcttccacatctttaaagctcatgtgaaaaatgctgcatttttaataaactgatacatttgaacttc

SEQ ID NO: 282178 - DNA, 2940 bp, Homo sapiens
gttaattctattcatttattatggcagaagtattttaaagtaaattagacaaatcatgacatttcatacccaatactttaacatgcatctctaaaaaccaatttcttacaaagccacataattttattacgcctaataaggagacgtagcagggtagtgtgaaggaggggaaatcgtggcgatgggttaggtatacacttagaatgaagtgcagactccacacggaggccctcccgaggcccaaccggacctgacctgggtttgcttctctgtcttcacctgccagcactaacccgcagctatactccagccacacaggacttctttgagttctttcagtgaccaatctctttctcgcctcagggcctttgtactggcggttccttccgccggacacgtcgggtttcctcgtttttgcggactggcgctttctgatttcagagactctccgcaacagaaccatctcaagtgggtctacctcctcgcctttttttgttgttgttgttgcttggctgcgcttctgacagggcaggccgtgatgatgtttgtttatgagttaggtctgactgttcgttggtgcttaagatccccaccgggtccctagggcctgtgcgtaccgcgcacctgtgcacgtcctgcgcgcagctgcaggcgactccgctctggctcgtcgctgctgtttcctgctgggggtgccgaccctgtcccacgctagctgggtgacttcccccaaccgcagagacagcggcgacccggggcctcagacctgcccccgcatctcgccggcgccaggcagtgggaagtcaggttcttccgccacctcccagccaggactctgccaccctccctcaggatgcctgagggccccgagctgcacctggccagccagtttgtgaatgaggcctgcagggcgctggtgttcggcggctgcgtggagaagtcctctgtcagccgcaaccctgaggtgccctttgagagcagtgcctaccgcatctcagcttcagcccgcggcaaggagctgcgcctgatactgagccctctgcctggggcccagccccaacaggagccactggccctggtcttccgcttcggcatgtccggctcttttcagctggtgccccgcgaggagctgccacgccatgcccacctgcgcttttacacggccccgcctggcccccggctcgccctatgtttcgtggacatccgccggttcggccgctgggaccttgggggaaagtggcagccgggccgcgggccctgtgtcttgcaggagtaccagcagttcaggggagaatgtgctacgaaacctagcggataaggcctttgaccggcccatctgcgaggccctcctggaccagaggttcttcaatggcattggcaactatctgcgggcagagatcctgtaccggctgaagatccccccctttgagaaggcccgctcggtcctggaggccctgcagcagcacaggccgagcccggagctgaccctgagccagaagataaggaccaagctgcagaatccagacctgctggagctatgtcactcagtgcccaaggaagtggtccagttggggggcagaggctacgggtcagagagcggggaggaggactttgctgcctttcgagcctggctgcgctgctatggcatgccaggcatgagctccctgcaggaccggcatggccgtaccatctggttccaggttgggccctactgttcacacaggcagagaccccaggaggctgatgggtggaaacgtggggtcacaataactggggtggtgatgctcagggtctgtctagaccctccaaggaccacactgttcctgagggtcacacccctcccctcccatgcgtcccagggttgcagctagtggaagtagcccaaggcaggtagcccaagtgaaagtagccaagggcagagcagctttgctgatgtggactctaacatgggggatgtcctagaggcttcctaagggagaagctacactgatctggatgggtgtgtgtgagtcctgcctctccaaggaataccgcccctgtgccaacccaggctgattcctgaattatccccatcccattttagggggatcctggaccgttggcacccaaaggtaagctactcctaatgtaataggctaagagagcagaaaggacttcacgcctgcaagggctacagcacccttctccaccctatccccctgcaaccctgggagtcacccctgggcaggataggaccctccaactccaacaccagtgtcctgcagggcgcaagtcccgcaaaaagaaatccaaggccacacagctgagtcctgaggacagagtggaggtatggctgcctgctcccgcctcctcccctgcactctgcagccctggctgcccctcccaggcagctgccttaccctaagagggcggggggagtggtgggccctaaccaacctctgaactgctttctgagcccctcagggacccgtgtctcctccatccaggacgctttgcctccaagcaaggccccttccaggacacgaagggcaaagagagaccttcctaagaggactgcaacccagcggcctgaggggaccagcctccagcaggacccagaagctcccacagtgcccaagaaggggaggaggaaggggcgacaggcagcctctggccactgcagaccccggaaggtcaaggctgacatcccatccttggaaccagaggggacctcagcctcttagcaggaggctctccttgcttgcactcaccctttcttattgtcttgccctgcatctgggggtctgaatttttgggagcaggcaatatctgaaggtgcaaacaggccctacggctgttccctgcacaactctcatggttttaattgtaccccatcttccacatctttaaagctcatgtgaaaaatgctgcatttttaataaactgatacatttgaacttc

SEQ ID NO: 282179 - DNA, 1924 bp, Homo sapiens
gttaattctattcatttattatggcagaagtattttaaagtaaattagacaaatcatgacatttcatacccaatactttaacatgcatctctaaaaaccaatttcttacaaagccacataattttattacgcctaataaggagacgtagcagggtagtgtgaaggaggggaaatcgtggcgatgggttaggtatacacttagaatgaagtgcagactccacacggaggccctcccgaggcccaaccggacctgacctgggtttgcttctctgtcttcacctgccagcactaacccgcagctatactccagccacacaggacttctttgagttctttcagtgaccaatctctttctcgcctcagggcctttgtactggcggttccttccgccggacacgtcgggtttcctcgtttttgcggactggcgctttctgatttcagagactctccgcaacagaaccatctcaagtgggtctacctcctcgcctttttttgttgttgttgttgcttggctgcgcttctgacagggcaggccgtgatgatgtttgtttatgagttaggtctgactgttcgttggtgcttaagatccccaccgggtccctagggcctgtgcgtaccgcgcacctgtgcacgtcctgcgcgcagctgcaggcgactccgctctggctcgtcgctgctgtttcctgctgggggtgccgaccctgtcccacgctagctgggtgacttcccccaaccgcagagacagcggcgacccggggcctcagacctgcccccgcatctcgccggcgccaggcagtgggaagtcaggttcttccgccacctcccagccaggactctgccaccctccctcaggatgcctgagggccccgagctgcacctggccagccagtttgtgaatgaggcctgcagggcgctggtgttcggcggctgcgtggagaagtcctctgtcagccgcaaccctgaggtgccgggagaatgtgctacgaaacctagcggataaggcctttgaccggcccatctgcgaggccctcctggaccagaggttcttcaatggcattggcaactatctgcgggcagagatcctgtaccggctgaagatccccccctttgagaaggcccgctcggtcctggaggccctgcagcagcacaggccgagcccggagctgaccctgagccagaagataaggaccaagctgcagaatccagacctgctggagctatgtcactcagtgcccaaggaagtggtccagttggggggcagaggctacgggtcagagagcggggaggaggactttgctgcctttcgagcctggctgcgctgctatggcatgccaggcatgagctccctgcaggaccggcatggccgtaccatctggttccagggggatcctggaccgttggcacccaaagcgcaagtcccgcaaaaagaaatccaaggccacacagctgagtcctgaggacagagtggaggacgctttgcctccaagcaaggccccttccaggacacgaagggcaaagagagaccttcctaagaggactgcaacccagcggcctgaggggaccagcctccagcaggacccagaagctcccacagtgcccaagaaggggaggaggaaggggcgacaggcagcctctggccactgcagaccccggaaggtcaaggctgacatcccatccttggaaccagaggggacctcagcctcttagcaggaggctctccttgcttgcactcaccctttcttattgtcttgccctgcatctgggggtctgaatttttgggagcaggcaatatctgaaggtgcaaacaggccctacggctgttccctgcacaactctcatggttttaattgtaccccatcttccacatctttaaagctcatgtgaaaaatgctgcatttttaataaactgatacatttgaacttc

SEQ ID NO: 282180 - DNA, 1920 bp, Homo sapiens
gttaattctattcatttattatggcagaagtattttaaagtaaattagacaaatcatgacatttcatacccaatactttaacatgcatctctaaaaaccaatttcttacaaagccacataattttattacgcctaataaggagacgtagcagggtagtgtgaaggaggggaaatcgtggcgatgggttaggtatacacttagaatgaagtgcagactccacacggaggccctcccgaggcccaaccggacctgacctgggtttgcttctctgtcttcacctgccagcactaacccgcagctatactccagccacacaggacttctttgagttctttcagtgaccaatctctttctcgcctcagggcctttgtactggcggttccttccgccggacacgtcgggtttcctcgtttttgcggactggcgctttctgatttcagagactctccgcaacagaaccatctcaagtgggtctacctcctcgcctttttttgttgttgttgttgcttggctgcgcttctgacagggcaggccgtgatgatgtttgtttatgagttaggtctgactgttcgttggtgcttaagatccccaccgggtccctagggcctgtgcgtaccgcgcacctgtgcacgtcctgcgcgcagctgcaggcgactccgctctggctcgtcgctgctgtttcctgctgggggtgccgaccctgtcccacgctagctgggtgacttcccccaaccgcagagacagcggcgacccggggcctcagacctgcccccgcatctcgccggcgccaggcagtgggaagtcaggttcttccgccacctcccagccaggactctgccaccctccctcaggatgcctgagggccccgagctgcacctggccagccagtttgtgaatgaggcctgcagggcgctggtgttcggcggctgcgtggagaagtcctctgtcagccgcaaccctgaggtgccctttgagagcagtgcctaccgcatctcagcttcagcccgcggcaaggagctgcgcctgatactgagccctctgcctggggcccagccccaacaggagccactggccctggtcttccgcttcggcatgtccggctcttttcagctggtgccccgcgaggagctgccacgccatgcccacctgcgcttttacacggccccgcctggcccccggctcgccctatgtttcgtggacatccgccggttcggccgctgggaccttgggggaaagtggcagccgggccgcgggccctgtgtcttgcaggagtaccagcagttcaggggagaatgtgctacgaaacctagcggataaggcctttgaccggcccatctgcgaggccctcctggaccagaggttcttcaatggcattggcaactatctgcgggcagagatcctgtaccggctgaagatccccccctttgagaaggcccgctcggtcctggaggccctgcagcagcacaggccgagcccggagctgaccctgagccagaagataaggaccaagctgcagaatccagacctgctggagctatgtcactcagtgcccaaggaagtggtccagttgggtgaggccaaagatggcagcaacctctgcttcagcaaatgattgtgtaaccctggggcacttgtccctctctggacctgattcaccgatttggaagtttgtagccctagctgatactcaatggactaggcctcctcacttgtcaatagtgtttccaggctgggcgcagtggctcatgcctgtaatcccagcacttcgggaggccgagtggggtggctcacctgaggtcaggagttcgagaccatcctggccaacatggtgaaaccccatctttactaaaaatgcaaaaaattagccaggtgtggtggtgggcacctgtaatctcagctactcgggaggatgaggcagg

SEQ ID NO: 282181 - DNA, 978 bp, Homo sapiens
  misc_feature (740)..(740): n is a, c, g, or t
  misc_feature (766)..(766): n is a, c, g, or t
tcaccttgatgttcccatttaacagataggaaaacgggggcagggagaagaggaactgtaactcccagtttccttccccttgcacccagaaacaggttctctgagcccctctccccatcccatggagggtggggatgggtcttacgcacccagaccgtgttcctccagggagaatgtgctacgaaacctagcggataaggcctttgaccggcccatctgcgaggccctcctggaccagaggttcttcaatggcattggcaactatctgcgggcagagatcctgtaccggctgaagatccccccctttgagaaggcccgctcggtcctggaggccctgcagcagcacaggccgagcccggagctgaccctgagccagaagataaggaccaagctgcagaatccagacctgctggagctatgtcactcagtgcccaaggaagtggtccagttgggtgaggccaaagatggcagcaacctctgcttcagcaaatgattgtgtaaccctggggcacttgtccctctctggacctgattcaccgatttggaagtttgtagccctagctgatactcaatggactaggcctcctcacttgtcaatagtgtttccaggctgggcgcagtggctcatgcctgtaatcccagcacttcgggaggccgagtggggtggctcacctgaggtcaggagttcgagaccactggcacctgtgaacccttctctacatgcacaatacgggtggggnccgtgctcaaccgggggtgcgcaacntacctggtggtggacgacgtcgtcccggtacgtacccttccgaccacagcagcaacaacaaccaacgaacacacacacagacacacccagcacgcgacacgacaacacaaccgcacaagaccacaaccaccaagaccacacaacagcacaaacacacacagaacgaaaccgacaaccagaacatagagcagtagaacggagccagacgccac

SEQ ID NO: 282182 - DNA, 1250 bp, Homo sapiens
ttaattattgattaattttattttaattctgtactcttaccaaggtgtaatacatgtacattgtattttatgatctgctgaagtcttttgtacttttgctttgaaagtaaattttacaaattatatattctcaaaatataatggagaggacttccaggtgggacgaagtagctctgtacagatcagcactctcaataagaacaactagaaagctaaataaaatatagaaatctatttgaaggcatttgctatctatggaagaaatgagaactgggaggctgagaatcaagaggagaaaacctcaaggagaggagctgatgtctgcagctgctcctaccctggggacatttgcaaatttagggtacaggagggaggctgagaatccaggctatgcacagtcacaaaactgctgctgaggcttagaggaaccattggagcttttggcagagtgttgagagacctcaaacatgcagccagctcctctcaagactttgatgaattctggcgtagcccaggtcagaagctaaaaattaagaaaacgcctctgaaaagcagagcaaagcaatcagcagtcttgtaagacaacatttagaatttgagatccacactgcttgtgtgtttaaatatttgacaaacgacagagaattctattctgaagtatgttgtgggccaaggcacttagaattgtttaggaacactggccactccaatctcccaagtaaaaccctgaagagcactatcccagaacagaagtgaaccagaagtgaacagactcttaccaaagccataaactagcttcgactcagcaaaaaccctgactggattaaagtgaccatccaatcacatcagcctatgtccctatcagaggggacagtaaaccctctctctggaagaagactgcgttatctggagcctctgtagttttttaactggaatgtctgacattcactcaaaactaccagaaacaccaaaaacagaaccacatgatggataaccaagaaaaaagcaaacgaaacacacacagaaaaatcaaaggatattccagatattaaaattagctcacatggactggaaaacaaatacaattaacacaagcaagaaagtggagaaagccatttagatatagatgaaaagataagttaaccagataattggaatttacagaaaataatcaaatagaattgtaaaactgaagaacatattctctaaaattaagaactcatgaggggccaggtgcagtggctcacgcc

SEQ ID NO: 282183 - DNA, 1095 bp, Homo sapiens
tcctgctctttcaagggagtgatgtagagaagaggaggcgacaaagagcggatggatgacgagagacgaccaaccaaagacaatgggcatttgctatctatggaagaaatgagaactgggaggctgagaatcaagaggagaaaacctcaaggagaggagctgatgtctgcagctgctcctaccctggggacatttgcaaatttagggtacaggagggaggctgagaatccaggctatgcacagtcacaaaactgctgctgaggcttagaggaaccattggagcttttggcagagtgttgagagacctcaaacatgcagccagctcctctcaagactttgatgaattctggcgtagcccaggtcagaagctaaaaattaagaaaacgcctctgaaaagcagagcaaagcaatcagcagtcttgtaagacaacatttagaatttgagatccacactgcttgtgtgtttaaatatttgacaaacgacagagaattctattctgaagtatgttgtgggccaaggcacttagaattgtttaggaacactggccactccaatctcccaagtaaaaccctgaagagcactatcccagaacagaagtgaaccagaagtgaacagactcttaccaaagccataaactagcttcgactcagcaaaaaccctgactggattaaagtgaccatccaatcacatcagcctatgtccctatcagaggggacagtaaaccctctctctggaagaagactgcgttatctggagcctctgtagttttttaactggaatgtctgacattcactcaaaactaccagaaacaccaaaaacagaaccacatgatggataaccaagaaaaaagcaaacgaaacacacacagaaaaatcaaaggatattccagatattaaaattagctcacatggactggaaaacaaatacaattaacacaagcaagaaagtggagaaagccatttagatatagatgaaaagataagttaaccagataattggaatttacagaaaataatcaaatagaattgtaaaactgaagaacatattctctaaaattaagaactcatgaggggccaggtgcagtggctcacgcc

SEQ ID NO: 282184 - DNA, 1282 bp, Homo sapiens
ttggtgcccaggcagccacttcacctaccttgtttaccagcctgggcagagaccggagctagcccacacgctcttggccaaggacggcagcccgcagagctctgaccagcttggccagagggaatgcagctgattccccctgctctgtgcccgacccgtgttaaagtttaacccggcttccaggtctcctcttttccagacaggggcgcagggaaggagcgcccggcgagactgacgctccggctccacgcccgcctggctctgggctgtcggttaccctgtaattacctgacagctctgactgggcttaggaaccggtgagaaacctcagtctcatctctggtatctggaggaaggaagggaaataaagaggcattttaaaaatgcggactcaccagttctcaacctccccggccggtgtgtgggaaagggcggcggccgggctggctgggcctggggcggggcgagccatccccggctcgggctccggggcccggcccactctccacaggccccgcagcgagggcgtggctcccaggttccacgtcctgcgagaggggaccatggcctggggctcagcagcctcctcggggcaccaggcagcctgcggagagaacaaggggagataagcttgaagaccgtggaccagcacaactgcacctcgggcagagccagccatctggaagggtctacgccccaccggtcgctggttacccagcgcagcagctccaactgcactgtcccccaaagaccctagggctcgcaggatgaaatggggcctgctgcctatttgggggtatttgtttccgaatacggaggctccgaagtgcgaaagttgcatatcagctgtgcctgagaccccacacctgagcccttcccagctgagcctggagcctgaggacaagccaggtcctagccccacacagaggaggcaccgcgagtcagcagcatctccaagctgtattaacaggggaaaacagttctcccattttcagagaaccaaggcaatctttcccccaagaaaatcaccttgccggccaggcacagtggctcatgagacaggaggatcgcttgaggccaggagttctagaccagcctgaacaacatattgagaccctgtctctacaaaacaacaagccaggcgcggtggcacaggcctgtggtcccagctactcaggaggctgaggcgggaggatggcgtgggcccaggagtttgaggctgcagtaagctatgatcatgtcactgtactccagcctgggcaacagagcaagatcctgtctt

SEQ ID NO: 282185 - DNA, 4462 bp, Homo sapiens
  misc_feature (1118)..(1118): n is a, c, g, or t
  misc_feature (2545)..(2545): n is a, c, g, or t
tcagtatccgggggaccctgtcccccaaggatgccctgactgacctgacgggtgatgctgagcgcctccccgtggaggggcaccacggcacctggctgggccacaagggtatggtcctctcagctgagtacatcaagaagaaactggagcaggagatggtcctgtcccaggcctttgggcgagacctgggccgcggaaccaaacactacggcctgattgtggtgggccactccctgggcgcgggcactgctgccatcctctccttccttctgcgcccacagtatccgaccctcaagtgctttgcctactccccgccagggggcctgctgagtgaggatgcgatggagtattccaaggagttcgtgactgctgtggttctgggcaaagacctcgtccccaggattggcctctctcagctggaaggcttccgcagacagctcctggatgtcctgcagcgaagcaccaagcccaaatggcggatcatcgtgggggccaccaaatgcatccccaagtcggagctgcctgaggaggtagaggtgaccaccctggccagcacgcggctctggacccaccccagcgacctaactatagccctctcagccagcactccactctacccgcccggccgcatcatccacgtggtccacaaccaccctgcagagcagtgctgctgctgtgagcaggaggagcccacatactttgccatctggggcgacaacaaggccttcaatgaggtgatcatctcgccagccatgctgcatgagcacctgccctatgtggtcatggaggggctcaacaaggtgctggagaactacaacaaggggaagaccgctctgctctctgcagccaaggtcatggtgagccctaccgaggtggacctgactcctgagctcatcttccagcagcagccactccccacggggccgcccatgcccactggccttgccctggagctgccgactgcagaccaccgcaacagcagcgtcaggagcaagtcccagtctgagatgagcctggagggcttctcggaggggcggctgctgtcgccagtggttgcggcggcggcccgccaggacccggtggagctgctgctgctgtctacccaggagcggctggcngcggagctgcaggcccggcgggcaccactggccaccatggagagcctctcggacactgagtccctgtacagcttcgactcgcgccgctcctcaggcttccgcagcatccggggctcccccagcctccacgctgtgctggagcgtgatgaaggccacctcttctacattgaccctgccatccccgaggaaaacccatccctgagctcgcgcactgagctgctggcggccgacagcctgtccaagcactcacaggacacgcagcccctggaggcggccctgggcagtggcggcgtcactcctgagcggccccccagtgctgcggccaatgacgaggaggaagaggttggcggtgggggtggcgggccggcctcccgcggggagctggcgctgcacaatgggcgcctgggggactcgcccagtcctcaggtgctggaattcgccgagttcatcgacagcctcttcaacctggacagcaagagcagctccttccaagacctctactgcatggtggtgcccgagagccccaccagtgactacgctgagggccccaagtcccccagccagcaagagatcctgctccgtgcccagttcgagcccaacctggtgcccaagcccccacggctctttgccggctcagccgacccctcctcgggcatctcactctcgccctccttcccgctcagctcctcgggtgagctcatggacctgacgcccacgggcctcagtagccaggaatgcctggcggctgacaagatccggacttctacccccactggccacggagccagccccgccaagcaagatgagctggtcatctcagcacgctagcaccccagttgcgtggccagccgggcccaggcaggagcaggtggccctgtgggcacctggtgcctgccccctgccgggcagctttaaggacagacccccaggggcagtttagcctcaggcacaggcatcgctgctgagctgggggtccgcatccctacctcagcttaggacccccagagccaaggtggctgggatctggccccacagatggggaaagatggggaagggtgtggagtggggaggagcctgggcagcctgctgggtgggccacactcagcctgactgccctccatgggggcattctggcaccccctgctccaggacaggccatgggcaagctgcctcccatcactgcctgctggctgctctcccaggggccaggtggagagcagtgccccccgacacatgtattctcatctgtggtccaggccggcatcgtcctggccaccccccagatctggtgcctgctggccggccccctggggtgcccctgccgaggtggcctgcagtgctgtacatgtttacagaagctgctgggcttggctcaggatgtgttctgggcttgcaagccccccgcccaatcatgtgttcagtagccntcctctgagcagggcccaaggcagccaggggcctggaggggccagaggagggtggggtcagggccgccccttctctgccttgtgcctctcatgctgcctcctctgcccatgggtcctgggcacccaggcctgccctgcctgctggctacttcctggcttaccttctacccccaaggatcctcaccacccaaagggtggtgggcactgctgtgaccaccccagctgcagagtcagtgccctgggtggaaggaaggcactgagagcccccttcctctgagggccccacctcaccccttggtgtcacccccaccacgcctaggcagctctgggccctgggatctggaaccaacacacccctgttcccctcagctttccctcctcgctggcctgggcaccctcctgggagcaggccttcctccctcccacccccaatgtcctgttggtaggaggtggggccaagagtggggtatggtgggccttggctggagacctctgtccactgcccagggaggggcctggggctgggagcagtcccggtttagcctgaggtccccatagggcttcctcccctgctgggtttgggaagcagttagggagatagcgacccggagtttccccagaagcggggtgggagggtgtgcatgctagtgttggcgcgtatgcatgtgcatgagtgtgcaccgttcctaaggaaggggcctctggggctgcccaccctacctgccctgcctgcctgctgcccctcccagcctgccaagaaaacggtaggggagcatgatggggcctttgaggcagggtcgcagggacaagctcagctttaggcaccatctgttcccatcgcgcctgctgctgtgacccgttttggaaaactggtgtgtaccgaggcgctgactgcacggctgaccgcctgctcgtgccttcattctgcagcggcatggtccctcccattctggctccacctgcagcctccctgggtggcctaggctcccccgaccaagagacctccctctcatgatcactggtacctgggggcctgaattctggcccccggctccccacacagctgggactggcctggatggctgtcctgggagcccctgcccaccctgacagagggagctgggcctcccctcatcctctgtaactcccgccttcaccagactcaaggacaccctggccctgctgaggcatacagagcttcagcccagcacagaagcaagacaaaatcagtggctcttagagtttagaaaacaagacagactctcagatgaaagatctgacaagcaccgtggccagtcacagggagagacttgatgtctggccttttaattcctcctctgccagggtgggtcctgggacctctaatgtgggcatgtcgtccaccccaggacgagccatcagggacagaccccccacccccaaggctgcagccacaccatgtttcaggcttggggctggggcaggcttgggctcaatcctgggcacccaggggcagcccacccctaacctggctcctacccaccttgcccttgaaggatgggcctgctgcacgtctccctcctccaccccataccacactggggggtctgagccacccccctcagccccgttcggctcagaccgacccccactccatccccagacctgcagcacaagtgcgcgggcctgtcctcccaggggcctgggcgactccatatgcaatcagtagcgagcagccgggccccacagaccctcatgcactctcttacgtgccattctccccagactttttttgtacttaatgtatgaaagatccaaactaatattgctgtaaaaaggagagacaaattaatatagcttattctataaatatatctgtatataaaggtttctgtatattgtatagagctgtgtataaactggatgtagaagcacaaa

SEQ ID NO: 282186 - DNA, 744 bp, Homo sapiens
ggcacggtggctcacgcctgtaatcccagcactttgggaggccgaggtgggtggatcacctgaggtcaggagttcaagaccagcctagccaacatggtgaaaccccatctctacaaaaatacaaaaattagccggacatggtggcagacgcctgtaattccagctactcgggaggctgaggcaggagaatctgaacctgggaggtggaggttgcagtgagctgagatcacgccattgcactccagcctgagcgacaagagtgagactctgtctcaaaaaaaaaaaaaaaaaaaaaaaaagataatatcactagttttatgtacttcacaaagttaaagtaaggataaaaataaaatgatgtatgtacatgaaagtactttttacatcatatagaaatgtaaagtattaatagtaacaataattttgataacccaaaatgcttttatctgcattattaagattttctaaagtatcctgagagggacaatgcctctgagttttaaataagcaagtaagtcaagagctagaaaaagctgtagttctggtgttagcagaactctgggtttctgatttagccaggggttcaaaggcagggacagatcaatagagctacctactgggcaagtgaagggagaaaggaaaaagcttcctattcttaccctttctttctccatactgtccataaaatcctaaaacattccagaacaggataaagagattatcttttctgtttctccaattaag

SEQ ID NO: 282187 - DNA, 731 bp, Homo sapiens
tgactccaaagacagtgctgttgggactgtctggggctcctcatctgtccaacccaggaactgcttaccatgccaatcaggaagagggaagccagggaggagttggggaggacggcaaaggcctggacatccacggcagggtagaaggtgataacacagcctgcatcgcgaatccaggagaaaaggatggtcttcccaggaaatggtgccagaataactcgctattcatatggaagaaaatgaaaatgattccgtatgtcatcccacacattaaaaatccattccagatggattaaggatttaaatataaatgggatgcccggaagaagccttgcatctggatatcagccacagacacggagatactcaaagaagcattgtgcacctggagagaaaccagatcgccattaacaatcgaacatagaaacattggctgggggcggtggctcacgcctgtaattccagcactttgggaagccgaggccgggcggatcacttgaagtcaggagttcaagatcagcctggccaacatggtgaaaccctgtctctactaaaaatacaaaaattagctgggtttggtggctcacacctataatcccagatagtcaggaggctgaggcagaagaatcgcatgaacccaggaggtggaggttgcagtgagctgagattgcgccactgcactccagcctgggtgacagagcaagactctgtctcaaaaaagaaaatagaag

SEQ ID NO: 282188 - DNA, 468 bp, Homo sapiens
ggagtactgtcaggtttctagggcataaggacaaaatcaggagtttcattcacatcctcccttacgcataccagtcaggcagctatgacaaatatacaaaagagcaatgagagaatatgggggagagggatttggggaagcttatgcagaagatgagttctaagcaggttttgaaagacgggtaaaattttgacaataatgagggaaaaggcatgctaggttgagcagacaagacccaaggtaaggacatgagaaaggcactttctggggaaggtgtctgagaaatggcaagtaatctggaatgaataaggcacaatgaagaaactggaaaggtaagctgtgggcagatcagggagactcctgaatgtcagtttaaatttggattttatcatacatatggtagagtgataccttctaaagcatacatttgtccagtagcaggataggctgtaggggaaagggaccaaa

SEQ ID NO: 282189 - DNA, 382 bp, Homo sapiens
gggctgagattcaggctcaggtctaggggttggggaatattaaagtttacaagtacaatcttactccatccatacacacacatggagaagccaggagaggacgcggccagagatgggctcctgcccttgaacccctgctggggtggaagcaggtgcacaatgcttctttgagtatctccgtgtctgtggctgatatccagatgcaaggcttcttccgggcatccctgggaatgggagtgcatagacatactggtcaaattacagcacagcctctacacctttactgaagatggaaaactgttttccaaagttgacttgcctaacatgatgtaactatcatgcaaaaataaaaataaaattaagaataaaaatttaaaaatga

SEQ ID NO: 282190 - DNA, 659 bp, Homo sapiens
aatattgtattgtattgccattttaatataggaaatgttgaataagaatctacaacaagaaataggcaccagacagtggcaatgagaaaagtgaggatccatgccttctggacctctcagtacactctgcctaccacagcacctgaaacaaggcacacattaatgcaaagctgtttagttgggaatgaaccacttaagaggctcttcgagcaaaaacatcagtctatgtagcagacgtaggtccatgaagactgtcatcttgactccctagaggattataacctctgaatggattctttcatgagtatttatcatccttaaaaccctgatcagaaatatcaaatgatcatagttgcaacgtgcctgcttttgcaccattgacagccagtattcgcatcttgagaagagagagtttcattgatgaaagagtatcaacagtatgtgaggaacactagcagtgcttctgaggacaagactgtgctggacaatgggcttgtcccacgatgcgggaaggatgggtataccatgggaagaggaaagaacagggcttgatactcctccagctaattaatgaccaggggaaaaggaatgccagtcacggcccacctagggtgcatttaagcacataacatagacaacaaaaactgaaggtattgaga

SEQ ID NO: 282191 - DNA, 1045 bp, Homo sapiens
aatattgtattgtattgccattttaatataggaaatgttgaataagaatctacaacaagaaataggcaccagacagtggcaatgagaaaagtgaggatccatgccttctggacctctcagtacactctgcctaccacagcacctgaaacaaggcacacattaatgcaaagctgtttagttgggaatgaaccacttaagaggctcttcgagcaaaaacatcagtctatgtagcagacgtaggtccatgaagactgtcatcttgactccctagaggattataacctctgaatggattctttcatgagtatttatcatccttaaaaccctgatcagaaatatcaaatgatcatagttgcaacgtgcctgcttttgcaccattgaataaacaaggaacaccaatgagaaagaaagcacgttttcaattaccttggaaactcggtttgcaacttctctgcccacagtcagcccctggacaaaggtcctggcagcaatgaaggcgcgggtaacctgaatcttcagtttccggggcacgtctccaaatggcttgagctggtcagtgtatttgctcacacattccaggtagtcttcactgaagtgatactgagggtttatcagctgaaacatccgttccaggagccgagcccaaaagtcattgagcatttcctccagattcacattacccccagtgtagtaccttttcagctctgtgaagaggtcctggaagacttctgaattctgcatgtacagcatgccataggtccgtacaaacatatcatttagtgacttttctgcattctccaggagctctcggaaaaattctgcagataaaacagaaagaagtcataaattaatgaaatctagaaagcccaaggcacccacttaccttaagtacaactgcttttaattgacattttcatggaaaaacatatcctgtgattaaggtgttaatggacagataaaaaacatattttaaatgggatttgacctacatctatgaccttgtacaactcaaaacagaataccccatgatttccattaacattag

SEQ ID NO: 282192 - DNA, 818 bp, Homo sapiens
cttgagtccaaaagaggagagaaatcgcaccccgagaagaaggcgcgagctcggtggctccagtcctgcgggagcagaggggacagcagacctgcccaggtagagggagacgacttctgaggtgctggaggctatttctggattttgcgcggcctggcgctgggtgccacagccggtgaatgcgggagacctgcagcagacccggcgctgccgccagaacctgctcactacgctccacacagctcgtcagggcccaacctgagcactccgcgggcctgcggggatggggcggaaaggctggctgctgtcttcggaccctgaaccctcccctctttttctcttttcttcatgtctacacaaaggcagaatgggcaggctcactcgcaggccgacgccaccgacgtgacgctagtgattttggtcgagtcgtcagaccacggctgcagattctgcagggcgaagagcgacgagttgtgcacgcacagagggtcagcgggcagcggctgtgccaggctcttctggaaggcctcctgctgcaactgcaggaggatgcggttcgcttgctgcctctcggcctcccgttcctccgcagtctgccgtctgcaccgggaacaagccgttacctgccaggagcaccgacccagctcccgcgtgtgcccaactcctggtgcgttcccaggagataaactgaacgagcgctgctcgcctttgcagtccccaaatccagtttgggcccctataacgcgttcccttcttttgagagtcctgactccaacaaagactggaaaccccaaagcggatggagccaaggtatccca

SEQ ID NO: 282193 - DNA, 1212 bp, Homo sapiens
tcggcgggagggctgggggaagggacccggactagaacaactgctgactaatccgcgggccgcggggaatgggtggcgcgccagccggtcggcaggggtcacgcggccgggtgtgcgcggaatggattcagggttctcgggtcgcgcccgggagctagagtcctgactcccagccggggtccccgaccggcctttcggggttgccgggcgcgctctgcaaaggggaaactgaggcccaaggaaattgagtatctctgcaaagtcaccagctgagttcgaaccagacagatcctgggaccccctactctatccgccaccggaagaatctccgtccttgtctttccattctgccctcccggcttcccagtaagcacacagccccaggaccacccttgaccgtcctcaaccaagcgatgcatgccaggggcccccatggccaactgtccccagcactgcctctggcctcctcagtcctgatgctgctgatgagcaccctgtggctggtgggggccggccccggcctggtcctggccccggagctgttgctggacccctggcagggtgagggccagccacgtggaccttggaggaagcaggagacttgctgtagggcctgggcccacttggcaggagcagcacaaggcctccaggggtcaaacagggatggggcccagtgtcccgggaaagcatggccttagacaggagcatgcccagcacatccacagccaagaagggaggcagaggactccctagggtgggctggaacctatgggtaggagtgcttttctcatggtttccctttctagcagcttttccttgaaataagaactaaggccaggtggctgacgcctgtaatcccagcactttgggaagctgaggcaggtggatcacttgaggtcaggagttcgagaccagcctggccaacatggttaaaccctgtctctactaaaaatacaaaaattggccgggcgcagtggctcactcctgtaatcccagcactttgggaggccgaggcgggcggatcacgaggtcaggagattgagaccatcctggctaacacggtgaaaccccgtctctactaaaaatacaaaaagattagctgggcgtagtggcgggtgcctgtagtcccagctactcgagaggctgaggcaggagaatggcgcgaacctgggaggcggagcttgcagtgagccaagatcgcgccactgcact

SEQ ID NO: 282194 - DNA, 1420 bp, Homo sapiens
aacaaaacaaaacaaaaaaacagctaagactttcaactaagcatcaggatgggaggaggaggtgttggggttttgaggagtgacctcagctgagcacctgtttcccaataataactcctccaatttgtatttgaggacccccaatgatgctcagagaggttaagtgatttgaccagggtcacacagcttgagggaatggggtagctccaggattgaagcaggccatttcatgctctcagccaggtatgatttagtaaatacagaagcagagtaccttcatggtgtctgggacatagtgagtgctctgtagcgggttgtcagtgaaaagactgagtggcacgtccagtgtattctgtttaataccacagaggcgtagccacagtgtttggaagtccttggtcccttccaccaatgattaagtgctggctgtgggaagactggctcctggggaggggaggtgggctcagcaggtggccctggtgtagcgtaaccttcaacctggcacacctgggacagccttggatgttggggccactaacctggcacataagccccttctctctcccagtgcaccggctgctgacccatgccctgggccacacggccctgccaggcctgctcctgagcctgctgctcctgcccactgtgggctggcagcaggagtgccacctgggcacgctgagattcctgcatgcctcagccctgctcgccctggcttctgggctgctggcagtgctgctggcaggccttgggctgtccagtgcagccggcagctgtggatacatgcctgtccacctggccatgctggctggggagggacaccgccctagacggccccgtggggcactgccaccgtggctgtcgccgtggctgctgcttgccctgaccccactgctcagctctgagccacccttcctgcagctcctttgcggcctccttgccggcctggcctgtatcctttgcctgagcccagggcccgtggggatgtgtgggttctgtgggtgggtgcctgggaaggaagtggcacaaaggggtgaaggcccaagcaataccaaggagccgtgcacacacattccaggagcttctctgagtcttcctctgggacatgctctgggctgggacctggggtcttatggcctggtggaggtgccaattacaatgtaaagggctacgtgggctccctgtaatatcaatgccattcttcgcagaaatagaaacaataaccctaaaatttatatggaaccacaaaaggcccagaatagccaaaccaccctgagcaaaaattaaaaattaaaaaaattaaaagcctgaccgggcgcaggtgtcacgcctgtaaccccagcactttgggaggccaggcgggcagatcacttgaggtctggagttcaagaccagcctggccaacatggtgaaaccccat

SEQ ID NO: 282195 - DNA, 1997 bp, Homo sapiens
tcggcgggagggctgggggaagggacccggactagaacaactgctgactaatccgcgggccgcggggaatgggtggcgcgccagccggtcggcaggggtcacgcggccgggtgtgcgcggaatggattcagggttctcgggtcgcgcccgggagctagagtcctgactcccagccggggtccccgaccggcctttcggggttgccgggcgcgctctgcaaaggggaaactgaggcccaaggaaattgagtatctctgcaaagtcaccagctgagttcgaaccagacagatcctgggaccccctactctatccgccaccggaagaatctccgtccttgtctttccattctgccctcccggcttcccagtaagcacacagccccaggaccacccttgaccgtcctcaaccaagcgatgcatgccaggggcccccatggccaactgtccccagcactgcctctggcctcctcagtcctgatgctgctgatgagcaccctgtggctggtgggggccggccccggcctggtcctggccccggagctgttgctggacccctggcagggtgagggccagccacgtggaccttggaggaagcaggagacttgctgtagggcctgggcccacttggcaggagcagcacaaggcctccaggggtcaaacagggatggggcccagtgtcccgggaaagcatggccttagacaggagcatgcccagcacatccacagccaagaagggaggcagaggactccctagggtgggctggaacctatggtgcaccggctgctgacccatgccctgggccacacggccctgccaggcctgctcctgagcctgctgctcctgcccactgtgggctggcagcaggagtgccacctgggcacgctgagattcctgcatgcctcagccctgctcgccctggcttctgggctgctggcagtgctgctggcaggccttgggctgtccagtgcagccggcagctgtggatacatgcctgtccacctggccatgctggctggggagggacaccgccctagacggccccgtggggcactgccaccgtggctgtcgccgtggctgctgcttgccctgaccccactgctcagctctgagccacccttcctgcagctcctttgcggcctccttgccggcctggcctatgcagctggggccttccggtggctggaaccctcagagcgacggctgcaggtgctgcaggagggcgtcttgtgcaggaccttggcggggtgctggcccctgaggctccttgccaccccgggtagcctggcggagctgcctgtcacccatcctgccggagtgaggcctcccatccctggaccgccttatgtggcctcccctgacctctggtcccactgggaagactcagccctgcccccaccaagcctgaggcctgtgcagcccacctgggagggctcctcagaggcaggcctggactgggctggggccagcttctccccagggactccgatgtgggcggccttggatgagcagatgctgcaggagggcatccaggcctcgcttcttgacgggccagcccaggaaccccagagcgcaccatggctgtccaagtcctctgtctcctctctgcggctgcagcagctggagcgcatgggcttccctacggagcaggcggtggtggcactggcagccacaggccgtgtggagggtgccgtgtcactgttggttggaggacaagtgggcactgagaccctggtgacccatggaaagggtgggcctgcccactccgagggtcctgggcctccctagcccaggcagagagtggggcacaggcaggcccttgggtgctaagggctgggctgcatgtgggtagcccgagctcctactctgtctaaagagggccacagtggggagcaggggcacctctggaggcaggagaggccccccagcatgctgccctagtacgtgtttagaataaaaaccagtttgtttttcaacctggacctccttggaggcagcag

SEQ ID NO: 282196 - DNA, 1793 bp, Homo sapiens
aacaaaacaaaacaaaaaaacagctaagactttcaactaagcatcaggatgggaggaggaggtgttggggttttgaggagtgacctcagctgagcacctgtttcccaataataactcctccaatttgtatttgaggacccccaatgatgctcagagaggttaagtgatttgaccagggtcacacagcttgagggaatggggtagctccaggattgaagcaggccatttcatgctctcagccaggtatgatttagtaaatacagaagcagagtaccttcatggtgtctgggacatagtgagtgctctgtagcgggttgtcagtgaaaagactgagtggcacgtccagtgtattctgtttaataccacagaggcgtagccacagtgtttggaagtccttggtcccttccaccaatgattaagtgctggctgtgggaagactggctcctggggaggggaggtgggctcagcaggtggccctggtgtagcgtaaccttcaacctggcacacctgggacagccttggatgttggggccactaacctggcacataagccccttctctctcccagtgcaccggctgctgacccatgccctgggccacacggccctgccaggcctgctcctgagcctgctgctcctgcccactgtgggctggcagcaggagtgccacctgggcacgctgagattcctgcatgcctcagccctgctcgccctggcttctgggctgctggcagtgctgctggcaggccttgggctgtccagtgcagccggcagctgtggatacatgcctgtccacctggccatgctggctggggagggacaccgccctagacggccccgtggggcactgccaccgtggctgtcgccgtggctgctgcttgccctgaccccactgctcagctctgagccacccttcctgcagctcctttgcggcctccttgccggcctggcctatgcagctggggccttccggtggctggaaccctcagagcgacggctgcaggtgctgcaggagggcgtcttgtgcaggaccttggcggggtgctggcccctgaggctccttgccaccccgggtagcctggcggagctgcctgtcacccatcctgccggagtgaggcctcccatccctggaccgccttatgtggcctcccctgacctctggtcccactgggaagactcagccctgcccccaccaagcctgaggcctgtgcagcccacctgggagggctcctcagaggcaggcctggactgggctggggccagcttctccccagggactccgatgtgggcggccttggatgagcagatgctgcaggagggcatccaggcctcgcttcttgacgggccagcccaggaaccccagagcgcaccatggctgtccaagtcctctgtctcctctctgcggctgcagcagctggagcgcatgggcttccctacggagcaggcggtggtggcactggcagccacaggccgtgtggagggtgccgtgtcactgttggttggaggacaagtgggcactgagaccctggtgacccatggaaagggtgggcctgcccactccgagggtcctgggcctccctagcccaggcagagagtggggcacaggcaggcccttgggtgctaagggctgggctgcatgtgggtagcccgagctcctactctgtctaaagagggccacagtggggagcaggggcacctctggaggcaggagaggccccccagcatgctgccctagtacgtgtttagaataaaaaccagtttgtttttcaacctggacctccttggaggcagcag

SEQ ID NO: 282197 - DNA, 1591 bp, Homo sapiens
aaactcctgggctcaagcgatcctcttgcctcagccacttgagtagctgagattacaggtgtgcactgccacgtccagctaattttaaaaattttttgtagagacggggtctatgttgcccaggctggtcttgaactcctggcctcaagtgatcctcccgtctcagcctccccaagtgctgggattatacagctgtgagccactgcgtccagccctaagatgattcatacctatcggggaaaacagtgccactggagagaacaggctggcctctgcactctggattggtgacaggagttatccaggcctgtctgaaggcaatagcaggtgtgtccatgggacttcttccaggacgggtgggtcttgagttacagacctgaaaaggtgcatagggttctgggaacagagtgggtcacgggtgagcccaggccttggggtgaggcatacctggctctgtttggctgagtagcttcaggcagatcccttttcctttctgagcctctgctgctgaccagggtgacgctattccatgctggtccacagtgaggagacgggagggaatggtggccagcacacttggcatggggcctggcctgtggcgtgggcccacccctggctgcttttggttttccttgaccggccgccctgccccgggcagacagatgcagctggggccttccggtggctggaaccctcagagcgacggctgcaggtgctgcaggagggcgtcttgtgcaggaccttggcggggtgctggcccctgaggctccttgccaccccgggtagcctggcggagctgcctgtcacccatcctgccggagtgaggtgagggtgatgggggggatgccagtccaggtggtgggcactgtggcagggctgccagtcaggccctcttctcttcccactcctccaggcctcccatccctggaccgccttatgtggcctcccctgacctctggtcccactgggaagactcagccctgcccccaccaagcctgaggcctgtgcagcccacctgggagggctcctcagaggcaggcctggactgggctggggccagcttctccccagggactccgatgtgggcggccttggatgagcagatgctgcaggagggcatccaggcctcgcttcttgacgggccagcccaggaaccccagagcgcaccatggctgtccaagtcctctgtctcctctctgcggctgcagcagctggagcgcatgggcttccctacggagcaggcggtggtggcactggcagccacaggccgtgtggagggtgccgtgtcactgttggttggaggacaagtgggcactgagaccctggtgacccatggaaagggtgggcctgcccactccgagggtcctgggcctccctagcccaggcagagagtggggcacaggcaggcccttgggtgctaagggctgggctgcatgtgggtagcccgagctcctactctgtctaaagagggccacagtggggagcaggggcacctctggaggcaggagaggccccccagcatgctgccctagtacgtgtttagaataaaaaccagtttgtttttcaacctggacctccttggaggcagcag

SEQ ID NO: 282198 - DNA, 1595 bp, Homo sapiens
agccaagtagatgaagttctcatttaacatcatcattctttaacagagcgtttattgggcttctactatgtcagacactggggatacatgagacacacaagatacagtccccaagaagatgtatgttgggtgctgaggagagagcttccctgcatcccttaattcacataatattccagttccaactaaaaggagataagactcgttctctgtactcccaacaagaaagtgacaagctgatttttaagaacatgatttcaaatctgattttcatgacacagcatctccatcctaaagtcaacaggcccattttcccagccttggatgttggggccactaacctggcacataagccccttctctctcccagtgcaccggctgctgacccatgccctgggccacacggccctgccaggcctgctcctgagcctgctgctcctgcccactgtgggctggcagcaggagtgccacctgggcacgctgagattcctgcatgcctcagccctgctcgccctggcttctgggctgctggcagtgctgctggcaggccttgggctgtccagtgcagccggcagctgtggatacatgcctgtccacctggccatgctggctggggagggacaccgccctagacggccccgtggggcactgccaccgtggctgtcgccgtggctgctgcttgccctgaccccactgctcagctctgagccacccttcctgcagctcctttgcggcctccttgccggcctggcctatgcagctggggccttccggtggctggaaccctcagagcgacggctgcaggtgctgcaggagggcgtcttgtgcaggaccttggcggggtgctggcccctgaggctccttgccaccccgggtagcctggcggagctgcctgtcacccatcctgccggagtgaggcctcccatccctggaccgccttatgtggcctcccctgacctctggtcccactgggaagactcagccctgcccccaccaagcctgaggcctgtgcagcccacctgggagggctcctcagaggcaggcctggactgggctggggccagcttctccccagggactccgatgtgggcggccttggatgagcagatgctgcaggagggcatccaggcctcgcttcttgacgggccagcccaggaaccccagagcgcaccatggctgtccaagtcctctgtctcctctctgcggctgcagcagctggagcgcatgggcttccctacggagcaggcggtggtggcactggcagccacaggccgtgtggagggtgccgtgtcactgttggttggaggacaagtgggcactgagaccctggtgacccatggaaagggtgggcctgcccactccgagggtcctgggcctccctagcccaggcagagagtggggcacaggcaggcccttgggtgctaagggctgggctgcatgtgggtagcccgagctcctactctgtctaaagagggccacagtggggagcaggggcacctctggaggcaggagaggccccccagcatgctgccctagtacgtgtttagaataaaaaccagtttgtttttcaacctggacctccttggaggcagcag

SEQ ID NO: 282199 - DNA, 1447 bp, Homo sapiens
tcggcgggagggctgggggaagggacccggactagaacaactgctgactaatccgcgggccgcggggaatgggtggcgcgccagccggtcggcaggggtcacgcggccgggtgtgcgcggaatggattcagggttctcgggtcgcgcccgggagctagagtcctgactcccagccggggtccccgaccggcctttcggggttgccgggcgcgctctgcaaaggggaaactgaggcccaaggaaattgagtatctctgcaaagtcaccagctgagttcgaaccagacagatcctgggaccccctactctatccgccaccggaagaatctccgtccttgtctttccattctgccctcccggcttcccagtaagcacacagccccaggaccacccttgaccgtcctcaaccaagcgatgcatgccaggggcccccatggccaactgtccccagcactgcctctggcctcctcagtcctgatgctgctgatgagcaccctgtggctggtgggggccggccccggcctggtcctggccccggagctgttgctggacccctggcaggtgcaccggctgctgacccatgccctgggccacacggccctgccaggcctgctcctgagcctgctgctcctgcccactgtgggctggcagcaggagtgccacctgggcacgctgagattcctgcatgcctcagccctgctcgccctggcttctgggctgctggcagtgctgctggcaggccttgggctgtccagtgcagccggcagctgtggatacatgcctgtccacctggccatgctggctggggagggacaccgccctagacggccccgtggggcactgccaccgtggctgtcgccgtggctgctgcttgccctgaccccactgctcagctctgagccacccttcctgcagctcctttgcggcctccttgccggcctggcctatgcagctggggccttccggtggctggaaccctcagagcgacggctgcaggtgctgcaggagggcgtcttgtgcaggaccttggcggggtgctggcccctgaggctccttgccaccccgggtagcctggcggagctgcctgtcacccatcctgccggagtgaggcctcccatccctggaccgccttatgtggcctcccctgacctctggtcccactgggaagactcagccctgcccccaccaagcctgaggcctgtgcctgcccactccgagggtcctgggcctccctagcccaggcagagagtggggcacaggcaggcccttgggtgctaagggctgggctgcatgtgggtagcccgagctcctactctgtctaaagagggccacagtggggagcaggggcacctctggaggcaggagaggccccccagcatgctgccctagtacgtgtttagaataaaaaccagtttgtttttcaacctggacctccttggaggcagcag

SEQ ID NO: 282200 - DNA, 1413 bp, Homo sapiens
tcggcgggagggctgggggaagggacccggactagaacaactgctgactaatccgcgggccgcggggaatgggtggcgcgccagccggtcggcaggggtcacgcggccgggtgtgcgcggaatggattcagggttctcgggtcgcgcccgggagctagagtcctgactcccagccggggtccccgaccggcctttcggggttgccgggcgcgctctgcaaaggggaaactgaggcccaaggaaattgagtatctctgcaaagtcaccagctgagttcgaaccagacagatcctgggaccccctactctatccgccaccggaagaatctccgtccttgtctttccattctgccctcccggcttcccagtaagcacacagccccaggaccacccttgaccgtcctcaaccaagcgatgcatgccaggggcccccatggccaactgtccccagcactgcctctggcctcctcagtcctgatgctgctgatgagcaccctgtggctggtgggggccggccccggcctggtcctggccccggagctgttgctggacccctggcaggtgcaccggctgctgacccatgccctgggccacacggccctgccaggcctgctcctgagcctgctgctcctgcccactgtgggctggcagcaggagtgccacctgggcacgctgagattcctgcatgcctcagccctgctcgccctggcttctgggctgctggcagtgctgctggcaggccttgggctgtccagtgcagccggcagctgtggatacatgcctgtccacctggccatgctggctggggagggacaccgccctagacggccccgtggggcactgccaccgtggctgtcgccgtggctgctgcttgccctgaccccactgctcagctctgagccacccttcctgcagctcctttgcggcctccttgccggcctggcctgtatcctttgcctgagcccagggcccgtggggatgtgtgggttctgtgggtgggtgcctgggaaggaagtggcacaaaggggtgaaggcccaagcaataccaaggagccgtgcacacacattccaggagcttctctgagtcttcctctgggacatgctctgggctgggacctggggtcttatggcctggtggaggtgccaattacaatgtaaagggctacgtgggctccctgtaatatcaatgccattcttcgcagaaatagaaacaataaccctaaaatttatatggaaccacaaaaggcccagaatagccaaaccaccctgagcaaaaattaaaaattaaaaaaattaaaagcctgaccgggcgcaggtgtcacgcctgtaaccccagcactttgggaggccaggcgggcagatcacttgaggtctggagttcaagaccagcctggccaacatggtgaaaccccat

SEQ ID NO: 282201 - DNA, 1786 bp, Homo sapiens
tcggcgggagggctgggggaagggacccggactagaacaactgctgactaatccgcgggccgcggggaatgggtggcgcgccagccggtcggcaggggtcacgcggccgggtgtgcgcggaatggattcagggttctcgggtcgcgcccgggagctagagtcctgactcccagccggggtccccgaccggcctttcggggttgccgggcgcgctctgcaaaggggaaactgaggcccaaggaaattgagtatctctgcaaagtcaccagctgagttcgaaccagacagatcctgggaccccctactctatccgccaccggaagaatctccgtccttgtctttccattctgccctcccggcttcccagtaagcacacagccccaggaccacccttgaccgtcctcaaccaagcgatgcatgccaggggcccccatggccaactgtccccagcactgcctctggcctcctcagtcctgatgctgctgatgagcaccctgtggctggtgggggccggccccggcctggtcctggccccggagctgttgctggacccctggcaggtgcaccggctgctgacccatgccctgggccacacggccctgccaggcctgctcctgagcctgctgctcctgcccactgtgggctggcagcaggagtgccacctgggcacgctgagattcctgcatgcctcagccctgctcgccctggcttctgggctgctggcagtgctgctggcaggccttgggctgtccagtgcagccggcagctgtggatacatgcctgtccacctggccatgctggctggggagggacaccgccctagacggccccgtggggcactgccaccgtggctgtcgccgtggctgctgcttgccctgaccccactgctcagctctgagccacccttcctgcagctcctttgcggcctccttgccggcctggcctatgcagctggggccttccggtggctggaaccctcagagcgacggctgcaggtgctgcaggagggcgtcttgtgcaggaccttggcggggtgctggcccctgaggctccttgccaccccgggtagcctggcggagctgcctgtcacccatcctgccggagtgaggcctcccatccctggaccgccttatgtggcctcccctgacctctggtcccactgggaagactcagccctgcccccaccaagcctgaggcctgtgcagcccacctgggagggctcctcagaggcaggcctggactgggctggggccagcttctccccagggactccgatgtgggcggccttggatgagcagatgctgcaggagggcatccaggcctcgcttcttgacgggccagcccaggaaccccagagcgcaccatggctgtccaagtcctctgtctcctctctgcggctgcagcagctggagcgcatgggcttccctacggagcaggcggtggtggcactggcagccacaggccgtgtggagggtgccgtgtcactgttggttggaggacaagtgggcactgagaccctggtgacccatggaaagggtgggcctgcccactccgagggtcctgggcctccctagcccaggcagagagtggggcacaggcaggcccttgggtgctaagggctgggctgcatgtgggtagcccgagctcctactctgtctaaagagggccacagtggggagcaggggcacctctggaggcaggagaggccccccagcatgctgccctagtacgtgtttagaataaaaaccagtttgtttttcaacctggacctccttggaggcagcag

SEQ ID NO: 282202 - DNA, 1718 bp, Homo sapiens
ggcccgggccagcggggaagggtccccaaggccggtcggctgggtgggaggcctcgaacgccgtgcctggccccgagaccctatccccggtaacggtcgaggtggagcaggccctttaatcatccctcatccgatatccttgtttctacagaaggggaaactgaggcccaaggaaattgagtatctctgcaaagtcaccagctgagttcgaaccagacagatcctgggaccccctactctatccgccaccggaagaatctccgtccttgtctttccattctgccctcccggcttcccagtaagcacacagccccaggaccacccttgaccgtcctcaaccaagcgatgcatgccaggggcccccatggccaactgtccccagcactgcctctggcctcctcagtcctgatgctgctgatgagcaccctgtggctggtgggggccggccccggcctggtcctggccccggagctgttgctggacccctggcaggtgcaccggctgctgacccatgccctgggccacacggccctgccaggcctgctcctgagcctgctgctcctgcccactgtgggctggcagcaggagtgccacctgggcacgctgagattcctgcatgcctcagccctgctcgccctggcttctgggctgctggcagtgctgctggcaggccttgggctgtccagtgcagccggcagctgtggatacatgcctgtccacctggccatgctggctggggagggacaccgccctagacggccccgtggggcactgccaccgtggctgtcgccgtggctgctgcttgccctgaccccactgctcagctctgagccacccttcctgcagctcctttgcggcctccttgccggcctggcctatgcagctggggccttccggtggctggaaccctcagagcgacggctgcaggtgctgcaggagggcgtcttgtgcaggaccttggcggggtgctggcccctgaggctccttgccaccccgggtagcctggcggagctgcctgtcacccatcctgccggagtgaggcctcccatccctggaccgccttatgtggcctcccctgacctctggtcccactgggaagactcagccctgcccccaccaagcctgaggcctgtgcagcccacctgggagggctcctcagaggcaggcctggactgggctggggccagcttctccccagggactccgatgtgggcggccttggatgagcagatgctgcaggagggcatccaggcctcgcttcttgacgggccagcccaggaaccccagagcgcaccatggctgtccaagtcctctgtctcctctctgcggctgcagcagctggagcgcatgggcttccctacggagcaggcggtggtggcactggcagccacaggccgtgtggagggtgccgtgtcactgttggttggaggacaagtgggcactgagaccctggtgacccatggaaagggtgggcctgcccactccgagggtcctgggcctccctagcccaggcagagagtggggcacaggcaggcccttgggtgctaagggctgggctgcatgtgggtagcccgagctcctactctgtctaaagagggccacagtggggagcaggggcacctctggaggcaggagaggccccccagcatgctgccctagtacgtgtttagaataaaaaccagtttgtttttcaacctggacctccttggaggcagcag

SEQ ID NO: 282203 - DNA, 2088 bp, Homo sapiens
tcggcgggagggctgggggaagggacccggactagaacaactgctgactaatccgcgggccgcggggaatgggtggcgcgccagccggtcggcaggggtcacgcggccgggtgtgcgcggaatggattcagggttctcgggtcgcgcccgggagctagagtcctgactcccagccggggtccccgaccggcctttcggggttgccgggcgcgctctgcaaaggggaaactgaggcccaaggaaattgagtatctctgcaaagtcaccagctgagttcgaaccagacagatcctgggaccccctactctatccgccaccggaagaatctccgtccttgtctttccattctgccctcccggcttcccagtaaggtaggcagggcctggtggtgcactgccccgtttcatagattgaagaaagtgaggtccagggggctcaagtcccagttccgagtgtccacggcacacagccccaggaccacccttgaccgtcctcaaccaagcgatgcatgccaggggcccccatggccaactgtccccagcactgcctctggcctcctcagtcctgatgctgctgatgagcaccctgtggctggtgggggccggccccggcctggtcctggccccggagctgttgctggacccctggcagggtgagggccagccacgtggaccttggaggaagcaggagacttgctgtagggcctgggcccacttggcaggagcagcacaaggcctccaggggtcaaacagggatggggcccagtgtcccgggaaagcatggccttagacaggagcatgcccagcacatccacagccaagaagggaggcagaggactccctagggtgggctggaacctatggtgcaccggctgctgacccatgccctgggccacacggccctgccaggcctgctcctgagcctgctgctcctgcccactgtgggctggcagcaggagtgccacctgggcacgctgagattcctgcatgcctcagccctgctcgccctggcttctgggctgctggcagtgctgctggcaggccttgggctgtccagtgcagccggcagctgtggatacatgcctgtccacctggccatgctggctggggagggacaccgccctagacggccccgtggggcactgccaccgtggctgtcgccgtggctgctgcttgccctgaccccactgctcagctctgagccacccttcctgcagctcctttgcggcctccttgccggcctggcctatgcagctggggccttccggtggctggaaccctcagagcgacggctgcaggtgctgcaggagggcgtcttgtgcaggaccttggcggggtgctggcccctgaggctccttgccaccccgggtagcctggcggagctgcctgtcacccatcctgccggagtgaggcctcccatccctggaccgccttatgtggcctcccctgacctctggtcccactgggaagactcagccctgcccccaccaagcctgaggcctgtgcagcccacctgggagggctcctcagaggcaggcctggactgggctggggccagcttctccccagggactccgatgtgggcggccttggatgagcagatgctgcaggagggcatccaggcctcgcttcttgacgggccagcccaggaaccccagagcgcaccatggctgtccaagtcctctgtctcctctctgcggctgcagcagctggagcgcatgggcttccctacggagcaggcggtggtggcactggcagccacaggccgtgtggagggtgccgtgtcactgttggttggaggacaagtgggcactgagaccctggtgacccatggaaagggtgggcctgcccactccgagggtcctgggcctccctagcccaggcagagagtggggcacaggcaggcccttgggtgctaagggctgggctgcatgtgggtagcccgagctcctactctgtctaaagagggccacagtggggagcaggggcacctctggaggcaggagaggccccccagcatgctgccctagtacgtgtttagaataaaaaccagtttgtttttcaacctggacctccttggaggcagcag

SEQ ID NO: 282204 - DNA, 1643 bp, Homo sapiens
tcggcgggagggctgggggaagggacccggactagaacaactgctgactaatccgcgggccgcggggaatgggtggcgcgccagccggtcggcaggggtcacgcggccgggtgtgcgcggaatggattcagggttctcgggtcgcgcccgggagctagagtcctgactcccagccggggtccccgaccggcctttcggggttgccgggcgcgctctgcaaaggggaaactgaggcccaaggaaattgagtatctctgcaaagtcaccagctgagttcgaaccagacagatcctgggaccccctactctatccgccaccggaagaatctccgtccttgtctttccattctgccctcccggcttcccagtaagcacacagccccaggaccacccttgaccgtcctcaaccaagcgatgcatgccaggggcccccatggccaactgtccccagcactgcctctggcctcctcagtcctgatgctgctgatgagcaccctgtggctggtgggggccggccccggcctggtcctggccccggagctgttgctggacccctggcaggtgcaccggctgctgacccatgccctgggccacacggccctgccaggcctgctcctgagcctgctgctcctgcccactgtgggctggcagcaggagtgccacctgggcacgctgagattcctgcatgcctcagccctgctcgccctggcttctgggctgctggcagtgctgctggcaggccttgggctgtccagtgcagccggcagctgtggatacatgcctgtccacctggccatgctggctggggagggacaccgccctagacggccccgtggggcactgccaccgtggctgtcgccgtggctgctgcttgccctgaccccactgctcagctctgagccacccttcctgcagctcctttgcggcctccttgccggcctggcctatgcagctggggccttccggtggctggaaccctcagagcgacggctgcaggtgctgcaggagggcgtcttgtgcaggaccttggcggggtgctggcccctgaggctccttgccaccccgggtagcctggcggagctgcctgtcacccatcctgccggagtgaggcctcccatccctggaccgccttatgtggcctcccctgacctctggtcccactgggaagactcagccctgcccccaccaagcctgaggcctgtgcgaaccccagagcgcaccatggctgtccaagtcctctgtctcctctctgcggctgcagcagctggagcgcatgggcttccctacggagcaggcggtggtggcactggcagccacaggccgtgtggagggtgccgtgtcactgttggttggaggacaagtgggcactgagaccctggtgacccatggaaagggtgggcctgcccactccgagggtcctgggcctccctagcccaggcagagagtggggcacaggcaggcccttgggtgctaagggctgggctgcatgtgggtagcccgagctcctactctgtctaaagagggccacagtggggagcaggggcacctctggaggcaggagaggccccccagcatgctgccctagtacgtgtttagaataaaaaccagtttgtttttcaacctggacctccttggaggcagcag

SEQ ID NO: 282205 - DNA, 1544 bp, Homo sapiens
tcggcgggagggctgggggaagggacccggactagaacaactgctgactaatccgcgggccgcggggaatgggtggcgcgccagccggtcggcaggggtcacgcggccgggtgtgcgcggaatggattcagggttctcgggtcgcgcccgggagctagagtcctgactcccagccggggtccccgaccggcctttcggggttgccgggcgcgctctgcaaaggggaaactgaggcccaaggaaattgagtatctctgcaaagtcaccagctgagttcgaaccagacagatcctgggaccccctactctatccgccaccggaagaatctccgtccttgtctttccattctgccctcccggcttcccagtaagcacacagccccaggaccacccttgaccgtcctcaaccaagcgatgcatgccaggggcccccatggccaactgtccccagcactgcctctggcctcctcagtcctgatgctgctgatgagcaccctgtggctggtgggggccggccccggcctggtcctggccccggagctgttgctggacccctggcaggtgcaccggctgctgacccatgccctgggccacacggccctgccaggcctgctcctgagcctgctgctcctgcccactgtgggctggcagcaggagtgccacctgggcacgctgagattcctgcatgcctcagccctgctcgccctggcttctgggctgctggcagtgctgctggcaggccttgggctgtccagtgcagccggcagctgtggatacatgcctgtccacctggccatgctggctggggagggacaccgccctagacggccccgtggggcactgccaccgtggctgtcgccgtggctgctgcttgccctgaccccactgctcagctctgagccacccttcctgcagctcctttgcggcctccttgccggcctggcctatgcagctggggccttccggtggctggaaccctcagagcgacggctgcaggtgctgcaggagggcgtcttgtgcaggaccttggcggggtgctggcccctgaggctccttgccaccccgggtagcctggcggagctgcctgtcacccatcctgccggagtgaggcctcccatccctggaccgccttatgtggcctcccctgacctctggtcccactgggaagactcagccctgcccccaccaagcctgaggcctgtgcagcccacctgggagggctcctcagaggcaggcctggactgggctggggccagcttctccccagggactccgatgtgggcggccttggatgagcagatgctgcaggagggcatccaggcctcgcttcttgacgggccagcccaggaaccccagagcgcaccatggctgtccaagtcctctgtctcctctctgcgcccgagctcctactctgtctaaagagggccacagtggggagcaggggcacctctggaggcaggagaggccccccagcatgctgccctagtacgtgtttagaataaaaaccagtttgtttttcaacctggacctccttggaggcagcag

SEQ ID NO: 282206 - DNA, 2797 bp, Homo sapiens
agcgggtctccagcgggagcgcgagacgctggtcaggctccgcggcgcagctcgaaaaggaataatcgcccccgattgactgaaattcctccggagccggcgccgcggccgcccgcgcccgagaccgcgctccggggccgcgtcctcctctcctccggaaaacgctcgcgacccagggccgccggcggccgcgactctgctgtgtcgatcgcctgagtccgttttcaccgtttgcgggatctggaaccgagttacatgcatgtccagtgggggcaggtttaattttgacgacggagggtcctactgtggaggctgggaggacggcaaggcgcacggccatggcgtctgcaccggccccaagggccaaggcgaatacaccggctcgtggagccacggcttcgaggtgctgggcgtctacacctggcccagcggcaacacgtaccagggcacctgggcgcagggcaagcgccacggcatcggcctggagagcaaggggaagtgggtgtacaagggcgagtggacgcacggattcaaggggcgctacggggtgcgggagtgcgcgggcaacggggccaaatacgaagggacctggagcaacgggctgcaggacggctacgggaccgagacctactcggacggaggtggttggacgcggactagcgctgtcgaagcaggctgctggagggaggagggaggcccatctgctcagtgagagcccaggaatctcgtctttcagtggctgcatcgttttcaccattagttgagggaatcgatctgtgccttcattctaagatgccaccgcattcggggcagagccggggccggaagccagggagctgcctgctgctgctgctgctgctgctgctgctgctgctgctgctgctgtaagatggtttctgtgcagggaaccttggccggctctgcagctgcccgcctgcctggactctccgatatccactcctcagtgcacctgacacgcatggagccggtcctttcctggaagccagaccccaaacaaactggcttccccgaccagtccactcccatgtgggagcttatcctcagaggcactgggtcctctgcctccctcgggcggctcgcctgtttcaggcatggatgcctgggaagggagtgagacgcagcaatgacttgtgcttctgccgagaataaaaatcctgagcgtacgtgtgctctagtcctccccgcccgctcgctgcctccgagtctcatgaagaaagctcggaacacctgctccacggccacatccaggagtggcagggggctggagagtaattattattttggccttatgcaactgaaaagcagggttcgttattacccgaagaggaggaggagtctggggcagttaattatataatgctcctgcctgtcaaagccgtgcccagccccggtctcaggcggccttttctgtgccgttgttgttttcatggagcaggttggagagcttccctgaccctggggcgctgagggccgggcgggagcagacggtgctcccttggttccaggctgtgggcctgtgtgtgtgtgtgcgcgcgcgtgcaggcacagggaggcccgggcagcagatgtgggtggctgagacaggcaggcagcctggcgcttccagctgggctgtttggagcccaggggctgctatcacccccaggctctggccaggaggctctgcagacctgtcctccagaggtgctcctggctgagcctgctccaggaggactgtgcaggccgggctcacgcagggcatggggacgagaggagccagggctttcgttgtctctgaaactcctcagaatatctgggggtgaggctgagcaccccactctgcccacgctcctcagacatctccagagtcctgaggaatcatttctttcattcaacaaatactgatggaatgtttgctatgagccaggtgtgccaggctctgggaaaaccacactgagcaaagcagacagccaggtgtcctaggctttggaaaaaccacactgagcaaagcagacacagatctttgccctcacggagcttacatttgagggagaaggagcggcgattatgttgtgactttttagggaagaaaggatctgattctgtggctggccgtgtagtttaggatctgacgggttaaggggagagatgtttttctctataggtccacttccctgggctctccactccagccagacagctccctcagcatcctgctcccctaagcccttcccctccttgtggtcctgcctgatcatgtccattctacagatgaggccagtaaggcccgggctttgtgattcaggagtcccagcctttggctgcagggatccccgatctgtctgggaccaaacccccctcgttcttgcatcacattgccggaagaagcccagattgtcaacatcctctcaaggggtatgcggttcttagctctcccataagcaaagccaggcagggatgcagatggggagcttcatggccggctctcccttttggttggcaacatggcatgacaggaaatagaattgacccttctggtcttgaggactcgggcctggacatctgggccacttttctggagggctcccagcttcctgttgggaagggggtgattatggcactgagtgtccccaggcagcccatggaaggagcctgcagggtgtggggatcgccagaatggggcagagacctccatgcctccttcccagtcaactggtgggtggtgacagccatgtcgcagtgaggaaggagttaatggccccagctccactctgacttttcctttgcacaagaagtg

SEQ ID NO: 282207 - DNA, 4167 bp, Homo sapiens
agcgggtctccagcgggagcgcgagacgctggtcaggctccgcggcgcagctcgaaaaggaataatcgcccccgattgactgaaattcctccggagccggcgccgcggccgcccgcgcccgagaccgcgctccggggccgcgtcctcctctcctccggaaaacgctcgcgacccagggccgccggcggccgcgactctgctgtgtcgatcgcctgagtccgttttcaccgtttgcgggatctggaaccgagttacatgcatgtccagtgggggcaggtttaattttgacgacggagggtcctactgtggaggctgggaggacggcaaggcgcacggccatggcgtctgcaccggccccaagggccaaggcgaatacaccggctcgtggagccacggcttcgaggtgctgggcgtctacacctggcccagcggcaacacgtaccagggcacctgggcgcagggcaagcgccacggcatcggcctggagagcaaggggaagtgggtgtacaagggcgagtggacgcacggattcaaggggcgctacggggtgcgggagtgcgcgggcaacggggccaaatacgaagggacctggagcaacgggctgcaggacggctacgggaccgagacctactcggacggagggacctaccagggccagtgggtcggtggcatgcgccagggctacggcgtccggcagagcgtcccgtatggcatggccgcggtcatccgctcacccctgaggacgtccatcaactccctgcgcagcgagcacaccaacggcacggcgctgcatcccgacgcctctccggcggtggccggcagcccggccgtgtcccgcgggggcttcgtgctcgtggcccacagtgactccgagatcctcaagagcaagaagaaggggctgtttcggcgctcgctgctgagtgggctgaagctgcgcaagtcggagtccaagagcagcctggccagccaacgcagcaagcagagctcctttcgcagcgaggcgggcatgagcaccgtcagctccacggccagcgacatccactccaccatcagcctgggcgaggctgaggccgagctggcggtcatcgaggacgacatcgacgccaccaccaccgagacctacgtgggcgagtggaagaacgacaaacgctccggcttcggcgtgagccagcgctcggacgggctcaagtacgagggcgagtgggccagcaaccggcgccatggctacggctgcatgaccttcccggacggcaccaaggaggagggcaagtacaagcagaacatcctcgtcggcggcaagcgcaagaacctcatccccctgcgggccagcaagatccgcgagaaggtggaccgcgccgttgaggccgctgagcgggccgccaccatcgccaagcagaaggctgagatcgcggcttccaggacctcccactctcgggcaaaggccgaggcagccctcacagcagctcagaaagcccaggaggaggcgcggatcgccaggatcactgccaaagagttctccccttccttccagcaccgggaaaacgggctggagtaccagaggccgaagcgtcagacctcctgtgacgacatcgaggtgctgtccaccgggacacccctgcagcaggagagccccgagctgtaccgcaagggcaccactccctccgacctgacccccgacgacagccccctgcagagcttccccaccagccccgcggccaccccgccgcccgcgcccgccgccaggaacaaggtcgcccacttctcgaggcaggtgtcggtggacgaggagcggggcggggacatccagatgctcctggagggccgggccggggactgcgcccgcagcagctggggcgaggagcaggccgggggctccaggggtgtccgcagcggtgccctgcgcggcggcctgctcgtggatgacttccgcacccgaggttcgggccgcaagcagcccgggaaccccaagccgcgggagcggcggacggagtcaccccccgtgttcacgtggacttcccaccaccgggccagcaaccacagccccggaggctccaggctgctggagctgcaggaggagaagctgagcaactaccggatggagatgaaacccttgctgaggatggagacgcatccccagaaaagacgctacagcaagggcggcgcctgccggggcttgggggacgaccaccgccccgaggaccggggcttcggggtgcagagactgcggtccaaggcccagaacaaggagaacttcaggccggcctcctccgcggagcccgccgtgcagaaactggcgagcctgcggctgggcggggccgagccccggttgctgcgttgggacttgaccttctccccgccccagaaatccttgcctgtcgctctagagtccgacgaggagaatggggatgagctcaagtccagtacgggctcagcgcctatcctggtggtcatggtgatcttgctcaacatcggagtcgccattctgtttattaactttttcatctgatgagatgtcgcggtagcaaaaatagagaaagggtagaaaaaagggacattaaaattaaaagcaaaaccacaagaagggaaagaccgcaactcggacagcccagcgacttccaagtcctctcacagaagaaccacacgattgggtatcactcacagtttgcctttttttctgggtaatgttttttggattttagccaaaattctttgcttgtataacactctgctgtgtggcatggcagaaggaggccagcacgcagcccctccagctccacgtggagacagaagggatcccggcacatcagtggtaacagcggacgttgtcctcgtggtcacacgtcccgtcttgggtgtggatggagggcagcccggggcagagcctcagccccgcggcccctgagtggcagggctgactcccgtcgacacgagcttagaaagtggattcactgctttctctgtctagaacagacgggtgacaagtatgggcaggaggcatggggcagggtggcccaccccagtgggcagttagcctggcctttttctgtgtgagatctgtgctgcacacctgagggagggggagggatcggccacctcctccctgtgagacggatgcaggtccttccctcttctcggcactgcccccggccttccatgagaagccgactccccacaccgagttttaaagcaaagcccttttcttctgctgcccactcactgtgggtcccattcggctgtttcccccaccagaccccagggaagccggggcccactccgatccgcctgggctcagctaagcacggaagccaagggggctgtgccgtggagctgggctcgcgccggggctctgggtgtgtgcgcttggcgtgcagggtggacgcgtggggttccgtgtccccagcagtgagggccctagaggacgccttctcccatggttactgatctccacgggttttcacatctctgtactgtgcctgcctcaacttcccctaacagatatgcatattccttccagatgcctcagtgctacaccacagtgggcctggtcccaggacaggaatgcggttcaaacccagtggcttgaaacttcctgagaaactgtagcatatccagccccctaaaatgtacaatgtaacttgttcagtccaacaaaaacaggttccttatgtttctgccttctccaccagggtcgctccatcacccaaacaaaagaacaaggtttgccaggatgtccgagtgccccctggccctggctctcgtgtgcatggacgtgcctgaggggtccgggcacggccatacgcaggacccctgtgcccggggaggcgctgcagggattccccatccggtcgtcttggggccagcccgtcttatggactctgccttgctttgcttatgtttagctgtttctctgctacctttcgagcagacttctttactacactgcactggattgctatatttttaaccagaaataaactaaagattagagcaaaaaaaaaaaagggggcgctagagtcccccggggccaagctacccgtcccgttctgtccggggcccatgggatcgattaagcagccgcgggtacagccgcggaaccgccggctggggcccccccggggctggcccccggagccggaaaaagtgggccccctggggtctgtacccccc

SEQ ID NO: 282208 - DNA, 1184 bp, Homo sapiens
agcgggtctccagcgggagcgcgagacgctggtcaggctccgcggcgcagctcgaaaaggaataatcgcccccgattgactgaaattcctccggagccggcgccgcggccgcccgcgcccgagaccgcgctccggggccgcgtcctcctctcctccggaaaacgctcgcgacccagggccgccggcggccgcgactctgctgtgtcgatcgcctgagtccgttttcaccgtttgcgggatctggaaccgagttacatgcatgtccagtgggggcaggtttaattttgacgacggagggtcctactgtggaggctgggaggacggcaaggcgcacggccatggcgtctgcaccggccccaagggccaaggcgaatacaccggctcgtggagccacggcttcgaggtgctgggcgtctacacctggcccagcggcaacacgtaccagggcacctgggcgcagggcaagcgccacggcatcggcctggagagcaaggggaagtgggtgtacaagggcgagtggacgcacggattcaaggggcgctacggggtgcgggagtgcgcgggcaacggggccaaatacgaagggacctggagcaacgggctgcaggacggctacgggaccgagacctactcggacggaggtggttggacgcggactagcgctgtcgaagcaggctgctggagggaggagggaggcccatctgctcagtgagagcccaggaatctcgtctttcagtggctgcatcgttttcaccattagttgagggaatcgatctgtgccttcattctaagatgccaccgcattcggggcagagccggggccggaagccagggagctgcctgctgctgctgctgctgctgctgctgctgctgctgctgctgctgtaagatggtttctgtgcagggaaccttggccggctctgcagctgcccgcctgcctggactctccgatatccactcctcagtgcacctgacacgcatggagccggtcctttcctggaagccagaccccaaacaaactggcttccccgaccagtccactcccatgtgggagcttatcctcagaggcactgggtcctctgcctccctcgggcggctcgcctgtttcaggcatggatgcctgggaagggagtgagacgcagcaatgacttgtgcttctgccgagaataaaaatcctgagcgta

SEQ ID NO: 282209 - DNA, 1033 bp, Homo sapiens
agcgggtctccagcgggagcgcgagacgctggtcaggctccgcggcgcagctcgaaaaggaataatcgcccccgattgactgaaattcctccggagccggcgccgcggccgcccgcgcccgagaccgcgctccggggccgcgtcctcctctcctccggaaaacgctcgcgacccagggccgccggcggccgcgactctgctgtgtcgatcgcctgagtccgttttcaccgtttgcgggatctggaaccgagttacatgcatgtccagtgggggcaggtttaattttgacgacggagggtcctactgtggaggctgggaggacggcaaggcgcacggccatggcgtctgcaccggccccaagggccaaggcgaatacaccggctcgtggagccacggcttcgaggtgctgggcgtctacacctggcccagcggcaacacgtaccagggcacctgggcgcagggcaagcgccacggcatcggcctggagagcaaggggaagtgggtgtacaagggcgagtggacgcacggattcaaggggcgctacggggtgcgggagtgcgcgggcaacggggccaaatacgaagggacctggagcaacgggctgcaggacggctacgggaccgagacctactcggacggagatgccaccgcattcggggcagagccggggccggaagccagggagctgcctgctgctgctgctgctgctgctgctgctgctgctgctgctgctgtaagatggtttctgtgcagggaaccttggccggctctgcagctgcccgcctgcctggactctccgatatccactcctcagtgcacctgacacgcatggagccggtcctttcctggaagccagaccccaaacaaactggcttccccgaccagtccactcccatgtgggagcttatcctcagaggcactgggtcctctgcctccctcgggcggctcgcctgtttcaggcatggatgcctgggaagggagtgagacgcagcaatgacttgtgcttctgccgagaataaaaatcctgagcgta

SEQ ID NO: 282210 - DNA, 253 bp, Homo sapiens
gctcctccctgtctcccccaggacctcccactctcgggcaaaggccgaggcagccctcacagcagctcagaaagcccaggaggaggcgcggatcgccaggatcactgccaaagagttctccccttccttccagcaccgggaaaacggtgagtctcgccgggcctgatactggcatcgtgggaagggggtgcgtggatggctgggcagtcctggcagcagatgtgtcctccagagcgggtaggcttagatgggc

SEQ ID NO: 282211 - DNA, 901 bp, Homo sapiens
tgctggggctgacaggctccaaacaggacaacatcttgttgatgggggctgtgccgtggagctgggctcgcgccggggctctgggtgtgtgcgcttggcgtgcagggtggacgcgtggggttccgtgtccccagcagtgagggccctagaggacgccttctcccatggttactgatctccacgggttttcacatctctgtactgtgcctgcctcaacttcccctaacagatatgcatattccttccagatgcctcagtgctacaccacagtgggcctggtcccaggacaggaatgcggttcaaacccagtggcttgaaacttcctgagaaactgtagcatatccagccccctaaaatgtacaatgtaacttgttcagtccaacaaaaacaggttccttatgtttctgccttctccaccagggtcgctccatcacccaaacaaaagaacaaggtttgccaggatgtccgagtgccccctggccctggctctcgtgtgcatggacgtgcctgaggggtccgggcacggccatacgcaggacccctgtgcccggggaggcgctgcagggattccccatccggtcgtcttggggccagcccgtcttatggactctgccttgctttgcttatgtttagctgtttctctgctacctttcgagcagacttctttactacactgcactggattgctatatttttaaccagaaataaactaaagattagagcaaaaaaaaaaaagggggcgctagagtcccccggggccaagctacccgtcccgttctgtccggggcccatgggatcgattaagcagccgcgggtacagccgcggaaccgccggctggggcccccccggggctggcccccggagccggaaaaagtgggccccctggggtctgtacccccc

SEQ ID NO: 282212 - DNA, 3990 bp, Homo sapiens
agcgggtctccagcgggagcgcgagacgctggtcaggctccgcggcgcagctcgaaaaggaataatcgcccccgattgactgaaattcctccggagccggcgccgcggccgcccgcgcccgagaccgcgctccggggccgcgtcctcctctcctccggaaaacgctcgcgacccagggccgccggcggccgcgactctgctgtgtcgatcgcctgagtccgttttcaccgtttgcgggatctggaaccgagttacatgcatgtccagtgggggcaggtttaattttgacgacggagggtcctactgtggaggctgggaggacggcaaggcgcacggccatggcgtctgcaccggccccaagggccaaggcgaatacaccggctcgtggagccacggcttcgaggtgctgggcgtctacacctggcccagcggcaacacgtaccagggcacctgggcgcagggcaagcgccacggcatcggcctggagagcaaggggaagtgggtgtacaagggcgagtggacgcacggattcaaggggcgctacggggtgcgggagtgcgcgggcaacggggccaaatacgaagggacctggagcaacgggctgcaggacggctacgggaccgagacctactcggacggagggacctaccagggccagtgggtcggtggcatgcgccagggctacggcgtccggcagagcgtcccgtatggcatggccgcggtcatccgctcacccctgaggacgtccatcaactccctgcgcagcgagcacaccaacggcacggcgctgcatcccgacgcctctccggcggtggccggcagcccggccgtgtcccgcgggggcttcgtgctcgtggcccacagtgactccgagatcctcaagagcaagaagaaggggctgtttcggcgctcgctgctgagtgggctgaagctgcgcaagtcggagtccaagagcagcctggccagccaacgcagcaagcagagctcctttcgcagcgaggcgggcatgagcaccgtcagctccacggccagcgacatccactccaccatcagcctgggcgaggctgaggccgagctggcggtcatcgaggacgacatcgacgccaccaccaccgagacctacgtgggcgagtggaagaacgacaaacgctccggcttcggcgtgagccagcgctcggacgggctcaagtacgagggcgagtgggccagcaaccggcgccatggctacggctgcatgaccttcccggacggcaccaaggaggagggcaagtacaagcagaacatcctcgtcggcggcaagcgcaagaacctcatccccctgcgggccagcaagatccgcgagaaggtggaccgcgccgttgaggccgctgagcgggccgccaccatcgccaagcagaaggctgagatcgcggcttccaggacctcccactctcgggcaaaggccgaggcagccctcacagcagctcagaaagcccaggaggaggcgcggatcgccaggatcactgccaaagagttctccccttccttccagcaccgggaaaacgggctggagtaccagaggccgaagcgtcagacctcctgtgacgacatcgaggtgctgtccaccgggacacccctgcagcaggagagccccgagctgtaccgcaagggcaccactccctccgacctgacccccgacgacagccccctgcagagcttccccaccagccccgcggccaccccgccgcccgcgcccgccgccaggaacaaggtcgcccacttctcgaggcaggtgtcggtggacgaggagcggggcggggacatccagatgctcctggagggccgggccggggactgcgcccgcagcagctggggcgaggagcaggccgggggctccaggggtgtccgcagcggtgccctgcgcggcggcctgctcgtggatgacttccgcacccgaggttcgggccgcaagcagcccgggaaccccaagccgcgggagcggcggacggagtcaccccccgtgttcacgtggacttcccaccaccgggccagcaaccacagccccggaggctccaggctgctggagctgcaggaggagaagctgagcaactaccggatggagatgaaacccttgctgaggatggagacgcatccccagaaaagacgctacagcaagggcggcgcctgccggggcttgggggacgaccaccgccccgaggaccggggcttcggggtgcagagactgcggtccaaggcccagaacaaggagaacttcaggccggcctcctccgcggagcccgccgtgcagaaactggcgagcctgcggctgggcggggccgagccccggttgctgcgttgggacttgaccttctccccgccccagaaatccttgcctgtcgctctagagtccgacgaggagaatggggatgagctcaagtccagtacgggctcagcgcctatcctggtggtcatggtgatcttgctcaacatcggagtcgccattctgtttattaactttttcatctgatgagatgtcgcggtagcaaaaatagagaaagggtagaaaaaagggacattaaaattaaaagcaaaaccacaagaagggaaagaccgcaactcggacagcccagcgacttccaagtcctctcacagaagaaccacacgattgggtatcactcacagtttgcctttttttctgggtaatgttttttggattttagccaaaattctttgcttgtataacactctgctgtgtggcatggcagaaggaggccagcacgcagcccctccagctccacgtggagacagaagggatcccggcacatcagtggtaacagcggacgttgtcctcgtggtcacacgtcccgtcttgggtgtggatggagggcagcccggggcagagcctcagccccgcggcccctgagtggcagggctgactcccgtcgacacgagcttagaaagtggattcactgctttctctgtctagaacagacgggtgacaagtatgggcaggaggcatggggcagggtggcccaccccagtgggcagttagcctggcctttttctgtgtgagatctgtgctgcacacctgagggagggggagggatcggccacctcctccctgtgagacggatgcaggtccttccctcttctcggcactgcccccggccttccatgagaagccgactccccacaccgagttttaaagcaaagcccttttcttctgctgcccactcactgtgggtcccattcggctgtttcccccaccagaccccagggaagccggggcccactccgatccgcctgggctcagctaagcacggaagccaagggggctgtgccgtggagctgggctcgcgccggggctctgggtgtgtgcgcttggcgtgcagggtggacgcgtggggttccgtgtccccagcagtgagggccctagaggacgccttctcccatggttactgatctccacgggttttcacatctctgtactgtgcctgcctcaacttcccctaacagatatgcatattccttccagatgcctcagtgctacaccacagtgggcctggtcccaggacaggaatgcggttcaaacccagtggcttgaaacttcctgagaaactgtagcatatccagccccctaaaatgtacaatgtaacttgttcagtccaacaaaaacaggttccttatgtttctgccttctccaccagggtcgctccatcacccaaacaaaagaacaaggtttgccaggatgtccgagtgccccctggccctggctctcgtgtgcatggacgtgcctgaggggtccgggcacggccatacgcaggacccctgtgcccggggaggcgctgcagggattccccatccggtcgtcttggggccagcccgtcttatggactctgccttgctttgcttatgtttagctgtttctctgctacctttcgagcagacttctttactacactgcactggattgctatatttttaaccagaaataaactaaagattagagca

SEQ ID NO: 282213 - DNA, 2952 bp, Homo sapiens
agcgggtctccagcgggagcgcgagacgctggtcaggctccgcggcgcagctcgaaaaggaataatcgcccccgattgactgaaattcctccggagccggcgccgcggccgcccgcgcccgagaccgcgctccggggccgcgtcctcctctcctccggaaaacgctcgcgacccagggccgccggcggccgcgactctgctgtgtcgatcgcctgagtccgttttcaccgtttgcgggatctggaaccgagttacatgcatgtccagtgggggcaggtttaattttgacgacggagggtcctactgtggaggctgggaggacggcaaggcgcacggccatggcgtctgcaccggccccaagggccaaggcgaatacaccggctcgtggagccacggcttcgaggtgctgggcgtctacacctggcccagcggcaacacgtaccagggcacctgggcgcagggcaagcgccacggcatcggcctggagagcaaggggaagtgggtgtacaagggcgagtggacgcacggattcaaggggcgctacggggtgcgggagtgcgcgggcaacggggccaaatacgaagggacctggagcaacgggctgcaggacggctacgggaccgagacctactcggacggagggacctaccagggccagtgggtcggtggcatgcgccagggctacggcgtccggcagagcgtcccgtatggcatggccgcggtcatccgctcacccctgaggacgtccatcaactccctgcgcagcgagcacaccaacggcacggcgctgcatcccgacgcctctccggcggtggccggcagcccggccgtgtcccgcgggggcttcgtgctcgtggcccacagtgactccgagatcctcaagagcaagaagaaggggctgtttcggcgctcgctgctgagtgggctgaagctgcgcaagtcggagtccaagagcagcctggccagccaacgcagcaagcagagctcctttcgcagcgaggcgggcatgagcaccgtcagctccacggccagcgacatccactccaccatcagcctgggcgaggctgaggccgagctggcggtcatcgaggacgacatcgacgccaccaccaccgagacctacgtgggcgagtggaagaacgacaaacgctccggcttcggcgtgagccagcgctcggacgggctcaagtacgagggcgagtgggccagcaaccggcgccatggctacggctgcatgaccttcccggacggcaccaaggaggagggcaagtacaagcagaacatcctcgtcggcggcaagcgcaagaacctcatccccctgcgggccagcaagatccgcgagaaggtggaccgcgccgttgaggccgctgagcgggccgccaccatcgccaagcagaaggctgagatcgcggcttccaggacctcccactctcgggcaaaggccgaggcagccctcacagcagctcagaaagcccaggaggaggcgcggatcgccaggatcactgccaaagagttctccccttccttccagcaccgggaaaacgggctggagtaccagaggccgaagcgtcagacctcctgtgacgacatcgaggtgctgtccaccgggacacccctgcagcaggagagccccgagctgtaccgcaagggcaccactccctccgacctgacccccgacgacagccccctgcagagcttccccaccagccccgcggccaccccgccgcccgcgcccgccgccaggaacaaggtcgcccacttctcgaggcaggtgtcggtggacgaggagcggggcggggacatccagatgctcctggagggccgggccggggactgcgcccgcagcagctggggcgaggagcaggccgggggctccaggggtgtccgcagcggtgccctgcgcggcggcctgctcgtggatgacttccgcacccgaggttcgggccgcaagcagcccgggaaccccaagccgcgggagcggcggacggagtcaccccccgtgttcacgtggacttcccaccaccgggccagcaaccacagccccggaggctccaggctgctggagctgcaggaggagaagctgagcaactaccggatggagatgaaacccttgctgaggatggagacgcatccccagaaaagacgctacagcaagggcggcgcctgccggggcttgggggacgaccaccgccccgaggaccggggcttcggggtgcagagactgcggtccaaggcccagaacaaggagaacttcaggccggcctcctccgcggagcccgccgtgcagaaactggcgagcctgcggctgggcggggccgagccccggttgctgcgttgggacttgaccttctccccgccccagaaatccttgcctgtcgctctagagtccgacgaggagaatggggatgagctcaagtccagtacgggctcagcgcctatcctggtggtcatggtgatcttgctcaacatcggagtcgccattctgtttattaactttttcatctgatgagatgtcgcggtagcaaaaatagagaaagggtagaaaaaagggacattaaaattaaaagcaaaaccacaagaagggaaagaccgcaactcggacagcccagcgacttccaagtcctctcacagaagaaccacacgattggggtcgctccatcacccaaacaaaagaacaaggtttgccaggatgtccgagtgccccctggccctggctctcgtgtgcatggacgtgcctgaggggtccgggcacggccatacgcaggacccctgtgcccggggaggcgctgcagggattccccatccggtcgtcttggggccagcccgtcttatggactctgccttgctttgcttatgtttagctgtttctctgctacctttcgagcagacttctttactacactgcactggattgctatatttttaaccagaaataaactaaagattagagca

SEQ ID NO: 282214 - DNA, 1004 bp, Homo sapiens
  misc_feature (997)..(997): n is a, c, g, or t
  misc_feature (999)..(999): n is a, c, g, or t
  misc_feature (1001)..(1001): n is a, c, g, or t
  misc_feature (1003)..(1004): n is a, c, g, or t
tccctgcccggcagccccgcgcctagccagcgctgtttcaagccctacccgctcatcaccccctgctacatcaagaccaccacccggcagctcagctcgcccaatcactccccgtctcagtcccctaatcagagccccaggatcaagaggcggccggaaccctccctgagccgagggtccagaactgccctggcctccgtagccgccccggccaagaagcaccgggcagacggcggccttgcggccggcctgagccgctcggctgactggacggaggagctaggcgcccgcacgccccgggtgggaggctccgcgcacctgctggagcgcggggtggcgagtgacagcggcggtggggtgtccccagcactggccgccaaggcgtctggggcccccgcggctgcggatggcttccagaacgtgttcacagggcgaacgctgttggagaagctgttcagccagcaggagaacgggcctccagaagaagcagagaagttttgctcccggatcattgccatgggtcttctccttccttttagtgattgcttcagggaaccgtgtaatcagaatgcccagacgaatgcagcttcgtttgatcaagatcaactttatacctgggctgcagttagtcaacccacacactcattggactattcagaagggcagtttcctaggcgagttccatccatggggccaccatccaaacctcccgatgaggaacacaggctcgaggatgctgaaacagaatctcaatctgctgtttcagaaactccccaaaaacgctcagatgctgtccagaaggaagttgttgacatgaagtctgagggacaggccactgtaattcagcagctggaacagactattgaggatctgagaaccaaaatagctgaactagagaggcagtatcctgccctggacacagaggtggccagtggtcatcaagggcttgagaatggagtgacagcctcaggcgatgtctgtctcgaagctctcaggntngngnn

SEQ ID NO: 282215 - DNA, 400 bp, Homo sapiens
cgtccagcaggtagaagaggcccgtgggtttcttgctgatgagatggatgcagccgacattgtctgtgtagccgatgttgtgccacgtgatcccctcgccctgatattcctcctgcaggggtggcgcggggtcgagatcgacagacgctatgctgtacaggctagtctggacctcctggcctcaagtgatcctcctgcctcggtctcccgagtagctgagattacaggaggaaacgtagacatggcgtggcattcagagattcctgggaaaacattctcctacctctcatccttctcctgagacaccaggcgagacttttcaagcagatatttctcgacgacagctctgtcattaagagaaaaacagaaagaataaaacattacattttagtattgtgtt

SEQ ID NO: 282216 - DNA, 496 bp, Homo sapiens
cgtccagcaggtagaagaggcccgtgggtttcttgctgatgagatggatgcagccgacattgtctgtgtagccgatgttgtgccacgtgatcccctcgccctgatattcctcctgcaggggtggcgcggggtcgagatcgacagacgctatgctgtacaggctagtctggacctcctggcctcaagtgatcctcctgcctcggtctcccgagtagctgagattacagtagagatgaggttttgccatgttagccaatctgatctcgaactcctgacctcaggtcatccgcccaccttggcctcccaaagtactgggattacaggaggaaacgtagacatggcgtggcattcagagattcctgggaaaacattctcctacctctcatccttctcctgagacaccaggcgagacttttcaagcagatatttctcgacgacagctctgtcattaagagaaaaacagaaagaataaaacattacattttagtattgtgtt

SEQ ID NO: 282217 - DNA, 506 bp, Homo sapiens
tttcaggtgctatcatgttagaggtctctgatctctgaagatctttgcttaaaggaagtctgccttggcctttgagaaactgctctctggagtacagcccacctagtgaatatcaagcagtgtttcaaaagcactggacatctcaaaagggagattcaaggtcaagtgtgggccctcatttcagtgtatcagtggaaagaaaaaaggcgcaaattcattcctccagagactgggatgcaaatgggagttatctctgaagacaaaggaaagggttacctgtttcagcatcctcgagcctgtgttcctcatcgggaggtttggatggtggccccatggatggaactcgcctaggaaactgcccttctgaatagtccaacgagtgtgtgggttgactaactgcagcccaggtataaagttgatcttgctatatttaaaaataaaaaatgttgaaatgctattaattcagttacaaaaaaataaaccatgactaatacattgcaaaatca

SEQ ID NO: 282218 - DNA, 347 bp, Homo sapiens
tttcaggtgctatcatgttagaggtctctgatctctgaagatctttgcttaaaggaagtctgccttggcctttgagaaactgctctctttatctctgaagacaaaggaaagggttacctgtttcagcatcctcgagcctgtgttcctcatcgggaggtttggatggtggccccatggatggaactcgcctaggaaactgcccttctgaatagtccaacgagtgtgtgggttgactaactgcagcccaggtataaagttgatcttgctatatttaaaaataaaaaatgttgaaatgctattaattcagttacaaaaaaataaaccatgactaatacattgcaaaatca

SEQ ID NO: 282219 - DNA, 700 bp, Homo sapiens
  misc_feature (672)..(672): n is a, c, g, or t
tttcaggtgctatcatgttagaggtctctgatctctgaagatctttgcttaaaggaagtctgccttggcctttgagaaactgctctctggagtacagcccacctagtgaatatcaagcagtgtttcaaaagcactggacatctcaaaagggagattcaaggtcaagtgtgggccctcatttcagtgtatcagtggaaagaaaaaaggcgcaaattcattcctccagagactgggatgcaaatgggagttatctctgaagacaaaggaaagggttacctgtttcagcatcctcgagcctgtgttcctcatcgggaggtttggatggtggccccatggatggaactcgcctaggaaactgcccttctgaatagtccaacgagtgtgtgggttgactaactgcagcccaggtataaagttgatcttgatcaaacgaagctgcattcgtctgggcattctgattacacggttccctgaagcaatcactaaaaggaaggagaagacccatggcaatgatccgggagcaaaacttctctgcttcttctggaggcccgttctcctgctggctgaacagcttctccaacagcgttcgccctgtgaacacgttctggaagccatccgcagccgcggcggccccagacgccttggggccacgtgctggggacaccccaccgncgcttgtaattcggcaacccggggttca

SEQ ID NO: 282220 - DNA, 281 bp, Homo sapiens
gatttaataaaacttctctctctctatcttgcctcttccagttatctctgaagacaaaggaaagggttacctgtttcagcatcctcgagcctgtgttcctcatcgggaggtttggatggtggccccatggatggaactcgcctaggaaactgcccttctgaatagtccaacgagtgtgtgggttgactaactgcagcccaggtataaagttgatcttgctatatttaaaaataaaaaatgttgaaatgctattaattcagttacaaaaaaataaaccatga

SEQ ID NO: 282221 - DNA, 1671 bp, Homo sapiens
agcggagtcggagacacaacaaagatggcggcggtgactgtgacggtgacgaagacggcggcggcggcgacggcatttaacaaggcggtgtggtttactccatgcagttgtcaggagacctctgtatggcttttcaattttagttgaaattctctctccatggccttttggagtcccttgctgtatctccgaagtaaatttcaattactctacatttcatcaatgttggagtggcaagaaaaaggaggaacagatttggggtgaaaagttttgttttctaggtctaacaaactgtaaatgttaaaaaagcaaagatgggtgaaaaaaaaccagagcctttggacttcgtgaaagattttcaggaatacctgactcagcagacccatcacgtgaacatgatttctggatcagttagtggggacaaagaagcagaggctcttcagggagctggaacagatggtgatcaaaatggacttgatcacccatctgttgaagtttccttggatgaaaactcaggaatgttagtagacgggtttgaaaggacctttgatgggaagcttaagtgtcggtactgcaactatgccagcaaaggaacagcccggcttattgaacacatcagaatccacacaggtgaaaaacctcatcgatgtcatctttgtccatttgcatctgcttatgagcgtcatctggaagcccatatgcgttctcatactggagaaaaaccatacaaatgtgaattatgttccttccgctgcagtgatcgaagtaacttgtcccatcatcgaaggcgcaagcataaaatggtaccaattaaaggtactaggtcttccttaagcagcaagaaaatgtggggggttttacagaagaaaacaagcaatctgggctatagcagaagagcactaatcaacttaagtccaccttccatggtggttcagaaaccagactaccttaacgattttacccacgaaatcccaaatatccagactgactcctatgaaagtatggcaaaaaccacaccaactggtggccttccaagggacccccaagaactcatggttgataaccctttgaatcagctctcgactctagcagggcagttgtccagtctgccacccgaaaaccaaaaccctgcatcccctgatgtagttccctgccctgatgaaaagcctttcatgattcagcagccctctacccaagcagtagtttctgccgtatcagcaagtattcctcagagctcctctcccacaagcccagaacctcggccatcccatagtcaaaggaactatagtccagtggcaggtccaagcagtgagccaagtgcccacacgagcactcccagcataggaaacagccagccaagcaccccagccccagccctgccggtccaggaccctcagcttctgcaccactgccagcactgtgatatgtactttgcagacaacatcctttacactattcatatgggatgtcatgggtatgaaaatccttttcagtgtaatatatgtggatgcaaatgtaaaaacaagtatgattttgcctgtcattttgcaagagggcaacataaccaacattgattgaaaatagtcatattttacttagttttgctgtttttgtggtttggttttttttgttttttgttttggtcatccctaataaagtgtctgctaattc

SEQ ID NO: 282222 - DNA, 1795 bp, Homo sapiens
agcggagtcggagacacaacaaagatggcggcggtgactgtgacggtgacgaagacggcggcggcggcgacggcatttaacaaggcggtgtggtttactccatgcagttgtcaggagttttgttttctaggtctaacaaactgtaaatgttaaaaaagcaaagatgggtgaaaaaaaaccagagcctttggacttcgtgaaagattttcaggaatacctgactcagcagacccatcacgtgaacatgatttctggatcagttagtggggacaaagaagcagaggctcttcagggagctggaacagatggtgatcaaaatggacttgatcacccatctgttgaagtttccttggatgaaaactcaggaatgttagtagacgggtttgaaaggacctttgatgggaagcttaagtgtcggtactgcaactatgccagcaaaggaacagcccggcttattgaacacatcagaatccacacaggtgaaaaacctcatcgatgtcatctttgtccatttgcatctgcttatgagcgtcatctggaagcccatatgcgttctcatactggagaaaaaccatacaaatgtgaattatgttccttccgctgcagtgatcgaagtaacttgtcccatcatcgaaggcgcaagcataaaatggtaccaattaaaggtactaggtcttccttaagcagcaagaaaatgtggggggttttacagaagaaaacaagcaatctgggctatagcagaagagcactaatcaacttaagtccaccttccatggtggttcagaaaccagactaccttaacgattttacccacgaaatcccaaatatccagactgactcctatgaaagtatggcaaaaaccacaccaactggtggccttccaagggacccccaagaactcatggttgataaccctttgaatcagctctcgactctagcagggcagttgtccagtctgccacccgaaaaccaaaaccctgcatcccctgatgtagttccctgccctgatgaaaagcctttcatgattcagcagccctctacccaagcagtagtttctgccgtatcagcaagtattcctcagagctcctctcccacaagcccagaacctcggccatcccatagtcaaaggaactatagtccagtggcaggtccaagcagtgagccaagtgcccacacgagcactcccagcataggaaacagccagccaagcaccccagccccagccctgccggtccaggaccctcagcttctgcaccactgccagcactgtgatatgtactttgcagacaacatcctttacactattcatatgggatgtcatgggtatgaaaatccttttcagtgtaatatatgtggatgcaaatgtaaaaacaagtatgattttgcctgtcattttgcaagagggcaacataaccaacattgattgaaaatagtcatattttacttagttttgctgtttttgtggtttggttttttttgttttttgttttggtcatccctaataaagtgtctgctaattcaaggcttatacattatatttatagaatataaatttgtcagtggaataaaatttcccctttttttcataaaaatctggtcagggtcatttatatattagaacagttagacacattggtgtctcttttttcctttcctttcgacattggagaattggagtgcagtcataatcttacaagatgttcatttgaatttctcacatttatggtccataaaaacttcaaggcttatccatacttttgatgtttcaatatgcattgaactggatgttatttct

SEQ ID NO: 282223 - DNA, 353 bp, Homo sapiens
tttttctgcctttgaaatttcttcccatcctctgtgactaagtttgaatccgtatttatatttaattattaaatatattgattttttaccattttgtgtatgtctttagttcaccagtaagattataagatgctgaaaggcaggcactgtgttttctcttgctttatatagtgtcttgcacaaaatagcttttgtcatttgtttgctatgtactagatctccctaaatagtgtaaaattgtttcagttttgttttctaggtctaacaaactgtaaatgttaaaaaagcaaagatgggtgaaaaaaaaccagagcctttggacttcgtgaaagattttcaggaatacctgactc

SEQ ID NO: 282224 - DNA, 1946 bp, Homo sapiens
agcggagtcggagacacaacaaagatggcggcggtgactgtgacggtgacgaagacggcggcggcggcgacggcatttaacaaggcggtgtggtttactccatgcagttgtcaggagacctctgtatggcttttcaattttagttgaaattctctctccatggccttttggagtcccttgctgtatctccgaagtaaatttcaattactctacatttcatcaatgttggagtggcaagaaaaaggaggaacagatttggggtgaaaagttttgttttctaggtctaacaaactgtaaatgttaaaaaagcaaagatgggtgaaaaaaaaccagagcctttggacttcgtgaaagattttcaggaatacctgactcagcagacccatcacgtgaacatgatttctggatcagttagtggggacaaagaagcagaggctcttcagggagctggaacagatggtgatcaaaatggacttgatcacccatctgttgaagtttccttggatgaaaactcaggaatgttagtagacgggtttgaaaggacctttgatgggaagcttaagtgtcggtactgcaactatgccagcaaaggaacagcccggcttattgaacacatcagaatccacacaggtgaaaaacctcatcgatgtcatctttgtccatttgcatctgcttatgagcgtcatctggaagcccatatgcgttctcatactggagaaaaaccatacaaatgtgaattatgttccttccgctgcagtgatcgaagtaacttgtcccatcatcgaaggcgcaagcataaaatggtaccaattaaaggtactaggtcttccttaagcagcaagaaaatgtggggggttttacagaagaaaacaagcaatctgggctatagcagaagagcactaatcaacttaagtccaccttccatggtggttcagaaaccagactaccttaacgattttacccacgaaatcccaaatatccagactgactcctatgaaagtatggcaaaaaccacaccaactggtggccttccaagggacccccaagaactcatggttgataaccctttgaatcagctctcgactctagcagggcagttgtccagtctgccacccgaaaaccaaaaccctgcatcccctgatgtagttccctgccctgatgaaaagcctttcatgattcagcagccctctacccaagcagtagtttctgccgtatcagcaagtattcctcagagctcctctcccacaagcccagaacctcggccatcccatagtcaaaggaactatagtccagtggcaggtccaagcagtgagccaagtgcccacacgagcactcccagcataggaaacagccagccaagcaccccagccccagccctgccggtccaggaccctcagcttctgcaccactgccagcactgtgatatgtactttgcagacaacatcctttacactattcatatgggatgtcatgggtatgaaaatccttttcagtgtaatatatgtggatgcaaatgtaaaaacaagtatgattttgcctgtcattttgcaagagggcaacataaccaacattgattgaaaatagtcatattttacttagttttgctgtttttgtggtttggttttttttgttttttgttttggtcatccctaataaagtgtctgctaattcaaggcttatacattatatttatagaatataaatttgtcagtggaataaaatttcccctttttttcataaaaatctggtcagggtcatttatatattagaacagttagacacattggtgtctcttttttcctttcctttcgacattggagaattggagtgcagtcataatcttacaagatgttcatttgaatttctcacatttatggtccataaaaacttcaaggcttatccatacttttgatgtttcaatatgcattgaactggatgttatttct

SEQ ID NO: 282225 - DNA, 1962 bp, Homo sapiens
  misc_feature (1960)..(1962): n is a, c, g, or t
atgaccctctccggcggcggcagcgccagcgacatgtccggccagacggtgctgacggccgaggacgtggacatcgatgtggtgggcgagggcgacgacgggctggaagagaaggacagcgacgcaggttgcgatagccccgcggggccgccggagctgcgcctggacgaggcggacgaggtgcccccggcggcaccccatcacggacagcctcagccgccccaccagcagcccctgacattgcccaaggaggcggccggagccggggccggaccggggggcgacgtgggcgcgccggaggcggacggctgcaagggcggtgttggcggcgaggagggcggcgcgagcggcggcgggcctggcgcgggcagcggttcggcgggaggcctggccccgagcaagcccaagaacagcctagtgaagccgccttactcgtacatcgcgctcatcaccatggccatcctgcagagcccgcagaagaagctgaccctgagcggcatctgcgagttcatcagcaaccgcttcccctactacagggagaagttccccgcctggcagaacagcatccgccacaacctctcactcaacgactgcttcgtcaagatcccccgcgagccgggcaacccgggcaagggcaactactggaccctggacccgcagtccgaggacatgttcgacaacggcagcttcctgcggcgccggaaacgcttcaagcgccaccagcaggagcacctgcgcgagcagacggcgctcatgatgcagagcttcggcgcttacagcctggcggcggcggccggcgccgcgggaccctacggccgcccctacggcctgcaccctgcggcggcggccggtgcctattcgcacccggcagcggcggcggccgcggctgctgcggcggcgctccagtacccgtacgcgctgccgccggtggcaccggtgctgcctcccgctgtgccgctgctgccctcgggcgagctgggccgcaaagcggccgccttcggctcacagctcggcccgggcctgcagctgcagctcaatagcctgggcgccgccgcggccgctgcgggcacagcgggcgccgcgggcaccaccgcgtcgctcatcaagtccgagccaagcgcgcggccgtcgttcagcatcgagaacatcataggtgggggccccgcggctcctgggggctcggcggtgggcgctggggtcgccggcggcactgggggttcagggggcggcagcacggcgcagtcgtttctgcggccacccgggaccgtgcagtcggcagcgctcatggccacccgctcaagccaaatggccggcgcaatagggacgcgccaatggccgggacccagggtccggcggcggcctcgagcaacaaatgcacctccaggctgcgcgccctgtcccaagcccggtcccggtcccgctgcccaatcctggactctgcctctccccaatttcctttcccctgagcccccaacgcctaccttccgcggcctccatcccctcgcgcacacctaagctggtcgagcaaactcaccgcgcgcccgccggggatagctttccatacaggtaaaaccgaaaaccgaattttccaaaaatgcaccccgacggcgcctgctcttagtaccgtggggatgggagggaaattctttgtatatatttgtaaaaaaattattgactttccttttggggtttttatttttttaagaaaaaacaaattccgtagatttagagctctgaactttcattttttttgaaggttcactctccgaagttttatctgagaaaagaatgtatagagacgttgggagattttaaatataaaaaattttcaaaaaggcaaaaagtgtcattctattataaaagtctgtttatatatgaatgaatatatatggtattctaaatgttattccatcgtgttgtacacaactttgtaaataaatttttaaaatgcccaaaaaannn

SEQ ID NO: 282226 - DNA, 1165 bp, Homo sapiens
  misc_feature (1163)..(1165): n is a, c, g, or t
tttattgaattatttttggtgtgtctaggccaaggaaagaggagatcgtgggtggggaaacagactgagggaatcagaagcaccactgtccatccggaattaaatccacatcccagcatcttctgcaaatatttcactaattatttcctctcggaactcctcccctcgtgctccttcctctggtgaggccggcgctcccctcccaggccgcagcggacagacagggattgggttccgtgtgcctgccacaccaggcaggctcttgcggctcccaactaggcggccttgcactccgcgtgcattggccacacatcctcgcctcctccacccgctccgccgccggttttcttggaagttaaatcttggaggatttgtccacacaccaaccgctgtcgctgagccggacgactgccaccatcgcgcccattcttagcgtgccactctccggacagtttctgcagcccgcagcctcggccgccgccgctgctgcggccgccgctcaagccaaatggccggcgcaatagggacgcgccaatggccgggacccagggtccggcggcggcctcgagcaacaaatgcacctccaggctgcgcgccctgtcccaagcccggtcccggtcccgctgcccaatcctggactctgcctctccccaatttcctttcccctgagcccccaacgcctaccttccgcggcctccatcccctcgcgcacacctaagctggtcgagcaaactcaccgcgcgcccgccggggatagctttccatacaggtaaaaccgaaaaccgaattttccaaaaatgcaccccgacggcgcctgctcttagtaccgtggggatgggagggaaattctttgtatatatttgtaaaaaaattattgactttccttttggggtttttatttttttaagaaaaaacaaattccgtagatttagagctctgaactttcattttttttgaaggttcactctccgaagttttatctgagaaaagaatgtatagagacgttgggagattttaaatataaaaaattttcaaaaaggcaaaaagtgtcattctattataaaagtctgtttatatatgaatgaatatatatggtattctaaatgttattccatcgtgttgtacacaactttgtaaataaatttttaaaatgcccaaaaaannn

SEQ ID NO: 282227 - DNA, 2077 bp, Homo sapiens
  misc_feature (2075)..(2077): n is a, c, g, or t
atgaccctctccggcggcggcagcgccagcgacatgtccggccagacggtgctgacggccgaggacgtggacatcgatgtggtgggcgagggcgacgacgggctggaagagaaggacagcgacgcaggttgcgatagccccgcggggccgccggagctgcgcctggacgaggcggacgaggtgcccccggcggcaccccatcacggacagcctcagccgccccaccagcagcccctgacattgcccaaggaggcggccggagccggggccggaccggggggcgacgtgggcgcgccggaggcggacggctgcaagggcggtgttggcggcgaggagggcggcgcgagcggcggcgggcctggcgcgggcagcggttcggcgggaggcctggccccgagcaagcccaagaacagcctagtgaagccgccttactcgtacatcgcgctcatcaccatggccatcctgcagagcccgcagaagaagctgaccctgagcggcatctgcgagttcatcagcaaccgcttcccctactacagggagaagttccccgcctggcagaacagcatccgccacaacctctcactcaacgactgcttcgtcaagatcccccgcgagccgggcaacccgggcaagggcaactactggaccctggacccgcagtccgaggacatgttcgacaacggcagcttcctgcggcgccggaaacgcttcaagcgccaccagcaggagcacctgcgcgagcagacggcgctcatgatgcagagcttcggcgcttacagcctggcggcggcggccggcgccgcgggaccctacggccgcccctacggcctgcaccctgcggcggcggccggtgcctattcgcacccggcagcggcggcggccgcggctgctgcggcggcgctccagtacccgtacgcgctgccgccggtggcaccggtgctgcctcccgctgtgccgctgctgccctcgggcgagctgggccgcaaagcggccgccttcggctcacagctcggcccgggcctgcagctgcagctcaatagcctgggcgccgccgcggccgctgcgggcacagcgggcgccgcgggcaccaccgcgtcgctcatcaagtccgagccaagcgcgcggccgtcgttcagcatcgagaacatcataggtgggggccccgcggctcctgggggctcggcggtgggcgctggggtcgccggcggcactgggggttcagggggcggcagcacggcgcagtcgtttctgcggccacccgggaccgtgcagtcggcagcgctcatggccaccaccaaccgctgtcgctgagccggacgactgccaccatcgcgcccattcttagcgtgccactctccggacagtttctgcagcccgcagcctcggccgccgccgctgctgcggccgccgctcaagccaaatggccggcgcaatagggacgcgccaatggccgggacccagggtccggcggcggcctcgagcaacaaatgcacctccaggctgcgcgccctgtcccaagcccggtcccggtcccgctgcccaatcctggactctgcctctccccaatttcctttcccctgagcccccaacgcctaccttccgcggcctccatcccctcgcgcacacctaagctggtcgagcaaactcaccgcgcgcccgccggggatagctttccatacaggtaaaaccgaaaaccgaattttccaaaaatgcaccccgacggcgcctgctcttagtaccgtggggatgggagggaaattctttgtatatatttgtaaaaaaattattgactttccttttggggtttttatttttttaagaaaaaacaaattccgtagatttagagctctgaactttcattttttttgaaggttcactctccgaagttttatctgagaaaagaatgtatagagacgttgggagattttaaatataaaaaattttcaaaaaggcaaaaagtgtcattctattataaaagtctgtttatatatgaatgaatatatatggtattctaaatgttattccatcgtgttgtacacaactttgtaaataaatttttaaaatgcccaaaaaannn

SEQ ID NO: 282228 - DNA, 534 bp, Homo sapiens
  misc_feature (296)..(296): n is a, c, g, or t
  misc_feature (391)..(391): n is a, c, g, or t
actctatgcatatggaagtttttgtgttataaataaggatataaatgccttagttaaattattattgaaatgagcatgttgaaatccagctttttaattgaaatcattagtatgttaatgtaagtgtttggacctgtctttaggggcactaagacctggaaatggccctgaaattttattgggtcagggacctcctcagcagccgccacagcagcatagagtactccagcaactacagcagggagattggagattacagcaactccatttacagcatcgtcatcctcaccaggtanccggctgctgctgctgctgctgctaaagttccagcaaaaaaagatcaccgccgcgagtaaaaatgctccagcccagaaggttcctgcccagaaanccacaggccagaaagcagcgcctgctccaaaagctcagaagggtcaaaaagctccagcccagaaagcacctgctccaaaggcatctggcaagaaagcataagtggcaatcataaaaagtaataaaggttctttttgacctgtt

SEQ ID NO: 282229 - DNA, 4872 bp, Homo sapiens
agccgggcagctgcagcggagccgcggagcgggcggcggggcccaggctgtgcgcttggggagcgcggaatgtgaggcttggcgggccgcagcacgctcggacgggccaggggcggcgacccctcgcggacgcccggctgcgcgccgggccggggacttgcccttgcacgctccctgcgccctccagctcgccggcgggaccatgaagaagttctctcggatgcccaagtcggagggcggcagcggcggcggagcggcgggtggcggggctggcggggccggggccggggccggctgcggctccggcggctcgtccgtgggggtccgggtgttcgcggtcggccgccaccaggtcaccctggaagagtcgctggccgaaggtggattctccacagttttcctcgtgcgtactcacggtggaatccgatgtgcattgaagcgaatgtatgtcaataacatgccagacctcaatgtttgtaaaagggaaattacaattatgaaagagctatctggtcacaaaaatattgtgggctatttggactgtgctgttaattcaattagtgataatgtatgggaagtccttatcttaatggaatattgtcgagctggacaggtagtgaatcaaatgaataagaagctacagacgggttttacagaaccagaagtgttacagatattctgtgatacctgtgaagctgttgcaaggttgcatcagtgtaagactccaataattcaccgggatctgaaggtagaaaatattttgttgaatgatggtgggaactatgtactttgtgactttggcagtgccactaataaatttcttaatcctcaaaaagatggagttaatgtagtagaagaagaaattaaaaagtatacaactctgtcatacagagcccctgaaatgatcaacctttatggagggaaacccatcaccaccaaggctgatatctgggcactgggatgtctactctataaactttgtttcttcactcttccttttggtgagagtcaggttgctatctgtgatggcaacttcaccatcccagacaattctcgttactcccgtaacatacattgcttaataaggttcatgcttgaaccagatccggaacatagacctgatatatttcaagtgtcatattttgcatttaaatttgccaaaaaggattgtccagtctccaacatcaataattcttctattccttcagctcttcctgaaccgatgactgctagtgaagcagctgctaggaaaagccaaataaaagccagaataacagataccattggaccaacagaaacctcaattgcaccaagacaaagaccaaaggccaactctgctactactgccactcccagtgtgctgaccattcaaagttcagcaacacctgttaaagtccttgctcctggtgaattcggtaaccatagaccaaaaggggcactaagacctggaaatggccctgaaattttattgggtcagggacctcctcagcagccgccacagcagcatagagtactccagcaactacagcagggagattggagattacagcaactccatttacagcatcgtcatcctcaccagcagcagcagcagcagcagcagcaacagcaacagcagcagcagcaacagcaacagcagcagcagcagcagcagcagcagcaccaccaccaccaccaccaccacctacttcaagatgcttatatgcagcagtatcaacatgcaacacagcagcaacagatgcttcaacaacaatttttaatgcattcggtatatcaaccacaaccttctgcatcacagtatcctacaatgatgccgcagtatcagcaggctttctttcaacagcagatgctagctcaacatcagccgtctcaacaacaggcatcacctgaatatcttacctcccctcaagagttctcaccagccttagtttcctacacttcatcacttccagctcaggttggaaccataatggactcctcctatagtgccaataggtcagttgctgataaagaggccattgcaaatttcacaaatcagaagaacatcagcaatccacctgatatgtcagggtggaatccttttggagaggataatttctctaagttaacagaagaggaactattggacagagaatttgaccttctaagatcaaataggctcgaggagagagcatcctcagataagaatgtagactcactttctgctccacataaccatcctccagaagatccttttggttctgttcctttcatttctcattcaggttctcctgaaaagaaagctgaacattcatctataaatcaagaaaatggcactgcaaaccctatcaagaacggtaaaacaagtccagcatctaaagatcagcggactggaaagaaaacctcagtacagggtcaagtgcaaaaggggaatgatgaatctgaaagtgattttgaatcagatcccccttctcctaagagcagtgaagaggaagagcaagatgatgaagaagttcttcagggggaacaaggagattttaatgatgatgatactgaaccagaaaatctgggtcataggcctctcctcatggattctgaagatgaggaagaagaggagaaacatagctctgattctgattatgagcaggctaaagcaaagtacagtgacatgagctctgtctacagagacagatctggcagtggaccaacccaagatcttaatacaatactcctcacctcagcccaattatcctctgatgttgcagtggagactcccaaacaggagtttgatgtatttggcgctgtccccttctttgcagtgcgtgctcaacagccccagcaagaaaagaatgaaaagaacctccctcaacacaggtttcctgctgcaggactggagcaggaggaatttgatgtattcacaaaggcgccttttagcaagaaggtgaatgtacaagaatgccatgcagtggggcctgaggcacatactatccctggttatcccaaaagtgtagatgtatttggctccactccatttcagcccttcctcacatcaacaagtaaaagtgaaagcaatgaggacctttttgggcttgtgccctttgatgaaataacggggagccagcagcaaaaagtcaaacagcgcagcttacagaaactgtcctctcgccaaaggcgcacaaagcaggatatgtccaaaagtaatgggaagcggcatcatggcacgccaactagcacaaagaagactttgaagcctacctatcgcactccagagagggctcgcaggcacaaaaaagtgggccgccgagactctcaaagtagcaatgaatttttaaccatctcagactccaaggagaacattagtgttgcactgactgatgggaaagatagggggaatgtcttacaacctgaggagagcctgttggaccccttcggtgccaagcccttccattctccagacctgtcatggcaccctccacatcagggcctgagcgacatccgtgctgatcacaatactgtcctgccagggcggccaagacaaaattcactacatgggtcattccatagtgcagatgtattgaaaatggatgattttggtgccgtgccctttacagaacttgtggtgcaaagcatcactccacatcagtcccaacagtcccaaccagtcgaattagacccatttggtgctgctccatttccttctaaacagtagatacttctgatggattctcggcattaactcctgtttcaaaaaagtgtgaacagttttatgaatttgaaagaaaatttggtagctctttatagcattcattcttaaagatcagtcagaataggtgatttctaaataaaccaaatagaagaatgaagtatctctacagggtagtaacttgattcctcttcaggagaaaagggagctaaattgcaagctctaactaagggtttctgctactgacatcacaacacagaaatgcaagtgtggtacttccagtgaaagcacatggcacctttctaggtgtgtagccactgagaagggacagtgaaactgttatttttgatatcagaatgtcatttttatgtgcatatccctaaaattagggttatttctacatacactagttacacttgtgaattttttttaaggtctcttttaatttccagacagttaaaaacaatctagttatcttaaagcattagaaagttattatctggagagtgcagagatttcagtccatacacctttctccacaaagcagagccagaagtaactgactattgtgcctaaaactctgtttcatttttaaaaacaagtgccattaaaatggaatatctaatgataagcatatgaaataatgtgtaattagctcaatttaactattccacaacttacatattccaaaacaatgttatacatgataaatatatataatttttgtcagttaaaacaaattaaaaaaatggactatcgtcgcacagaagcctagaacaaaaatatgaagagaaatatctgacatttgtaaagaaattataagaagaaaaaaagatacagaacagaaaacattcactactttagaaacactttatgcatggcttcttgccccaaacttttattgtgatggccctaataaagcagattattggaaaaattggaggacaagggttgtataaaaattttattttatgaagaaaatatgtagcggaaactgaattttcaagacatttacaatgtgaaatcatgttgcatttaacaatgtactttattagcaacttcaccaaatattccccaagtcataagcaacaattatttttattaggttttggggggtggagtagttttaataaagtgcacagaatggtgacacccacaaagccttatataaaggcaggattcatgcatcc

SEQ ID NO: 282230 - DNA, 3582 bp, Homo sapiens
actctatgcatatggaagtttttgtgttataaataaggatataaatgccttagttaaattattattgaaatgagcatgttgaaatccagctttttaattgaaatcattagtatgttaatgtaagtgtttggacctgtctttaggggcactaagacctggaaatggccctgaaattttattgggtcagggacctcctcagcagccgccacagcagcatagagtactccagcaactacagcagggagattggagattacagcaactccatttacagcatcgtcatcctcaccagcagcagcagcagcagcagcagcaacagcaacagcagcagcagcaacagcaacagcagcagcagcagcagcagcagcagcaccaccaccaccaccaccaccacctacttcaagatgcttatatgcagcagtatcaacatgcaacacagcagcaacagatgcttcaacaacaatttttaatgcattcggtatatcaaccacaaccttctgcatcacagtatcctacaatgatgccgcagtatcagcaggctttctttcaacagcagatgctagctcaacatcagccgtctcaacaacaggcatcacctgaatatcttacctcccctcaagagttctcaccagccttagtttcctacacttcatcacttccagctcaggttggaaccataatggactcctcctatagtgccaataggtcagttgctgataaagaggccattgcaaatttcacaaatcagaagaacatcagcaatccacctgatatgtcagggtggaatccttttggagaggataatttctctaagttaacagaagaggaactattggacagagaatttgaccttctaagatcaaataggctcgaggagagagcatcctcagataagaatgtagactcactttctgctccacataaccatcctccagaagatccttttggttctgttcctttcatttctcattcaggttctcctgaaaagaaagctgaacattcatctataaatcaagaaaatggcactgcaaaccctatcaagaacggtaaaacaagtccagcatctaaagatcagcggactggaaagaaaacctcagtacagggtcaagtgcaaaaggggaatgatgaatctgaaagtgattttgaatcagatcccccttctcctaagagcagtgaagaggaagagcaagatgatgaagaagttcttcagggggaacaaggagattttaatgatgatgatactgaaccagaaaatctgggtcataggcctctcctcatggattctgaagatgaggaagaagaggagaaacatagctctgattctgattatgagcaggctaaagcaaagtacagtgacatgagctctgtctacagagacagatctggcagtggaccaacccaagatcttaatacaatactcctcacctcagcccaattatcctctgatgttgcagtggagactcccaaacaggagtttgatgtatttggcgctgtccccttctttgcagtgcgtgctcaacagccccagcaagaaaagaatgaaaagaacctccctcaacacaggtttcctgctgcaggactggagcaggaggaatttgatgtattcacaaaggcgccttttagcaagaaggtgaatgtacaagaatgccatgcagtggggcctgaggcacatactatccctggttatcccaaaagtgtagatgtatttggctccactccatttcagcccttcctcacatcaacaagtaaaagtgaaagcaatgaggacctttttgggcttgtgccctttgatgaaataacggggagccagcagcaaaaagtcaaacagcgcagcttacagaaactgtcctctcgccaaaggcgcacaaagcaggatatgtccaaaagtaatgggaagcggcatcatggcacgccaactagcacaaagaagactttgaagcctacctatcgcactccagagagggctcgcaggcacaaaaaagtgggccgccgagactctcaaagtagcaatgaatttttaaccatctcagactccaaggagaacattagtgttgcactgactgatgggaaagatagggggaatgtcttacaacctgaggagagcctgttggaccccttcggtgccaagcccttccattctccagacctgtcatggcaccctccacatcagggcctgagcgacatccgtgctgatcacaatactgtcctgccagggcggccaagacaaaattcactacatgggtcattccatagtgcagatgtattgaaaatggatgattttggtgccgtgccctttacagaacttgtggtgcaaagcatcactccacatcagtcccaacagtcccaaccagtcgaattagacccatttggtgctgctccatttccttctaaacagtagatacttctgatggattctcggcattaactcctgtttcaaaaaagtgtgaacagttttatgaatttgaaagaaaatttggtagctctttatagcattcattcttaaagatcagtcagaataggtgatttctaaataaaccaaatagaagaatgaagtatctctacagggtagtaacttgattcctcttcaggagaaaagggagctaaattgcaagctctaactaagggtttctgctactgacatcacaacacagaaatgcaagtgtggtacttccagtgaaagcacatggcacctttctaggtgtgtagccactgagaagggacagtgaaactgttatttttgatatcagaatgtcatttttatgtgcatatccctaaaattagggttatttctacatacactagttacacttgtgaattttttttaaggtctcttttaatttccagacagttaaaaacaatctagttatcttaaagcattagaaagttattatctggagagtgcagagatttcagtccatacacctttctccacaaagcagagccagaagtaactgactattgtgcctaaaactctgtttcatttttaaaaacaagtgccattaaaatggaatatctaatgataagcatatgaaataatgtgtaattagctcaatttaactattccacaacttacatattccaaaacaatgttatacatgataaatatatataatttttgtcagttaaaacaaattaaaaaaatggactatcgtcgcacagaagcctagaacaaaaatatgaagagaaatatctgacatttgtaaagaaattataagaagaaaaaaagatacagaacagaaaacattcactactttagaaacactttatgcatggcttcttgccccaaacttttattgtgatggccctaataaagcagattattggaaaaattggaggacaagggttgtataaaaattttattttatgaagaaaatatgtagcggaaactgaattttcaagacatttacaatgtgaaatcatgttgcatttaacaatgtactttattagcaacttcaccaaatattccccaagtcataagcaacaattatttttattaggttttggggggtggagtagttttaataaagtgcacagaatggtgacacccacaaagccttatataaaggcaggattcatgcatcc

SEQ ID NO: 282231 - DNA, 3349 bp, Homo sapiens
tttaacagcaaccactatattagtgactttaagctactctttttcttaaaatacttaaaagaggatttttgattctggccaagtgagcctacctttacaactttttaaaaagatttatttcatcttgctgtagttttctagtaatagagctgcttctgtagatgattgttttttacgtttctgattttgtcaccaatgtgaaaggaaggaacatagtaaatagatgcagtgctgacagtgctttaggactggagcattgttttgtataatatcatttcttttttcagatgccgcagtatcagcaggctttctttcaacagcagatgctagctcaacatcagccgtctcaacaacaggcatcacctgaatatcttacctcccctcaagagttctcaccagccttagtttcctacacttcatcacttccagctcaggttggaaccataatggactcctcctatagtgccaataggtcagttgctgataaagaggccattgcaaatttcacaaatcagaagaacatcagcaatccacctgatatgtcagggtggaatccttttggagaggataatttctctaagttaacagaagaggaactattggacagagaatttgaccttctaagatcaaataggctcgaggagagagcatcctcagataagaatgtagactcactttctgctccacataaccatcctccagaagatccttttggttctgttcctttcatttctcattcaggttctcctgaaaagaaagctgaacattcatctataaatcaagaaaatggcactgcaaaccctatcaagaacggtaaaacaagtccagcatctaaagatcagcggactggaaagaaaacctcagtacagggtcaagtgcaaaaggggaatgatgaatctgaaagtgattttgaatcagatcccccttctcctaagagcagtgaagaggaagagcaagatgatgaagaagttcttcagggggaacaaggagattttaatgatgatgatactgaaccagaaaatctgggtcataggcctctcctcatggattctgaagatgaggaagaagaggagaaacatagctctgattctgattatgagcaggctaaagcaaagtacagtgacatgagctctgtctacagagacagatctggcagtggaccaacccaagatcttaatacaatactcctcacctcagcccaattatcctctgatgttgcagtggagactcccaaacaggagtttgatgtatttggcgctgtccccttctttgcagtgcgtgctcaacagccccagcaagaaaagaatgaaaagaacctccctcaacacaggtttcctgctgcaggactggagcaggaggaatttgatgtattcacaaaggcgccttttagcaagaaggtgaatgtacaagaatgccatgcagtggggcctgaggcacatactatccctggttatcccaaaagtgtagatgtatttggctccactccatttcagcccttcctcacatcaacaagtaaaagtgaaagcaatgaggacctttttgggcttgtgccctttgatgaaataacggggagccagcagcaaaaagtcaaacagcgcagcttacagaaactgtcctctcgccaaaggcgcacaaagcaggatatgtccaaaagtaatgggaagcggcatcatggcacgccaactagcacaaagaagactttgaagcctacctatcgcactccagagagggctcgcaggcacaaaaaagtgggccgccgagactctcaaagtagcaatgaatttttaaccatctcagactccaaggagaacattagtgttgcactgactgatgggaaagatagggggaatgtcttacaacctgaggagagcctgttggaccccttcggtgccaagcccttccattctccagacctgtcatggcaccctccacatcagggcctgagcgacatccgtgctgatcacaatactgtcctgccagggcggccaagacaaaattcactacatgggtcattccatagtgcagatgtattgaaaatggatgattttggtgccgtgccctttacagaacttgtggtgcaaagcatcactccacatcagtcccaacagtcccaaccagtcgaattagacccatttggtgctgctccatttccttctaaacagtagatacttctgatggattctcggcattaactcctgtttcaaaaaagtgtgaacagttttatgaatttgaaagaaaatttggtagctctttatagcattcattcttaaagatcagtcagaataggtgatttctaaataaaccaaatagaagaatgaagtatctctacagggtagtaacttgattcctcttcaggagaaaagggagctaaattgcaagctctaactaagggtttctgctactgacatcacaacacagaaatgcaagtgtggtacttccagtgaaagcacatggcacctttctaggtgtgtagccactgagaagggacagtgaaactgttatttttgatatcagaatgtcatttttatgtgcatatccctaaaattagggttatttctacatacactagttacacttgtgaattttttttaaggtctcttttaatttccagacagttaaaaacaatctagttatcttaaagcattagaaagttattatctggagagtgcagagatttcagtccatacacctttctccacaaagcagagccagaagtaactgactattgtgcctaaaactctgtttcatttttaaaaacaagtgccattaaaatggaatatctaatgataagcatatgaaataatgtgtaattagctcaatttaactattccacaacttacatattccaaaacaatgttatacatgataaatatatataatttttgtcagttaaaacaaattaaaaaaatggactatcgtcgcacagaagcctagaacaaaaatatgaagagaaatatctgacatttgtaaagaaattataagaagaaaaaaagatacagaacagaaaacattcactactttagaaacactttatgcatggcttcttgccccaaacttttattgtgatggccctaataaagcagattattggaaaaattggaggacaagggttgtataaaaattttattttatgaagaaaatatgtagcggaaactgaattttcaagacatttacaatgtgaaatcatgttgcatttaacaatgtactttattagcaacttcaccaaatattccccaagtcataagcaacaattatttttattaggttttggggggtggagtagttttaataaagtgcacagaatggtgacacccacaaagccttatataaaggcaggattcatgcatcc

SEQ ID NO: 282232 - DNA, 3485 bp, Homo sapiens
  misc_feature (2786)..(2786): n is a, c, g, or t
agccgggcagctgcagcggagccgcggagcgggcggcggggcccaggctgtgcgcttggggagcgcggaatgtgaggcttggcgggccgcagcacgctcggacgggccaggggcggcgacccctcgcggacgcccggctgcgcgccgggccggggacttgcccttgcacgctccctgcgccctccagctcgccggcgggaccatgaagaagttctctcggatgcccaagtcggagggcggcagcggcggcggagcggcgggtggcggggctggcggggccggggccggggccggctgcggctccggcggctcgtccgtgggggtccgggtgttcgcggtcggccgccaccaggtcaccctggaagagtcgctggccgaaggtggattctccacagttttcctcgtgcgtactcacggtggaatccgatgtgcattgaagcgaatgtatgtcaataacatgccagacctcaatgtttgtaaaagggaaattacaattatgaaagagctatctggtcacaaaaatattgtgggctatttggactgtgctgttaattcaattagtgataatgtatgggaagtccttatcttaatggaatattgtcgagctggacaggtagtgaatcaaatgaataagaagctacagacgggttttacagaaccagaagtgttacagatattctgtgatacctgtgaagctgttgcaaggttgcatcagtgtaagactccaataattcaccgggatctgaaggtagaaaatattttgttgaatgatggtgggaactatgtactttgtgactttggcagtgccactaataaatttcttaatcctcaaaaagatggagttaatgtagtagaagaagaaattaaaaagtatacaactctgtcatacagagcccctgaaatgatcaacctttatggagggaaacccatcaccaccaaggctgatatctgggcactgggatgtctactctataaactttgtttcttcactcttccttttggtgagagtcaggttgctatctgtgatggcaacttcaccatcccagacaattctcgttactcccgtaacatacattgcttaataaggttcatgcttgaaccagatccggaacatagacctgatatatttcaagtgtcatattttgcatttaaatttgccaaaaaggattgtccagtctccaacatcaataattcttctattccttcagctcttcctgaaccgatgactgctagtgaagcagctgctaggaaaagccaaataaaagccagaataacagataccattggaccaacagaaacctcaattgcaccaagacaaagaccaaaggccaactctgctactactgccactcccagtgtgctgaccattcaaagttcagcaacacctgttaaagtccttgctcctggtgaattcggtaaccatagaccaaaaggggcactaagacctggaaatggccctgaaattttattgggtcagggacctcctcagcagccgccacagcagcatagagtactccagcaactacagcagggagattggagattacagcaactccatttacagcatcgtcatcctcaccagcagcagcagcagcagcagcagcaacagcaacagcagcagcagcaacagcaacagcagcagcagcagcagcagcagcagcaccaccaccaccaccaccaccacctacttcaagatgcttatatgcagcagtatcaacatgcaacacagcagcaacagatgcttcaacaacaatttttaatgcattcggtatatcaaccacaaccttctgcatcacagtatcctacaatgatgccgcagtatcagcaggctttctttcaacagcagatgctagctcaacatcagccgtctcaacaacaggcatcacctgaatatcttacctcccctcaagagttctcaccagccttagtttcctacacttcatcacttccagctcaggttggaaccataatggactcctcctatagtgccaataggtcagttgctgataaagaggccattgcaaatttcacaaatcagaagaacatcagcaatccacctgatatgtcagggtggaatccttttggagaggataatttctctaagttaacagaagaggaactattggacagagaatttgaccttctaagatcaaataggctcgaggagagagcatcctcagataagaatgtagactcactttctgctccacataaccatcctccagaagatccttttggttctgttcctttcatttctcattcaggcaagttacatatgtaacaccatttgaaaactacagaattaacaacaaaagaaaaacttacaaatgtaaagccaaaagaagaattgagtgtttaggatttctgctgagtacattgaacagcttttcaacattcagacttgtttggttatctggaatatacaggatagttttttcattgctttcatactccatatttttctctttgacatttattaaaaacagttcctattcttgctgttttctgtttgctgctttcaagttttctttttcataaatgacataattaactggggaacatagcttactgtgtctgtttacttattctgcataaatgtgttcccttatacccccaataccctgggtaatggaattattactgtctaaaattataataactcaaaatagtcattgtaagttctcaagaacatagtattcaatgacttgagatactgatctctgtgtggtagaaggcagtttcagtactagctcttttacatcctctgttaggaattgcattatccntttcaggtttgcatggacctatacaactacttctctgatgtttaatagcatctgaaagaaccctggggaaatgaatagtagagttaggagaactgaagtaagcttcagtgattggtcttttctctggacacccttatttggaggttggcctaaagattttgtacttcgcaacatgttcacaggtttgagctcgattgctgctattttgtttaactgtttactatgggtatttatattagattttaagctaattgagggtgggaaatatgaattgtctatctttgaatcctgcccagtatacaacccagtaggtacctaatactgttcattgaatgtgcagaaaaaaatcatgactatctataaaaattcatattccttagatttaggacagtggccttaaaaaaaatgcccattaatgggccgggcgcggtggcttgcgcctgtaatcccagcactttgggaggccaaggcaggcggatcatgaggtcaggagatcaagaccatcctggctaacacggtgaaaccccatctctactaaaaatacaaaaaatcagccaggcgtggtggtgggtgcctgtaatcccagctactcgggaggctaaggcaggagaatggcgtgaacccgggaggcggagtttgcagtgagccgagatcgtgccagtgcactccaacctgggcgatagagtgagactctgtctc

SEQ ID NO: 282233 - DNA, 2695 bp, Homo sapiens
agccgggcagctgcagcggagccgcggagcgggcggcggggcccaggctgtgcgcttggggagcgcggaatgtgaggcttggcgggccgcagcacgctcggacgggccaggggcggcgacccctcgcggacgcccggctgcgcgccgggccggggacttgcccttgcacgctccctgcgccctccagctcgccggcgggaccatgaagaagttctctcggatgcccaagtcggagggcggcagcggcggcggagcggcgggtggcggggctggcggggccggggccggggccggctgcggctccggcggctcgtccgtgggggtccgggtgttcgcggtcggccgccaccaggtcaccctggaagagtcgctggccgaaggtggattctccacagttttcctcgtgcgtactcacggtggaatccgatgtgcattgaagcgaatgtatgtcaataacatgccagacctcaatgtttgtaaaagggaaattacaattatgaaagagctatctggtcacaaaaatattgtgggctatttggactgtgctgttaattcaattagtgataatgtatgggaagtccttatcttaatggaatattgtcgagctggacaggtagtgaatcaaatgaataagaagctacagacgggttttacagaaccagaagtgttacagatattctgtgatacctgtgaagctgttgcaaggttgcatcagtgtaagactccaataattcaccgggatctgaaggtagaaaatattttgttgaatgatggtgggaactatgtactttgtgactttggcagtgccactaataaatttcttaatcctcaaaaagatggagttaatgtagtagaagaagaaattaaaaagtatacaactctgtcatacagagcccctgaaatgatcaacctttatggagggaaacccatcaccaccaaggctgatatctgggcactgggatgtctactctataaactttgtttcttcactcttccttttggtgagagtcaggttgctatctgtgatggcaacttcaccatcccagacaattctcgttactcccgtaacatacattgcttaataaggttcatgcttgaaccagatccggaacatagacctgatatatttcaagtgtcatattttgcatttaaatttgccaaaaaggattgtccagtctccaacatcaataagtgttgtaaacaattactgagacacggagcactgttaactgaaattcttctattccttcagctcttcctgaaccgatgactgctagtgaagcagctgctaggaaaagccaaataaaagccagaataacagataccattggaccaacagaaacctcaattgcaccaagacaaagaccaaaggccaactctgctactactgccactcccagtgtgctgaccattcaaagttcagcaacacctgttaaagtccttgctcctggtgaattcggtaaccatagaccaaaaggggcactaagacctggaaatggccctgaaattttattgggtcagggacctcctcagcagccgccacagcagcatagagtactccagcaactacagcagggagattggagattacagcaactccatttacagcatcgtcatcctcaccagcagcagcagcagcagcagcagcagcaccaccaccaccaccaccaccacctacttcaagatgcttatatgcagcagtatcaacatgcaacacagcagcaacagatgcttcaacaacaatttttaatgcattcggtatatcaaccacaaccttctgcatcacagtatcctacaatgatgccgcagtatcagcaggctttctttcaacagcagatgctagctcaacatcagccgtctcaacaacaggcatcacctgaatatcttacctcccctcaagagttctcaccagccttagtttcctacacttcatcacttccagctcaggttggaaccataatggactcctcctatagtgccaataggtcagttgctgataaagaggccattgcaaatttcacaaatcagaagaacatcagcaatccacctgatatgtcagggtggaatccttttggagaggataatttctctaagttaacagaagaggaactattggacagagaatttgaccttctaagatcaagtaagggacacttgaaggcttattttgcttcacagtaaaataacagctctattattattcagcaaggccaaagacttttgagaatgtgtatggaaaattctttttgtgcatttgagggcaaaattcaggccatcttcttatacatatactatcaaattatgttgtgtgcattagaaatcagttgcttgatagtagctattaaacccaatattgctgatagtatgctaatatcctaaaacttaaatattgcatatctatgaatgttaaattcagaatatctctaaaacatggaaaattgatgtttcaataaaaagggagacattttattattttgccttactaatgattttgcagctctgtttttctgcacactcaatagaaaatattgtgggtctgagatgccctttgaaaatgcctgaaagaaaacatgggctactacattatgttaatgttttgtaatgtccttttaatgagtggtgacataaaagggctgctttgttgtcctgatatggcaaaaattaaataaattctttttcactttaaatcagatat

SEQ ID NO: 282234 - DNA, 3840 bp, Homo sapiens
agccgggcagctgcagcggagccgcggagcgggcggcggggcccaggctgtgcgcttggggagcgcggaatgtgaggcttggcgggccgcagcacgctcggacgggccaggggcggcgacccctcgcggacgcccggctgcgcgccgggccggggacttgcccttgcacgctccctgcgccctccagctcgccggcgggaccatgaagaagttctctcggatgcccaagtcggagggcggcagcggcggcggagcggcgggtggcggggctggcggggccggggccggggccggctgcggctccggcggctcgtccgtgggggtccgggtgttcgcggtcggccgccaccaggtcaccctggaagagtcgctggccgaaggtggattctccacagttttcctcgtgcgtactcacggtggaatccgatgtgcattgaagcgaatgtatgtcaataacatgccagacctcaatgtttgtaaaagggaaattacaattatgaaagagctatctggtcacaaaaatattgtgggctatttggactgtgctgttaattcaattagtgataatgtatgggaagtccttatcttaatggaatattgtcgagctggacaggtagtgaatcaaatgaataagaagctacagacgggttttacagaaccagaagtgttacagatattctgtgatacctgtgaagctgttgcaaggttgcatcagtgtaagactccaataattcaccgggatctgaaggtagaaaatattttgttgaatgatggtgggaactatgtactttgtgactttggcagtgccactaataaatttcttaatcctcaaaaagatggagttaatgtagtagaagaagaaattaaaaagtatacaactctgtcatacagagcccctgaaatgatcaacctttatggagggaaacccatcaccaccaaggctgatatctgggcactgggatgtctactctataaactttgtttcttcactcttccttttggtgagagtcaggttgctatctgtgatggcaacttcaccatcccagacaattctcgttactcccgtaacatacattgcttaataaggttcatgcttgaaccagatccggaacatagacctgatatatttcaagtgtcatattttgcatttaaatttgccaaaaaggattgtccagtctccaacatcaataattcttctattccttcagctcttcctgaaccgatgactgctagtgaagcagctgctaggaaaagccaaataaaagccagaataacagataccattggaccaacagaaacctcaattgcaccaagacaaagaccaaaggccaactctgctactactgccactcccagtgtgctgaccattcaaagttcagcaacacctgttaaagtccttgctcctggtgaattcggtaaccatagaccaaaaggggcactaagacctggaaatggccctgaaattttattgggtcagggacctcctcagcagccgccacagcagcatagagtactccagcaactacagcagggagattggagattacagcaactccatttacagcatcgtcatcctcaccagcagcagcagcagcagcagcagcaacagcaacagcagcagcagcaacagcaacagcagcagcagcagcagcagcagcagcaccaccaccaccaccaccaccacctacttcaagatgcttatatgcagcagtatcaacatgcaacacagcagcaacagatgcttcaacaacaatttttaatgcattcggtatatcaaccacaaccttctgcatcacagtatcctacaatgatgccgcagtatcagcaggctttctttcaacagcagatgctagctcaacatcagccgtctcaacaacaggcatcacctgaatatcttacctcccctcaagagttctcaccagccttagtttcctacacttcatcacttccagctcaggttggaaccataatggactcctcctatagtgccaataggtcagttgctgataaagaggccattgcaaatttcacaaatcagaagaacatcagcaatccacctgatatgtcagggtggaatccttttggagaggataatttctctaagttaacagaagaggaactattggacagagaatttgaccttctaagatcaaataggctcgaggagagagcatcctcagataagaatgtagactcactttctgctccacataaccatcctccagaagatccttttggttctgttcctttcatttctcattcaggttctcctgaaaagaaagctgaacattcatctataaatcaagaaaatggcactgcaaaccctatcaagaacggtaaaacaagtccagcatctaaagatcagcggactggaaagaaaacctcagtacagggtcaagtgcaaaaggggaatgatgaatctgaaagtgattttgaatcagatcccccttctcctaagagcagtgaagaggaagagcaagatgatgaagaagttcttcagggggaacaaggagattttaatgatgatgatactgaaccagaaaatctgggtcataggcctctcctcatggattctgaagatgaggaagaagaggagaaacatagctctgattctgattatgagcaggctaaagcaaagtacagtgacatgagctctgtctacagagacagatctggcagtggaccaacccaagatcttaatacaatactcctcacctcagcccaattatcctctgatgttgcagtggagactcccaaacaggagtttgatgtatttggcgctgtccccttctttgcagtgcgtgctcaacagccccagcaagaaaagaatgaaaagaacctccctcaacacaggtttcctgctgcaggactggagcaggaggaatttgatgtattcacaaaggcgccttttagcaagaaggtgaatgtacaagaatgccatgcagtggggcctgaggcacatactatccctggttatcccaaaagtgtagatgtatttggctccactccatttcagcccttcctcacatcaacaagtaaaagtgaaagcaatgaggacctttttgggcttgtgccctttgatgaaataacggggagccagcagcaaaaagtcaaacagcgcagcttacagaaactgtcctctcgccaaaggcgcacaaagcaggatatgtccaaaagtaatgggaagcggcatcatggcacgccaactagcacaaagaagactttgaagcctacctatcgcactccagagagggctcgcaggcacaaaaaagtgggccgccgagactctcaaagtagcaatgaatttttaaccatctcagactccaaggagaacattagtgttgcactgactgatgggaaagatagggggaatgtcttacaacctgaggagagcctgttggaccccttcggtgccaagcccttccattctccagacctgtcatggcaccctccacatcagggcctgagcgacatccgtgctgatcacaatactgtcctgccagggcggccaagacaaaattcactacatgggtcattccatagtgcagatgtattgaaaatggatgattttggtgccgtgccctttacagaacttgtggtgcaaagcatcactccacatcagtcccaacagtcccaaccagtcgaattagacccatttggtgctgctccatttccttctaaacagtagatacttctgatggattctcggcattaactcctgtttcaaaaaagtgtgaacagttttatgaatttgaaagaaaatttggtagctctttatagcattcattcttaaagatcagtcagaataggtgatttctaaataaaccaaatagaagaatg

SEQ ID NO: 282235 - DNA, 3172 bp, Homo sapiens
attaaggatcacttaaaaattaatacaggtattttggataatagtaataattattttgaatagaattatcttgaaggacctttttactatggccttggaactttcttgaataattccccagtgttcactaaactcactttttcttttgtgtcactttttcaatagaataatcaagtttgtcattcatacttctagtgtagagctgttctgtgattgatctacccttagcttgggataatgctttatttataaaatagcaatttctgcattttctgtaggcattaataaagtttgctagaatcatcactgatcttagagtggaacagaaaatacatattttttatccttataatgtgcccctaagtagtataatgtgtgtttcataaaacttcttaacattttgatctattcttgcagggttcatgcttgaaccagatccggaacatagacctgatatatttcaagtgtcatattttgcatttaaatttgccaaaaaggattgtccagtctccaacatcaataattcttctattccttcagctcttcctgaaccgatgactgctagtgaagcagctgctaggaaaagccaaataaaagccagaataacagataccattggaccaacagaaacctcaattgcaccaagacaaagaccaaaggccaactctgctactactgccactcccagtgtgctgaccattcaaagttcagcaacacctgttaaagtccttgctcctggtgaattcggtaaccatagaccaaaaggggcactaagacctggaaatggccctgaaattttattgggtcagggacctcctcagcagccgccacagcagcatagagtactccagcaactacagcagggagattggagattacagcaactccatttacagcatcgtcatcctcaccagcagcagcagcagcagcagcagcaacagcaacagcagcagcagcaacagcaacagcagcagcagcagcagcagcagcagcaccaccaccaccaccaccaccacctacttcaagatgcttatatgcagcagtatcaacatgcaacacagcagcaacagatgcttcaacaacaatttttaatgcattcggtatatcaaccacaaccttctgcatcacagtatcctacaatgatgccgcagtatcagcaggctttctttcaacagcagatgctagctcaacatcagccgtctcaacaacaggcatcacctgaatatcttacctcccctcaagagttctcaccagccttagtttcctacacttcatcacttccagctcaggttggaaccataatggactcctcctatagtgccaataggtcagttgctgataaagaggccattgcaaatttcacaaatcagaagaacatcagcaatccacctgatatgtcagggtggaatccttttggagaggataatttctctaagttaacagaagaggaactattggacagagaatttgaccttctaagatcaaataggctcgaggagagagcatcctcagataagaatgtagactcactttctgctccacataaccatcctccagaagatccttttggttctgttcctttcatttctcattcaggttctcctgaaaagaaagctgaacattcatctataaatcaagaaaatggcactgcaaaccctatcaagaacggtaaaacaagtccagcatctaaagatcagcggactggaaagaaaacctcagtacagggtcaagtgcaaaaggggaatgatgaatctgaaagtgattttgaatcagatcccccttctcctaagagcagtgaagaggaagagcaagatgatgaagaagttcttcagggggaacaaggagattttaatgatgatgatactgaaccagaaaatctgggtcataggcctctcctcatggattctgaagatgaggaagaagaggagaaacatagctctgattctgattatgagcaggctaaagcaaagtacagtgacatgagctctgtctacagagacagatctggcagtggaccaacccaagatcttaatacaatactcctcacctcagcccaattatcctctgatgttgcagtggagactcccaaacaggagtttgatgtatttggcgctgtccccttctttgcagtgcgtgctcaacagccccagcaagaaaagaatgaaaagaacctccctcaacacaggtttcctgctgcaggactggagcaggaggaatttgatgtattcacaaaggcgccttttagcaagaaggtgaatgtacaagaatgccatgcagtggggcctgaggcacatactatccctggttatcccaaaagtgtagatgtatttggctccactccatttcagcccttcctcacatcaacaagtaaaagtgaaagcaatgaggacctttttgggcttgtgccctttgatgaaataacggggagccagcagcaaaaagtcaaacagcgcagcttacagaaactgtcctctcgccaaaggcgcacaaagcaggatatgtccaaaagtaatgggaagcggcatcatggcacgccaactagcacaaagaagactttgaagcctacctatcgcactccagagagggctcgcaggcacaaaaaagtgggccgccgagactctcaaagtagcaatgaatttttaaccatctcagactccaaggagaacattagtgttgcactgactgatgggaaagatagggggaatgtcttacaacctgaggagagcctgttggaccccttcggtgccaagcccttccattctccagacctgtcatggcaccctccacatcagggcctgagcgacatccgtgctgatcacaatactgtcctgccagggcggccaagacaaaattcactacatgggtcattccatagtgcagatgtattgaaaatggatgattttggtgccgtgccctttacagaacttgtggtgcaaagcatcactccacatcagtcccaacagtcccaaccagtcgaattagacccatttggtgctgctccatttccttctaaacagtagatacttctgatggattctcggcattaactcctgtttcaaaaaagtgtgaacagttttatgaatttgaaagaaaatttggtagctctttatagcattcattcttaaagatcagtcagaataggtgatttctaaataaaccaaatagaagaatg

SEQ ID NO: 282236 - DNA, 4200 bp, Homo sapiens
  misc_feature (3501)..(3501): n is a, c, g, or t
agccgggcagctgcagcggagccgcggagcgggcggcggggcccaggctgtgcgcttggggagcgcggaatgtgaggcttggcgggccgcagcacgctcggacgggccaggggcggcgacccctcgcggacgcccggctgcgcgccgggccggggacttgcccttgcacgctccctgcgccctccagctcgccggcgggaccatgaagaagttctctcggatgcccaagtcggagggcggcagcggcggcggagcggcgggtggcggggctggcggggccggggccggggccggctgcggctccggcggctcgtccgtgggggtccgggtgttcgcggtcggccgccaccaggtcaccctggaagagtcgctggccgaaggtggattctccacagttttcctcgtgcgtactcacggtggaatccgatgtgcattgaagcgaatgtatgtcaataacatgccagacctcaatgtttgtaaaagggaaattacaattatgaaagagctatctggtcacaaaaatattgtgggctatttggactgtgctgttaattcaattagtgataatgtatgggaagtccttatcttaatggaatattgtcgagctggacaggtagtgaatcaaatgaataagaagctacagacgggttttacagaaccagaagtgttacagatattctgtgatacctgtgaagctgttgcaaggttgcatcagtgtaagactccaataattcaccgggatctgaaggtagaaaatattttgttgaatgatggtgggaactatgtactttgtgactttggcagtgccactaataaatttcttaatcctcaaaaagatggagttaatgtagtagaagaagaaattaaaaagtatacaactctgtcatacagagcccctgaaatgatcaacctttatggagggaaacccatcaccaccaaggctgatatctgggcactgggatgtctactctataaactttgtttcttcactcttccttttggtgagagtcaggttgctatctgtgatggcaacttcaccatcccagacaattctcgttactcccgtaacatacattgcttaataaggttcatgcttgaaccagatccggaacatagacctgatatatttcaagtgtcatattttgcatttaaatttgccaaaaaggattgtccagtctccaacatcaataattcttctattccttcagctcttcctgaaccgatgactgctagtgaagcagctgctaggaaaagccaaataaaagccagaataacagataccattggaccaacagaaacctcaattgcaccaagacaaagaccaaaggccaactctgctactactgccactcccagtgtgctgaccattcaaagttcagcaacacctgttaaagtccttgctcctggtgaattcggtaaccatagaccaaaaggggcactaagacctggaaatggccctgaaattttattgggtcagggacctcctcagcagccgccacagcagcatagagtactccagcaactacagcagggagattggagattacagcaactccatttacagcatcgtcatcctcaccagcagcagcagcagcagcagcagcaacagcaacagcagcagcagcaacagcaacagcagcagcagcagcagcagcagcagcaccaccaccaccaccaccaccacctacttcaagatgcttatatgcagcagtatcaacatgcaacacagcagcaacagatgcttcaacaacaatttttaatgcattcggtatatcaaccacaaccttctgcatcacagtatcctacaatgatgccgcagtatcagcaggctttctttcaacagcagatgctagctcaacatcagccgtctcaacaacaggcatcacctgaatatcttacctcccctcaagagttctcaccagccttagtttcctacacttcatcacttccagctcaggttggaaccataatggactcctcctatagtgccaataggtcagttgctgataaagaggccattgcaaatttcacaaatcagaagaacatcagcaatccacctgatatgtcagggtggaatccttttggagaggataatttctctaagttaacagaagaggaactattggacagagaatttgaccttctaagatcaaataggctcgaggagagagcatcctcagataagaatgtagactcactttctgctccacataaccatcctccagaagatccttttggttctgttcctttcatttctcattcaggcaagttacacatgtaacatcatcactgtcacaaataaaacacacaagaacaacagcaaaatcttataaagtggaagtaagactctgatgttagttagctacagaaagtagaaaatattttaacctttagccatcctactcttcttaatgatgttctttgcattgagttattattcagttgtatctttgccaacatagaaaaatgctgatttacacaatagaaacataactgcttcttttcatctttattattggatactgttgaaaaaaatatttaaagatatttttatacttggcttttgcttaaaaatttgatattttcctagtttgtacatgctctcttgtagatgcattttaaaagtattaatagttttgtatttgtcacaatcactttgttttactcttgtcttcttatatccctcttttgatttcaattcagaattcaaatattgatgtttttcactgttaaaaattttcagtaataatttcaaattacccagttaacacttggaagatactaggatggaataggatcgtgcattggcataaatgaattttcatgtatgtatggttatagtggaaaaaaagagttttaatcttggcaaagggaaatatgttagaagaagttatgctttattagaaggtaaaagttcgatatattcatggtaactgtcggccatgttcttcagttctgttccttttgtttctcactcaggcaagttacatatgtaacaccatttgaaaactacagaattaacaacaaaagaaaaacttacaaatgtaaagccaaaagaagaattgagtgtttaggatttctgctgagtacattgaacagcttttcaacattcagacttgtttggttatctggaatatacaggatagttttttcattgctttcatactccatatttttctctttgacatttattaaaaacagttcctattcttgctgttttctgtttgctgctttcaagttttctttttcataaatgacataattaactggggaacatagcttactgtgtctgtttacttattctgcataaatgtgttcccttatacccccaataccctgggtaatggaattattactgtctaaaattataataactcaaaatagtcattgtaagttctcaagaacatagtattcaatgacttgagatactgatctctgtgtggtagaaggcagtttcagtactagctcttttacatcctctgttaggaattgcattatccntttcaggtttgcatggacctatacaactacttctctgatgtttaatagcatctgaaagaaccctggggaaatgaatagtagagttaggagaactgaagtaagcttcagtgattggtcttttctctggacacccttatttggaggttggcctaaagattttgtacttcgcaacatgttcacaggtttgagctcgattgctgctattttgtttaactgtttactatgggtatttatattagattttaagctaattgagggtgggaaatatgaattgtctatctttgaatcctgcccagtatacaacccagtaggtacctaatactgttcattgaatgtgcagaaaaaaatcatgactatctataaaaattcatattccttagatttaggacagtggccttaaaaaaaatgcccattaatgggccgggcgcggtggcttgcgcctgtaatcccagcactttgggaggccaaggcaggcggatcatgaggtcaggagatcaagaccatcctggctaacacggtgaaaccccatctctactaaaaatacaaaaaatcagccaggcgtggtggtgggtgcctgtaatcccagctactcgggaggctaaggcaggagaatggcgtgaacccgggaggcggagtttgcagtgagccgagatcgtgccagtgcactccaacctgggcgatagagtgagactctgtctc

SEQ ID NO: 282237 - DNA, 272 bp, Homo sapiens
ccgctattttgcgtagggtgctttcgccgcgattctgagaacctttgaagtcagtactggagaaggattcgctgagattcttctagtccaacacgatcgttgtacagaggttcatttcctgttgagcagttagagcatgtgcattatttcctcacatgacatcaacagtgcagcatcagcctctggcatgtaaaggcacccagtagacttatgctctgtgcaatggctgcttagcaaccaccatcaaataaagtaatgaagcttttgtagag

SEQ ID NO: 282238 - DNA, 699 bp, Homo sapiens
agcggccgccgcgactcttgcctcccgggcgtcgttgctccacgggcctgcctccacccgcggggacaggtgccccggctggggtctgttgggaagatggcgaccccgggcatgagctggcagcagcactattacggcggctcggcggccaaattcgcgccctcgccggccaccgcacagctggctgggcacagcatggactacagccaggagatgcacctgaaaatgagcaagaaaatcgcccagctcaccaaggtaatatatgctttaaacactaaaaatgatgagcatgaatctgcaattcaagccctcaaagatgctcatgaagaagaaattcaacaaattcttgctgaaacaagagaaaaaatattgcagtataaaagcaaagtaacagaggagctagaccttagaagaaagattcaagttttagaatcatcattagaagatcacataaaaatgaagcagcaggctttgacagaatttgaagcttataagcacagagttgaggacatgcaactttgtgcagaagcccagcatgtccaacgcatagtgaccatgtctagagaagtcgaagagattagaaggaaatttgaagaaaaattacggagctttggacaacttcaagtacagtttgaaaaagacaaacgattggcattggaagacttgcaagctgctcacagacgggagatacaagagcta

SEQ ID NO: 282239 - DNA, 486 bp, Homo sapiens
gcggccgccgcgactcttgcctcccgggcgtcgttgctccacgggcctgcctccacccgcggggacaggtgccccggctggggtctgttgggaagatggcgaccccgggcatgagctggcagcagcactattacggcggctcggcggccaaattcgcgccctcgccggccaccgcacagctggctgggcacagcatggactacagccaggagatgcacctgaaaatgagcaagaaaatcgcccagctcaccaaggtaaggggggcagcgacggggcaggtggcgaccccgtgcgggccgcgccggactcacctgtctccccgggaggcagtgcgccctgcgcccgcagcgaggggaactctactcctccgccgaagcaacagccggagacacctccaaaaccctgcaaactttggtggaacgctggcaacatgaatttaagctagacagcacagcggcacggtgcgcgtaagggacttgcacctcc

SEQ ID NO: 282240 - DNA, 580 bp, Homo sapiens
ctcgcgaacgtgttatcctcttcaacatgaagaggataagaagtcagcaatgtctcaacttttgcagttgaaagatcgagagaaaaatgcagcaagagattcatggcagaagaaagtagaagatctcttaaaccaggtaatatatgctttaaacactaaaaatgatgagcatgaatctgcaattcaagccctcaaagatgctcatgaagaagaaattcaacaaattcttgctgaaacaagagaaaaaatattgcagtataaaagcaaagtaacagaggagctagaccttagaagaaagattcaagttttagaatcatcattagaagatcacataaaaatgaagcagcaggctttgacagaatttgaagcttataagcacagagttgaggacatgcaactttgtgcagaagcccagcatgtccaacgcatagtgaccatgtctagagaagtcgaagagattagaaggaaatttgaagaaaaattacggagctttggacaacttcaagtacagtttgaaaaagacaaacgattggcattggaagacttgcaagctgctcacagacgggagatacaagagcta

SEQ ID NO: 282241 - DNA, 2369 bp, Homo sapiens
gagagcagaccaggcccggtggagaattaggtgctgctgggagctcctgcctcccacaggattccagctgcagggagcctcagggactctgggccgcacggagttgggggcattccccagagagcgtcgccatggtctgcagggagcagttatcaaagaatcaggtcaagtgggtgtttgccggcattacctgtgtgtctgtggtggtcattgccgcaatagtccttgccatcaccctgcggcggccaggctgtgagctggaggcctgcagccctgatgccgacatgctggactacctgctgagcctgggccagatcagccggcgagatgccttggaggtcacctggtaccacgcagccaacagcaagaaagccatgacagctgccctgaacagcaacatcacagtcctggaggctgacgtcaatgtagaagggctcggcacagccaatgagacaggagttcccatcatggcacacccccccactatctacagtgacaacacactggagcagtggctggacgctgtgctgggctcttcccaaaagggcatcaaactggacttcaagaacatcaaggcagtgggcccctccctggacctcctgcggcagctgacagaggaaggcaaagtccggcggcccatatggatcaacgctgacatcttaaagggccccaacatgctcatctcaactgaggtcaatgccacacagttcctggccctggtccaggagaaagtatcccaaggctaccctatctccaggctggaccaccttctacatgtccacgtccccaaacaggacgtacacccaagccatggtggagaagatgcacgagctggtgggaggagtgccccagagggtcaccttccctgtacggtcttccatggtgcgggctgcctggccccacttcagctggctgctgagccaatctgagaggtacagcctgacgctgtggcaggctgcctcggaccccatgtcggtggaagatctgctctacgtccgggataacactgctgtccaccaagtctactatgacatctttgagcctctcctgtcacagttcaagcagctggccttgaatgccacacggaaaccaatgtactacacgggaggcagcctgatccctcttctccagctgcctggggatgacggtctgaatgtggagtggctggttcctgacgtccagggcagcggtaaaacagcaacaatgaccctcccagacacagaaggcatgatcctgctgaacactggcctcgagggaactgtggctgaaaaccccgtgcccattgttcatactccaagtggcaacatcctgacgctggagtcctgcctgcagcagctggccacacatcccggacactggggcatccatttgcaaatagcgagcccgcagccctccggccatccctggcttgctggcacgcctctccagccttggcctcttgcattggcctgtgtgggttggggccaaaatctcccacgggagtttttcggtccccggccatgtggctggcagagagctgcttacagctgtggctgaggtcttcccccacgtgactgtggcaccaggctggcctgaggaggtgctgggcagtggctacagggaacagctgctcacagatatgctagagttgtgccaggggctctggcaacctgtgtccttccagatgcaggccatgctgctgggccacagcacagctggagccataggcaggctgctggcatcctccccccgggccaccgtcacagtggagcacaacccagctgggggcgactatgcctctgtgaggacagcattgctggcagctagggctgtggacaggacccgagtctactacaggctaccccagggctaccacaaggacttgctggctcatgttggtagaaactgagcacccaggggtggtgggtcagcggacctcagggcggaggcttcccacggggaggcaggaagaaataaaggtctttggctttctccagaaaaaaaaaaaacaaagaaaaacaaaagcaaaaccaacacaacgaaaaaaagaaggagagaaggacgacaaagagagaccaacacaagaaaagaaccagaagagaggggggcccacaaaaaggaacaccgccgggaagaggcccaaaaagagaggcaccacactgtgttataggagcacagcagcggcgccgcaccccaaaaaaagaagacggagacatatgcaacacgacggagcgcgacacgcggaaacaacacagaacgggagacacgacgaagcaacacaaacgccgaggcgcgacagacctcagctagaagaagagcaaccccacacaactacctgaagggggggaaacaagcaaagcgctggccgacaacctcaacaagcgggagaa

SEQ ID NO: 282242 - DNA, 670 bp, Homo sapiens
gtgagccaccgtgcccagcccaggaattgctttttaaccgcctgctgctgggtactgccacttggatgcccaggtccacattaataattacaaaatggtggttaacacagcatcttcatcacctaagctctgtcccatgtacgagccttccctcatcctcccttttctgcctcccaaccagaatgatctctgcctttcacaaagaccacctttgtgcatccatgcctactcttcagaacaccactgcaagaaatcccctcagccactttgtcatccaccaaggctgaaaggtaaccctctatgaagctctgctgaccacctcctttgggtcctgctaacctaccctctgtttcatgacacttaggacactgggagctagaggtcattggtatgactgtctctcccatggactaagctgtcagagaacagagactgtctcattcctggctaccagcacctgccagacagcaggaactcaataaaaatgggctggactgatctgctggcttgactggtcagtgtttacctgagcaagaagaagctgtcatttgattcaccccagcgcctcactgcctctcaagcactaaccttgttcttacgtccatcaatctcaaagaaggagatggtgccttgcggtaaatctcattgcctggaggatgtcgtaggtcac

SEQ ID NO: 282243 - DNA, 1810 bp, Homo sapiens
aaatgtcaggctggtacggcccgagtttatggattcctcgcgagccctggcgtcgcgtaggagggaggatggagagcggcgacgaagcggccatcgagaggcaccgcgtccacttgcgctccgccacattgcgcgacgccgtacccgccacactgcatctgctgccctgcgaggttgcggtggacgggcccgccccggtggggcgcttcttcacgcccgccatccgccagggccccgagggactcgaagtgtcgtttcggggccgctgtctacggggagaggaggtggcggtgccgcctggcctcgtgggatacgtgatggtgacagaagagaagaaggtgtcgatggggaagccagaccccttgcgggattccgggactgacgaccaagaggaggagccgctggagcgggacttcgaccgcttcattggagccactgccaacttcagccgcttcaccctgtggggtctggagaccatccctggcccggatgccaaagtgcgtggggccttaacttggcccagccttgcggcagcgattcacgcacaggtgcccgaggactgagaaccagagcttgaaattcaaagctgcgatcccttcacagcagtaaaccagctctttggaaccgattccatcaccccaataaaggagctcttcacagcacctgtgagtctgggcgccttagagcccctaagccagcatgggccctttccccctccccaccaagaactttgcatggctctggcatatagaaacaatttattgccgggggcaataggggtaagagaagccagaaatttttgcagccagcacccaccccacccccaacttctactttacaaaagaaatttttacaatcaccagccctctgtacagagctcccccatccggatcccttctcactgtacacagctgcctggctccctctggtccctgcttcagaggaggcctcgctgtggccagctgaccttggagttggtctgagcccggagctcgccttggtgctgggcaccagtgggcccctgccaggcctgtcctctcctttttgagctgtcctcagccccatctcccttagagtgctttgtgggagctgcagtgggggcggggtgggctatcagccccagtcctgctgccgtcttggcactgcagtgggcagtgtctggtcaccacttccccctcttgctccagtccttgggagtgaagtgcagacacttggagtcgatccgcaggagccgcttgagcatggcccgctcatggccatccacgatgtcctctgacagtgtgaggatgtactggccctgggcagaggagatgggttcagcaggtggtcagcccacagaggactgcactctgcatcccacacacctgtctcccctgcctgcctccctaccttgtagtagttgatgagattgaggtactgcagagtggagatgacatcctccttcttgatgctggtgatttcactaatctcactgtgggagagcacaggtcaggttccctgaggacctttatctgtccccaggagccctgagagagaaagcccaggaacagacaagccatgccatgtacccccaggtagacagcgccaggctcacttgatggtgatctgtggcctctccccgctctccgacttcagccccatcaggatctccaggatggtctgggaccagtagcttcgataggataggaggccaaggtctgagaggggcttctcaggggtccctgttttcccttccactttggagagttcatagcctaaagcaatggagcaggagagggtgagtaagaggtcacagatgaacataagcaac

SEQ ID NO: 282244 - DNA, 797 bp, Homo sapiens
ggcgctttccgcgccagcttcagtgtcctcgcgagccctggcgtcgcgtaggagggaggatggagagcggcgacgaagcggccatcgagaggcaccgcgtccacttgcgctccgccacattgcgcgacgccgtacccgccacactgcatctgctgccctgcgaggttgcggtggacgggcccgccccggtggggcgcttcttcacgcccgccatccgccagggccccgagggactcgaagtgtcgtttcggggccgctgtctacggggagaggaggtggcggtgccgcctggcctcgtgggatacgtgatggtgacagaagagaagaaggtgtcgatggggaagccagaccccttgcgggattccgggactgacgaccaagaggaggagccgctggagcgggacttcgaccgcttcattggagccactgccaacttcagccgcttcaccctgtggggtctggagaccatccctggcccggatgccaaagtgcgtggggccttaacttggcccagccttgcggcagcgattcacgcacaggtgcccgaggactgagaaccagagcttgaaattcaaagctgcgatcccttcacagcagtaaaccagctctttggaaccgattccatcaccccaataaaggagctcttcacagcacgggctcccggcgggagcccgctgtcctgctagtcttgtacatgcatataaagaacctgcctgcccaggctgcggacacatgtccagacggtgagggtggtgggcctggagggctctgacaagctcaccattatccgaggctgc

SEQ ID NO: 282245 - DNA, 2036 bp, Homo sapiens
ggcgctttccgcgccagcttcagtgtcctcgcgagccctggcgtcgcgtaggagggaggatggagagcggcgacgaagcggccatcgagaggcaccgcgtccacttgcgctccgccacattgcgcgacgccgtacccgccacactgcatctgctgccctgcgaggttgcggtggacgggcccgccccggtggggcgcttcttcacgcccgccatccgccagggccccgagggactcgaagtgtcgtttcggggccgctgtctacggggagaggaggtggcggtgccgcctggcctcgtgggatacgtgatggtgacagaagagaagaaggtgtcgatggggaagccagaccccttgcgggattccgggactgacgaccaagaggaggagccgctggagcgggacttcgaccgcttcattggagccactgccaacttcagccgcttcaccctgtggggtctggagaccatccctggcccggatgccaaagtgcgtggggccttaacttggcccagccttgcggcagcggtgagtagacgaggagttccgtcttgcccccgggtggatgggctggggagcacaattgcgcagacggagcctggaggattctactgggtagtgtgtgggaagcgtagctccctgaccactcttcctagcatgtctagaagcggttattctgaacagctgggtccttcctcgggtatgggggccagcttgccgccctgtcttacaagtccaacagtagaggcgactcctgttgcagattcacgcacaggtgcccgaggactgagaaccagagcttgaaattcaaagctgcgatcccttcacagcagtaaaccagctctttggaaccgattccatcaccccaataaaggagctcttcacagcacctgtgagtctgggcgccttagagcccctaagccagcatgggccctttccccctccccaccaagaactttgcatggctctggcatatagaaacaatttattgccgggggcaataggggtaagagaagccagaaatttttgcagccagcacccaccccacccccaacttctactttacaaaagaaatttttacaatcaccagccctctgtacagagctcccccatccggatcccttctcactgtacacagctgcctggctccctctggtccctgcttcagaggaggcctcgctgtggccagctgaccttggagttggtctgagcccggagctcgccttggtgctgggcaccagtgggcccctgccaggcctgtcctctcctttttgagctgtcctcagccccatctcccttagagtgctttgtgggagctgcagtgggggcggggtgggctatcagccccagtcctgctgccgtcttggcactgcagtgggcagtgtctggtcaccacttccccctcttgctccagtccttgggagtgaagtgcagacacttggagtcgatccgcaggagccgcttgagcatggcccgctcatggccatccacgatgtcctctgacagtgtgaggatgtactggccctgggcagaggagatgggttcagcaggtggtcagcccacagaggactgcactctgcatcccacacacctgtctcccctgcctgcctccctaccttgtagtagttgatgagattgaggtactgcagagtggagatgacatcctccttcttgatgctggtgatttcactaatctcactgtgggagagcacaggtcaggttccctgaggacctttatctgtccccaggagccctgagagagaaagcccaggaacagacaagccatgccatgtacccccaggtagacagcgccaggctcacttgatggtgatctgtggcctctccccgctctccgacttcagccccatcaggatctccaggatggtctgggaccagtagcttcgataggataggaggccaaggtctgagaggggcttctcaggggtccctgttttcccttccactttggagagttcatagcctaaagcaatggagcaggagagggtgagtaagaggtcacagatgaacataagcaac

SEQ ID NO: 282246 - DNA, 2042 bp, Homo sapiens
caagcaggctggtacggcctgggggttaaggtcctcgcgagccctggcgtcgcgtaggagggaggatggagagcggcgacgaagcggccatcgagaggcaccgcgtccacttgcgctccgccacattgcgcgacgccgtacccgccacactgcatctgctgccctgcgaggttgcggtggacgggcccgccccggtggggcgcttcttcacgcccgccatccgccagggccccgagggactcgaagtgtcgtttcggggccgctgtctacggggagaggaggtggcggtgccgcctggcctcgtgggatacgtgatggtgacagaagagaagaaggtgtcgatggggaagccagaccccttgcgggattccgggactgacgaccaagaggaggagccgctggagcgggacttcgaccgcttcattggagccactgccaacttcagccgcttcaccctgtggggtctggagaccatccctggcccggatgccaaagtgcgtggggccttaacttggcccagccttgcggcagcggtgagtagacgaggagttccgtcttgcccccgggtggatgggctggggagcacaattgcgcagacggagcctggaggattctactgggtagtgtgtgggaagcgtagctccctgaccactcttcctagcatgtctagaagcggttattctgaacagctgggtccttcctcgggtatgggggccagcttgccgccctgtcttacaagtccaacagtagaggcgactcctgttgcagattcacgcacaggtgcccgaggactgagaaccagagcttgaaattcaaagctgcgatcccttcacagcagtaaaccagctctttggaaccgattccatcaccccaataaaggagctcttcacagcacctgtgagtctgggcgccttagagcccctaagccagcatgggccctttccccctccccaccaagaactttgcatggctctggcatatagaaacaatttattgccgggggcaataggggtaagagaagccagaaatttttgcagccagcacccaccccacccccaacttctactttacaaaagaaatttttacaatcaccagccctctgtacagagctcccccatccggatcccttctcactgtacacagctgcctggctccctctggtccctgcttcagaggaggcctcgctgtggccagctgaccttggagttggtctgagcccggagctcgccttggtgctgggcaccagtgggcccctgccaggcctgtcctctcctttttgagctgtcctcagccccatctcccttagagtgctttgtgggagctgcagtgggggcggggtgggctatcagccccagtcctgctgccgtcttggcactgcagtgggcagtgtctggtcaccacttccccctcttgctccagtccttgggagtgaagtgcagacacttggagtcgatccgcaggagccgcttgagcatggcccgctcatggccatccacgatgtcctctgacagtgtgaggatgtactggccctgggcagaggagatgggttcagcaggtggtcagcccacagaggactgcactctgcatcccacacacctgtctcccctgcctgcctccctaccttgtagtagttgatgagattgaggtactgcagagtggagatgacatcctccttcttgatgctggtgatttcactaatctcactgtgggagagcacaggtcaggttccctgaggacctttatctgtccccaggagccctgagagagaaagcccaggaacagacaagccatgccatgtacccccaggtagacagcgccaggctcacttgatggtgatctgtggcctctccccgctctccgacttcagccccatcaggatctccaggatggtctgggaccagtagcttcgataggataggaggccaaggtctgagaggggcttctcaggggtccctgttttcccttccactttggagagttcatagcctaaagcaatggagcaggagagggtgagtaagaggtcacagatgaacataagcaac

SEQ ID NO: 282247 - DNA, 656 bp, Homo sapiens
ggacgcgtgggcgacccacgcgtccggtcctcgcgagccctggcgtcgcgtaggagggaggatggagagcggcgacgaagcggccatcgagaggcaccgcgtccacttgcgctccgccacattgcgcgacgccgtacccgccacactgcatctgctgccctgcgaggttgcggtggacgggcccgccccggtggggcgcttcttcacgcccgccatccgccagggccccgagggactcgaagtgtcgtttcggggccgctgtctacggggagaggaggtggcggtgccgcctggcctcgtgggatacgtgatggtgacagaagagaagaaggtgtcgatggggaagccagaccccttgcgggattccgggactgacgaccaagaggaggagccgctggagcgggacttcgaccgcttcattggagccactgccaacttcagccgcttcaccctgtggggtctggagaccatccctggcccggatgccaaagtgcgtggggccttaacttggcccagccttgcggcagcgattcacgcacaggtgcccgaggactgagaaccagagcttgaaattcaaagctgcgatcccttcacagcagtaaaccagctctttggaaccgattccatcaccccaataaaggagctcttcacagcac

SEQ ID NO: 282248 - DNA, 654 bp, Homo sapiens
ggcgctttccgcgccagcttcagtgtcctcgcgagccctggcgtcgcgtaggagggaggatggagagcggcgacgaagcggccatcgagaggcaccgcgtccacttgcgctccgccacattgcgcgacgccgtacccgccacactgcatctgctgccctgcgaggttgcggtggacgggcccgccccggtggggcgcttcttcacgcccgccatccgccagggccccgagggactcgaagtgtcgtttcggggccgctgtctacggggagaggaggtggcggtgccgcctggcctcgtgggatacgtgatggtgacagaagagaagaaggtgtcgatggggaagccagaccccttgcgggattccgggactgacgaccaagaggaggagccgctggagcgggacttcgaccgcttcattggagccactgccaacttcagccgcttcaccctgtggggtctggagaccatccctggcccggatgccaaagtgcgtggggccttaacttggcccagccttgcggcagcgattcacgcacaggtgcccgaggactgagaaccagagcttgaaattcaaagctgcgatcccttcacagcagtaaaccagctctttggaaccgattccatcaccccaataaaggagctcttcacagcac

SEQ ID NO: 282249 - DNA, 663 bp, Homo sapiens
aaatgtcaggctggtacggcccgagtttatggattcctcgcgagccctggcgtcgcgtaggagggaggatggagagcggcgacgaagcggccatcgagaggcaccgcgtccacttgcgctccgccacattgcgcgacgccgtacccgccacactgcatctgctgccctgcgaggttgcggtggacgggcccgccccggtggggcgcttcttcacgcccgccatccgccagggccccgagggactcgaagtgtcgtttcggggccgctgtctacggggagaggaggtggcggtgccgcctggcctcgtgggatacgtgatggtgacagaagagaagaaggtgtcgatggggaagccagaccccttgcgggattccgggactgacgaccaagaggaggagccgctggagcgggacttcgaccgcttcattggagccactgccaacttcagccgcttcaccctgtggggtctggagaccatccctggcccggatgccaaagtgcgtggggccttaacttggcccagccttgcggcagcgattcacgcacaggtgcccgaggactgagaaccagagcttgaaattcaaagctgcgatcccttcacagcagtaaaccagctctttggaaccgattccatcaccccaataaaggagctcttcacagcac

SEQ ID NO: 282250 - DNA, 823 bp, Homo sapiens
ggcgctttccgcgccagcttcagtgtcctcgcgagccctggcgtcgcgtaggagggaggatggagagcggcgacgaagcggccatcgagaggcaccgcgtccacttgcgctccgccacattgcgcgacgccgtacccgccacactgcatctgctgccctgcgaggttgcggtggacgggcccgccccggtggggcgcttcttcacgcccgccatccgccagggccccgagggtgagccctgcggccggactacggctcccggcagcccccgcgccggcctgcgcgcttctcatcgcctgggctcctggggatcgtggtccgtccggaggtggcgggagggcagctccgggctcgacccagcgtgggtcctgcctgaggccctttgcgcctcccgctccaggactcgaagtgtcgtttcggggccgctgtctacggggagaggaggtggcggtgccgcctggcctcgtgggatacgtgatggtgacagaagagaagaaggtgtcgatggggaagccagaccccttgcgggattccgggactgacgaccaagaggaggagccgctggagcgggacttcgaccgcttcattggagccactgccaacttcagccgcttcaccctgtggggtctggagaccatccctggcccggatgccaaagtgcgtggggccttaacttggcccagccttgcggcagcgattcacgcacaggtgcccgaggactgagaaccagagcttgaaattcaaagctgcgatcccttcacagcagtaaaccagctctttggaaccgattccatcaccccaataaaggagctcttcacagcac

SEQ ID NO: 282251 - DNA, 1801 bp, Homo sapiens
ggcgctttccgcgccagcttcagtgtcctcgcgagccctggcgtcgcgtaggagggaggatggagagcggcgacgaagcggccatcgagaggcaccgcgtccacttgcgctccgccacattgcgcgacgccgtacccgccacactgcatctgctgccctgcgaggttgcggtggacgggcccgccccggtggggcgcttcttcacgcccgccatccgccagggccccgagggactcgaagtgtcgtttcggggccgctgtctacggggagaggaggtggcggtgccgcctggcctcgtgggatacgtgatggtgacagaagagaagaaggtgtcgatggggaagccagaccccttgcgggattccgggactgacgaccaagaggaggagccgctggagcgggacttcgaccgcttcattggagccactgccaacttcagccgcttcaccctgtggggtctggagaccatccctggcccggatgccaaagtgcgtggggccttaacttggcccagccttgcggcagcgattcacgcacaggtgcccgaggactgagaaccagagcttgaaattcaaagctgcgatcccttcacagcagtaaaccagctctttggaaccgattccatcaccccaataaaggagctcttcacagcacctgtgagtctgggcgccttagagcccctaagccagcatgggccctttccccctccccaccaagaactttgcatggctctggcatatagaaacaatttattgccgggggcaataggggtaagagaagccagaaatttttgcagccagcacccaccccacccccaacttctactttacaaaagaaatttttacaatcaccagccctctgtacagagctcccccatccggatcccttctcactgtacacagctgcctggctccctctggtccctgcttcagaggaggcctcgctgtggccagctgaccttggagttggtctgagcccggagctcgccttggtgctgggcaccagtgggcccctgccaggcctgtcctctcctttttgagctgtcctcagccccatctcccttagagtgctttgtgggagctgcagtgggggcggggtgggctatcagccccagtcctgctgccgtcttggcactgcagtgggcagtgtctggtcaccacttccccctcttgctccagtccttgggagtgaagtgcagacacttggagtcgatccgcaggagccgcttgagcatggcccgctcatggccatccacgatgtcctctgacagtgtgaggatgtactggccctgggcagaggagatgggttcagcaggtggtcagcccacagaggactgcactctgcatcccacacacctgtctcccctgcctgcctccctaccttgtagtagttgatgagattgaggtactgcagagtggagatgacatcctccttcttgatgctggtgatttcactaatctcactgtgggagagcacaggtcaggttccctgaggacctttatctgtccccaggagccctgagagagaaagcccaggaacagacaagccatgccatgtacccccaggtagacagcgccaggctcacttgatggtgatctgtggcctctccccgctctccgacttcagccccatcaggatctccaggatggtctgggaccagtagcttcgataggataggaggccaaggtctgagaggggcttctcaggggtccctgttttcccttccactttggagagttcatagcctaaagcaatggagcaggagagggtgagtaagaggtcacagatgaacataagcaac

SEQ ID NO: 282252 - DNA, 1277 bp, Homo sapiens
ggcgctttccgcgccagcttcagtgtcctcgcgagccctggcgtcgcgtaggagggaggatggagagcggcgacgaagcggccatcgagaggcaccgcgtccacttgcgctccgccacattgcgcgacgccgtacccgccacactgcatctgctgccctgcgaggttgcggtggacgggcccgccccggtggggcgcttcttcacgcccgccatccgccagggccccgagggactcgaagtgtcgtttcggggccgctgtctacggggagaggaggtggcggtgccgcctggcctcgtgggatacgtgatggtgacagaagagaagaaggtgtcgatggggaagccagaccccttgcgggattccgggactgacgaccaagaggaggagccgctggagcgggacttcgaccgcttcattggagccactgccaacttcagccgcttcaccctgtggggtctggagaccatccctggcccggatgccaaagtgcgtggggccttaacttggcccagccttgcggcagcgattcacgcacaggtgcccgaggactgagaaccagagcttgaaattcaaagctgcgatcccttcacagcagtaaaccagctctttggaaccgattccatcaccccaataaaggagctcttcacagcactccttgggagtgaagtgcagacacttggagtcgatccgcaggagccgcttgagcatggcccgctcatggccatccacgatgtcctctgacagtgtgaggatgtactggccctgggcagaggagatgggttcagcaggtggtcagcccacagaggactgcactctgcatcccacacacctgtctcccctgcctgcctccctaccttgtagtagttgatgagattgaggtactgcagagtggagatgacatcctccttcttgatgctggtgatttcactaatctcactgtgggagagcacaggtcaggttccctgaggacctttatctgtccccaggagccctgagagagaaagcccaggaacagacaagccatgccatgtacccccaggtagacagcgccaggctcacttgatggtgatctgtggcctctccccgctctccgacttcagccccatcaggatctccaggatggtctgggaccagtagcttcgataggataggaggccaaggtctgagaggggcttctcaggggtccctgttttcccttccactttggagagttcatagcctaaagcaatggagcaggagagggtgagtaagaggtcacagatgaacataagcaac

SEQ ID NO: 282253 - DNA, 1059 bp, Homo sapiens
ggcgctttccgcgccagcttcagtgtcctcgcgagccctggcgtcgcgtaggagggaggatggagagcggcgacgaagcggccatcgagaggcaccgcgtccacttgcgctccgccacattgcgcgacgccgtacccgccacactgcatctgctgccctgcgaggttgcggtggacgggcccgccccggtggggcgcttcttcacgcccgccatccgccagggccccgagggtgagccctgcggccggactacggctcccggcagcccccgcgccggcctgcgcgcttctcatcgcctgggctcctggggatcgtggtccgtccggaggtggcgggagggcagctccgggctcgacccagcgtgggtcctgcctgaggccctttgcgcctcccgctccaggactcgaagtgtcgtttcggggccgctgtctacggggagaggaggtggcggtgccgcctggcctcgtgggatacgtgatggtgacagaagagaagaaggtgtcgatggggaagccagaccccttgcgggattccgggactgacgaccaagaggaggagccgctggagcgggacttcgaccgcttcattggagccactgccaacttcagccgcttcaccctgtggggtctggagaccatccctggcccggatgccaaagtgcgtggggccttaacttggcccagccttgcggcagcgattcacgcacaggtgcccgaggactgagaaccagagcttgaaattcaaagctgcgatcccttcacagcagtaaaccagctctttggaaccgattccatcaccccaataaaggagctcttcacagcacgtagacagcgccaggctcacttgatggtgatctgtggcctctccccgctctccgacttcagccccatcaggatctccaggatggtctgggaccagtagcttcgataggataggaggccaaggtctgagaggggcttctcaggggtccctgttttcccttccactttggagagttcatagcctaaagcaatggagcaggagagggtgagtaagaggtcacagatgaacataagcaac

SEQ ID NO: 282254 - DNA, 1185 bp, Homo sapiens
ggcgctttccgcgccagcttcagtgtcctcgcgagccctggcgtcgcgtaggagggaggatggagagcggcgacgaagcggccatcgagaggcaccgcgtccacttgcgctccgccacattgcgcgacgccgtacccgccacactgcatctgctgccctgcgaggttgcggtggacgggcccgccccggtggggcgcttcttcacgcccgccatccgccagggccccgagggtgagccctgcggccggactacggctcccggcagcccccgcgccggcctgcgcgcttctcatcgcctgggctcctggggatcgtggtccgtccggaggtggcgggagggcagctccgggctcgacccagcgtgggtcctgcctgaggccctttgcgcctcccgctccaggactcgaagtgtcgtttcggggccgctgtctacggggagaggaggtggcggtgccgcctggcctcgtgggatacgtgatggtgacagaagagaagaaggtgtcgatggggaagccagaccccttgcgggattccgggactgacgaccaagaggaggagccgctggagcgggacttcgaccgcttcattggagccactgccaacttcagccgcttcaccctgtggggtctggagaccatccctggcccggatgccaaagtgcgtggggccttaacttggcccagccttgcggcagcgaatgatctctgcctttcacaaagaccacctttgtgcatccatgcctactcttcagaacaccactgcaagaaatcccctcagccactttgtcatccaccaaggctgaaaggtaaccctctatgaagctctgctgaccacctcctttgggtcctgctaacctaccctctgtttcatgacacttaggacactgggagctagaggtcattggtatgactgtctctcccatggactaagctgtcagagaacagagactgtctcattcctggctaccagcacctgccagacagcaggaactcaataaaaatgggctggactgatctgctggcttgactggtcagtgtttacctgagcaagaagaagctgtcatttgattcaccccagcgcctcactgcctctcaagcactaaccttgttcttacgtccatcaatctcaaagaaggagatggtgccttgcggtaaatctcattgcctggaggatgtcgtaggtcac

SEQ ID NO: 282255 - DNA, 4280 bp, Homo sapiens
cagggctccttcccgcccgccgccgccgagacccaggctgaagctggggaggacggtggagcccggcccaggccgttctcctgcccccgcggctggagcatcgtctgggactactggctgaaggcgagccccgcagcccaagcgcagcgcacacgcgcgccccgcggccaccgccgttctctcttccctcccctcctctcccctcccctctcctccgcccccggcctcggctgcggcgggaggaagaacgcttcccaaccagccaggagagcccagatctattcccattcggggagaaagaagagaccccgcacttggatccgaccgacttctcgccccggggccacggaagtggctcgccgtccaccggagagtccccgccgagcgtagccctccaaccctcgcccaaccgcagccgcatagacagcgctccccagcgggcccccggccccgccgagcccactccccgcgcggggccggggccggggccggcgatgcctggcacggcagcggcggtggccgcggctgctgctgctgctactgccaccgctgccacggctgctggcccgggcccgggctgggggcttgagtctctgcagtggggctgagcccgcagtcccgccccccgatcctgaggccgctgctccgccgggcgccgggcctcctccgcccgcgcctccgccccaggagctggagccaagcggggagctcgggccccgcgcccaggcccggaccatgcatggccaccgagccccgggggggcgccgggccttcggagcccgaacacccggccacgaacccgccgggcgccgctccgccggcctgtgccgactcggaccctggagcctcggaacccggactgctggcgcgcaggggctcaggttcggctcttggcggcccactggatccccagtttgtcggaccctcggacaccagcctgggcgctgctccaggccaccgggtcttgccctgcggtcccagtccacagcaccaccgggccctgcgcttctcttaccacctggagggctcgcagcctcggcctgggctgcaccagggaaaccggatcctggttaaaagtttgtcccttgaccctggccaaagcctagagcctcatccagaaggtccccagcggcttcgctcagacccaggtcccccgactgaaacccctagccagcgtccttcaccactgaagcgggcaccgggcccgaagccacaggtgcccccaaagcccagctacctgcagatgccccggatgccccccccactggagcccatcccccctccaccatcacgcccactgcctgccgacccccgagtggccaagggcctggctcccagggcagaggccagccccagttctgcagcagtatcctcactgattgagaagtttgaaagagagcctgtgattgtcgcctcggatagaccagtccctggccccagcccaggtcccccagagccagtcatgttgccacagccaacctcgcagccaccagtgccccagctccccgagggtgaggcctcccgctgcctgtttctgctggctcctgggccccgggacggtgagaaggtgcccaaccgggacagcggcattgatagcatcagctcgccatccaacagcgaggagacctgcttcgtcagtgatgacgggccccccagccacagcctctgccctgggccccctgccctggctagtgtgcctgttgccttggccgacccccaccggcctggctcccaagaggttgacagtgacctggaggaggaggacgacgaggaggaggaggaagagaaggacagagaaatcccagtgcccctgatggagagacaggagtctgtggagttgactgtgcagcaaaaggtgtttcacattgccaatgagctcctgcaaactgagaaggcctacgtttccaggctccatctcctggatcaggtgttctgtgcccggctgctggaagaagctcggaaccgcagttccttcccggccgacgttgtccacggcatcttctctaacatctgctccatctattgcttccaccagcagttcctgctgcctgagctagagaagcgcatggaggaatgggaccgctatccacgcattggagacatcctgcagaaactggcccccttcctcaagatgtatggtgagtatgtgaagaactttgaccgggccgtggagctggtcaacacctggacagagcgctccacccagtttaaagtcatcatccatgaggtgcagaaggaggaagcctgtggcaacctgacattgcagcaccacatgctggagcctgtgcagcgcatcccccgctatgagcttcttctcaaggactatctgttaaagctgccccatggctccccggacagcaaggatgcccaaaagtctctggagctgatcgccacagcagcagagcactcgaatgctgccatccgcaaaatggagcgaatgcataagctgctgaaggtatatgagctgttagggggcgaggaggacattgtcagccccaccaaagagctcataaaagaaggccacatccttaagctgtcagcaaagaatgggaccactcaagaccgatacctcatactattcaacgaccgcctcctttactgcgtgcccaggctgcggctccttggccagaagtttagcgtgcgggcacgcattgatgtagatggcatggagctaaaggagagctccaacctcaatctgcctcgaaccttcctggtgtcaggaaagcagcgctccctcgagctccaggccaggactgaggaggagaagaaagactgggtccaggccatcaactccaccctcctgaagcatgaacagacgctggagactttcaaactgttgaactcaacaaacagggaagatgaagacaccccacccaactctccaaacgtggatcttgggaagcgggcacctacgcccatccgggaaaaggaagtcaccatgtgcatgcgctgccaggagcccttcaattctatcaccaaacgcaggcaccactgcaaggcctgcgggcatgtggtttgtgggaagtgctccgagttccgggcccgcctcgtctatgacaacaaccgctccaaccgtgtgtgcactgattgctatgtggccttgcacggggtgcctgggagcagtccagcctgcagccagcatacaccccagcgccggaggtccatcctggagaaacaggcctcagtggctgcagagaacagcgtcatctgcagcttcctgcactacatggagaagggtggcaaaggatggcacaaggcatggttcgtggtccctgaaaatgaacccttggtgctgtatatctacggagcccctcaggatgtgaaagcccagcgcagcctgcccctcattggcttcgaggtgggaccgcccgaggcaggggagcggcctgacagaaggcatgtcttcaagatcacccagagccacctcagctggtacttcagccctgagacagaggaactacagcgacgctggatggctgtgcttggccgggcgggccgaggggacacgttctgcccggggcccacactgtctgaggacagggagatggaggaggcaccggtggctgctttaggagccactgctgaaccccccgaatccccccagacccgagacaagacctagagggtttgggacaaactgggagcccccaccccacactctagttgcccatgtctgattgggggctctagccccttccctcccagctcagtcaatacttgaactcccatcacgggcactttcaatcccgaatgctgggtcttgggttttttaattcatcttttcacaaaacgtgggcttttaaaaaatatattcctacagtgatgtcaatttttattaatccctgtccccagggagggtgggagccgttgccagtcctacctgaattaggtcgtttttctccctcatccctcaataccctaccacagatcctgcctccacccagttccccacaaagcaccagaggtaggagacctggattcaagtgccagctctgccactgaccctggggccccgacccagccctgcctcctcagccagtgtcttcacacgtacaactccacgtggggtggcaactagacctctcctgcctctcccatggcttacagcttctacccggccccaaggctacccagtattttatcgtccagacccatggcagggccagcgggcaggacagggaaacaggggggaggacaatggatactcagttttttgtgtttttttgtgtgtttttttttttttaagaaaaatacagtttatttcaggcttacagtaactt

SEQ ID NO: 282256 - DNA, 1801 bp, Homo sapiens
cttagacatttaatccccacagtaactaatctgcccatgctattgttctctttattttacaaacgaggaaactgaggcccagaggggtcatttgcccaaattacacagcaaatgagtggcagcactggatttttttaaaattaaaaaattggctgggcacagtggctcatgcctgtaatcccagcactttgggaggctgaggcgggtgaatcaccggaggtcgggagttcaggaccagcctgaccaatgtggagaaaccccatctctactaaaaacacaaaattagccaggcatggtggcgcacgcctgcaatcccagctacttggggagggctgaggcagggcaaatcgcttgaacctgggaagcagaggttgcggtgagcccaagatcgcgccattgtactccagcccgggcaacaacagccaaactccgtctcaaaaaaaaaaaaaaaatttaaaaattgtcttttgttattacaaagtaggataagtagaccaatataaacaaaaaataataaaataccgtatcccttctacccaaaagttaccattgtgagggcttatcctatctttctaggcatatatgcacaaacacacattttggagatttttttaaaaacaaatctaggtatttatttaacacttaaaagagtacttactctgtgccaggaactattctaagcactttgcatatattaattcatttaattctcacatcagctctctttgctctccaagtcaatacattttcatctagagctgggattctaagccagacttcattaaccacccacatacccccttaaaaccacaatgctagattacctctcaatgagtgtaggaaatggatgtgatgaaagacagaaaaaagcatgaggcctaaatgtgtgaatggcttgaggaatgaatgctctgactgaagaaagaatgcctgagatccgcacactccttccactggcctgtagaggcagcagccgttgcccaaatgaggcagacgaacctagctttgaatctcagctctagctgattcactgggtggcactggacaaatcactcctgccacctgagcttgagcgtcttcatctgagataggaatagcagtccctacactgaggaggtattaaagctaggaggagccaggctaggccttctgtcaacattgatgcccggtgtctctggccacagaaacaggcctcagtggctgcagagaacagcgtcatctgcagcttcctgcactacatggagaagggtggcaaaggatggcacaaggcatggttcgtggtccctgaaaatgaacccttggtgctgtatatctacggagcccctcaggtatgcatcctactccttcgggtcctttcagccacctggcaaagccagatccagtccttgacctctccttggccttggaagataaggtgagccttggaagataaggtgagcctatctctaagaggaaatcagaaccccaacccttgagagacaaagactggctagagacaaggagtggttgtggtatgtagggaaaaccaggatgagttgtgggcctggcttcctggaaggagtagagatggggaactgctaggtccaatttggagtgggtaagagtatgcagatgggaccgagcgcagtggctcacgcctgtaatcccagcactctgagaggccgaggcaggtggctcacctgagatcaggagttcaagaccagcctggccaacatggtgaaaccccgtctctactaaaaatacaaaaattagcctggcgtggtgacgtgtgcctgtagtcccagctactcaggaagctgag

SEQ ID NO: 282257 - DNA, 1213 bp, Homo sapiens
  misc_feature (35)..(35): n is a, c, g, or t
  misc_feature (188)..(188): n is a, c, g, or t
cggagcccgcggagcagaaagtagctctcgcagcngcaggcggaggacgggtcgacggctaacggacgaagaatggggcccggaccagctatagcactcggcctgacgaaggtcagcaggttgcacaacagctggcttagccgtcagaatcaaacgatgtccattccggacggggtctgtacagcggngttcttaccccacccacatacccccttaaaaccacaatgctagattacctctcaatgagtgtaggaaatggatgtgatgaaagacagaaaaaagcatgaggcctaaatgtgtgaatggcttgaggaatgaatgctctgactgaagaaagaatgcctgagatccgcacactccttccactggcctgtagaggcagcagccgttgcccaaatgaggcagacgaacctagctttgaatctcagctctagctgattcactgggtggcactggacaaatcactcctgccacctgagcttgagcgtcttcatctgagataggaatagcagtccctacactgaggaggtattaaagctaggaggagccaggctaggccttctgtcaacattgatgcccggtgtctctggccacagaaacaggcctcagtggctgcagagaacagcgtcatctgcagcttcctgcactacatggagaagggtggcaaaggatggcacaaggcatggttcgtggtccctgaaaatgaacccttggtgctgtatatctacggagcccctcaggtatgcatcctactccttcgggtcctttcagccacctggcaaagccagatccagtccttgacctctccttggccttggaagataaggtgagccttggaagataaggtgagcctatctctaagaggaaatcagaaccccaacccttgagagacaaagactggctagagacaaggagtggttgtggtatgtagggaaaaccaggatgagttgtgggcctggcttcctggaaggagtagagatggggaactgctaggtccaatttggagtgggtaagagtatgcagatgggaccgagcgcagtggctcacgcctgtaatcccagcactctgagaggccgaggcaggtggctcacctgagatcaggagttcaagaccagcctggccaacatggtgaaaccccgtctctactaaaaatacaaaaattagcctggcgtggtgacgtgtgcctgtagtcccagctactcaggaagctgag

SEQ ID NO: 282258 - DNA, 2497 bp, Homo sapiens
tagcctcgtgtaatcccgaggccatgcccttttggagagaaggagcctgtggagttgactgtgcagcaaaaggtgtttcacattgccaatgagctcctgcaaactgagaaggcctacgtttccaggctccatctcctggatcaggtgttctgtgcccggctgctggaagaagctcggaaccgcagttccttcccggccgacgttgtccacggcatcttctctaacatctgctccatctattgcttccaccagcagttcctgctgcctgagctagagaagcgcatggaggaatgggaccgctatccacgcattggagacatcctgcagaaactggcccccttcctcaagatgtatggtgagtatgtgaagaactttgaccgggccgtggagctggtcaacacctggacagagcgctccacccagtttaaagtcatcatccatgaggtgcagaaggaggaagcctgtggcaacctgacattgcagcaccacatgctggagcctgtgcagcgcatcccccgctatgagcttcttctcaaggactatctgttaaagctgccccatggctccccggacagcaaggatgcccaaaagtctctggagctgatcgccacagcagcagagcactcgaatgctgccatccgcaaaatggagcgaatgcataagctgctgaaggtatatgagctgttagggggcgaggaggacattgtcagccccaccaaagagctcataaaagaaggccacatccttaagctgtcagcaaagaatgggaccactcaagaccgatacctcatactattcaacgaccgcctcctttactgcgtgcccaggctgcggctccttggccagaagtttagcgtgcgggcacgcattgatgtagatggcatggagctaaaggagagctccaacctcaatctgcctcgaaccttcctggtgtcaggaaagcagcgctccctcgagctccaggccaggactgaggaggagaagaaagactgggtccaggccatcaactccaccctcctgaagcatgaacagacgctggagactttcaaactgttgaactcaacaaacagggaagatgaagacaccccacccaactctccaaacgtggatcttgggaagcgggcacctacgcccatccgggaaaaggaagtcaccatgtgcatgcgctgccaggagcccttcaattctatcaccaaacgcaggcaccactgcaaggcctgcgggcatgtggtttgtgggaagtgctccgagttccgggcccgcctcgtctatgacaacaaccgctccaaccgtgtgtgcactgattgctatgtggccttgcacggggtgcctgggagcagtccagcctgcagccagcatacaccccagcgccggaggtccatcctggagaaacaggcctcagtggctgcagagaacagcgtcatctgcagcttcctgcactacatggagaagggtggcaaaggatggcacaaggcatggttcgtggtccctgaaaatgaacccttggtgctgtatatctacggagcccctcaggatgtgaaagcccagcgcagcctgcccctcattggcttcgaggtgggaccgcccgaggcaggggagcggcctgacagaaggcatgtcttcaagatcacccagagccacctcagctggtacttcagccctgagacagaggaactacagcgacgctggatggctgtgcttggccgggcgggccgaggggacacgttctgcccggggcccacactgtctgaggacagggagatggaggaggcaccggtggctgctttaggagccactgctgaaccccccgaatccccccagacccgagacaagacctagagggtttgggacaaactgggagcccccaccccacactctagttgcccatgtctgattgggggctctagccccttccctcccagctcagtcaatacttgaactcccatcacgggcactttcaatcccgaatgctgggtcttgggttttttaattcatcttttcacaaaacgtgggcttttaaaaaatatattcctacagtgatgtcaatttttattaatccctgtccccagggagggtgggagccgttgccagtcctacctgaattaggtcgtttttctccctcatccctcaataccctaccacagatcctgcctccacccagttccccacaaagcaccagaggtaggagacctggattcaagtgccagctctgccactgaccctggggccccgacccagccctgcctcctcagccagtgtcttcacacgtacaactccacgtggggtggcaactagacctctcctgcctctcccatggcttacagcttctacccggccccaaggctacccagtattttatcgtccagacccatggcagggccagcgggcaggacagggaaacaggggggaggacaatggatactcagttttttgtgtttttttgtgtgtttttttttttttaagaaaaatacagtttatttcaggcttacagtaactt

SEQ ID NO: 282259 - DNA, 2292 bp, Homo sapiens
cttagacatttaatccccacagtaactaatctgcccatgctattgttctctttattttacaaacgaggaaactgaggcccagaggggtcatttgcccaaattacacagcaaatgagtggcagcactggatttttttaaaattaaaaaattggctgggcacagtggctcatgcctgtaatcccagcactttgggaggctgaggcgggtgaatcaccggaggtcgggagttcaggaccagcctgaccaatgtggagaaaccccatctctactaaaaacacaaaattagccaggcatggtggcgcacgcctgcaatcccagctacttggggagggctgaggcagggcaaatcgcttgaacctgggaagcagaggttgcggtgagcccaagatcgcgccattgtactccagcccgggcaacaacagccaaactccgtctcaaaaaaaaaaaaaaaatttaaaaattgtcttttgttattacaaagtaggataagtagaccaatataaacaaaaaataataaaataccgtatcccttctacccaaaagttaccattgtgagggcttatcctatctttctaggcatatatgcacaaacacacattttggagatttttttaaaaacaaatctaggtatttatttaacacttaaaagagtacttactctgtgccaggaactattctaagcactttgcatatattaattcatttaattctcacatcagctctctttgctctccaagtcaatacattttcatctagagctgggattctaagccagacttcattaaccacccacatacccccttaaaaccacaatgctagattacctctcaatgagtgtaggaaatggatgtgatgaaagacagaaaaaagcatgaggcctaaatgtgtgaatggcttgaggaatgaatgctctgactgaagaaagaatgcctgagatccgcacactccttccactggcctgtagaggcagcagccgttgcccaaatgaggcagacgaacctagctttgaatctcagctctagctgattcactgggtggcactggacaaatcactcctgccacctgagcttgagcgtcttcatctgagataggaatagcagtccctacactgaggaggtattaaagctaggaggagccaggctaggccttctgtcaacattgatgcccggtgtctctggccacagaaacaggcctcagtggctgcagagaacagcgtcatctgcagcttcctgcactacatggagaagggtggcaaaggatggcacaaggcatggttcgtggtccctgaaaatgaacccttggtgctgtatatctacggagcccctcaggatgtgaaagcccagcgcagcctgcccctcattggcttcgaggtgggaccgcccgaggcaggggagcggcctgacagaaggcatgtcttcaagatcacccagagccacctcagctggtacttcagccctgagacagaggaactacagcgacgctggatggctgtgcttggccgggcgggccgaggggacacgttctgcccggggcccacactgtctgaggacagggagatggaggaggcaccggtggctgctttaggagccactgctgaaccccccgaatccccccagacccgagacaagacctagagggtttgggacaaactgggagcccccaccccacactctagttgcccatgtctgattgggggctctagccccttccctcccagctcagtcaatacttgaactcccatcacgggcactttcaatcccgaatgctgggtcttgggttttttaattcatcttttcacaaaacgtgggcttttaaaaaatatattcctacagtgatgtcaatttttattaatccctgtccccagggagggtgggagccgttgccagtcctacctgaattaggtcgtttttctccctcatccctcaataccctaccacagatcctgcctccacccagttccccacaaagcaccagaggtaggagacctggattcaagtgccagctctgccactgaccctggggccccgacccagccctgcctcctcagccagtgtcttcacacgtacaactccacgtggggtggcaactagacctctcctgcctctcccatggcttacagcttctacccggccccaaggctacccagtattttatcgtccagacccatggcagggccagcgggcaggacagggaaacaggggggaggacaatggatactcagttttttgtgtttttttgtgtgtttttttttttttaagaaaaatacagtttatttcaggcttacagtaactt

SEQ ID NO: 282260 - DNA, 4071 bp, Homo sapiens
cagggctccttcccgcccgccgccgccgagacccaggctgaagctggggaggacggtggagcccggcccaggccgttctcctgcccccgcggctggagcatcgtctgggactactggctgaaggcgagccccgcagcccaagcgcagcgcacacgcgcgccccgcggccaccgccgttctctcttccctcccctcctctcccctcccctctcctccgcccccggcctcggctgcggcgggaggaagaacgcttcccaaccagccaggagagcccagatctattcccattcggggagaaagaagagaccccgcacttggatccgaccgacttctcgccccggggccacggaagtggctcgccgtccaccggagagtccccgccgagcgtagccctccaaccctcgcccaaccgcagccgcatagacagcgctccccagcgggcccccggccccgccgagcccactccccgcgcggggccggggccggggccggcgatgcctggcacggcagcggcggtggccgcggctgctgctgctgctactgccaccgctgccacggctgctggcccgggcccgggctgggggcttgagtctctgcagtggggctgagcccgcagtcccgccccccgatcctgaggccgctgctccgccgggcgccgggcctcctccgcccgcgcctccgccccaggagctggagccaagcggggagctcgggccccgcgcccaggcccggaccatgcatggccaccgagccccgggggggcgccgggccttcggagcccgaacacccggccacgaacccgccgggcgccgctccgccggcctgtgccgactcggaccctggagcctcggaacccggactgctggcgcgcaggggctcaggttcggctcttggcggcccactggatccccagtttgtcggaccctcggacaccagcctgggcgctgctccaggccaccgggtcttgccctgcggtcccagtccacagcaccaccgggccctgcgcttctcttaccacctggagggctcgcagcctcggcctgggctgcaccagggaaaccggatcctggttaaaagtttgtcccttgaccctggccaaagcctagagcctcatccagaaggtccccagcggcttcgctcagacccaggtcccccgactgaaacccctagccagcgtccttcaccactgaagcgggcaccgggcccgaagccacaggtgcccccaaagcccagctacctgcagatgccccggatgccccccccactggagcccatcccccctccaccatcacgcccactgcctgccgacccccgagtggccaagggcctggctcccagggcagaggccagccccagttctgcagcagtatcctcactgattgagaagtttgaaagagagcctgtgattgtcgcctcggatagaccagtccctggccccagcccaggtcccccagagccagtcatgttgccacagccaacctcgcagccaccagtgccccagctccccgagggtgaggcctcccgctgcctgtttctgctggctcctgggccccgggacggtgagaaggtgcccaaccgggacagcggcattgatagcatcagctcgccatccaacagcgaggagacctgcttcgtcagtgatgacgggccccccagccacagcctctgccctgggccccctgccctggctagtgtgcctgttgccttggccgacccccaccggcctggctcccaagaggttgacagtgacctggaggaggaggacgacgaggaggaggaggaagagaaggacagagaaatcccagtgcccctgatggagagacaggagtctgtggagttgactgtgcagcaaaaggtgtttcacattgccaatgagctcctgcaaactgagaaggcctacgtttccaggctccatctcctggatcaggtgttctgtgcccggctgctggaagaagctcggaaccgcagttccttcccggccgacgttgtccacggcatcttctctaacatctgctccatctattgcttccaccagcagttcctgctgcctgagctagagaagcgcatggaggaatgggaccgctatccacgcattggagacatcctgcagaaactggcccccttcctcaagatgtatggtgagtatgtgaagaactttgaccgggccgtggagctggtcaacacctggacagagcgctccacccagtttaaagtcatcatccatgaggtgcagaaggaggaagcctgtggcaacctgacattgcagcaccacatgctggagcctgtgcagcgcatcccccgctatgagcttcttctcaaggactatctgttaaagctgccccatggctccccggacagcaaggatgcccaaaagtctctggagctgatcgccacagcagcagagcactcgaatgctgccatccgcaaaatggagcgaatgcataagctgctgaaggtatatgagctgttagggggcgaggaggacattgtcagccccaccaaagagctcataaaagaaggccacatccttaagctgtcagcaaagaatgggaccactcaagaccgatacctcatactattcaacgaccgcctcctttactgcgtgcccaggctgcggctccttggccagaagtttagcgtgcgggcacgcattgatgtagatggcatggagctaaaggagagctccaacctcaatctgcctcgaaccttcctggtgtcaggaaagcagcgctccctcgagctccaggccaggactgaggaggagaagaaagactgggtccaggccatcaactccaccctcctgaagcatgaacagacgctggagactttcaaactgttgaactcaacaaacagggaagatgaagacaccccacccaactctccaaacgtggatcttgggaagcgggcacctacgcccatccgggaaaaggaagtcaccatgtgcatgcgctgccaggagcccttcaattctatcaccaaacgcaggcaccactgcaaggcctgcgggcatgtggtttgtgggaagtgctccgagttccgggcccgcctcgtctatgacaacaaccgctccaaccgtgtgtgcactgattgctatgtggccttgcacggggtgcctgggagcagtccagcctgcagccagcatacaccccagcgccggaggtccatcctggagaaacaggcctcagtggctgcagagaacagcgtcatctgcagcttcctgcactacatggagaagggtggcaaaggatggcacaaggcatggttcgtggtccctgaaaatgaacccttggtgctgtatatctacggagcccctcaggatgtgaaagcccagcgcagcctgcccctcattggcttcgaggtgggaccgcccgaggcaggggagcggcctgacagaaggcatgtcttcaagatcacccagagccacctcagctggtacttcagccctgagacagaggaactacagcgacgctggatggctgtgcttggccgggcgggccgaggggacacgttctgcccggggcccacactgtctgaggacagggagatggaggaggcaccggtggctgctttaggagccactgctgaaccccccgaatccccccagacccgagacaagacctagagggtttgggacaaactgggagcccccaccccacactctagttgcccatgtctgattgggggctctagccccttccctcccagctcagtcaatacttgaactcccatcacgggcactttcaatcccgaatgctgggtcttgggttttttaattcatcttttcacaaaacgtgggcttttaaaaaatatattcctacagtgatgtcaatttttattaatccctgtccccagggagggtgggagccgttgccagtcctacctgaattaggtcgtttttctccctcatccctcaataccctaccagtattttatcgtccagacccatggcagggccagcgggcaggacagggaaacaggggggaggacaatggatactcagttttttgtgtttttttgtgtgtttttttttttttaagaaaaatacagtttatttcaggcttacagtaactt

SEQ ID NO: 282261 - DNA, 4114 bp, Homo sapiens
cagggctccttcccgcccgccgccgccgagacccaggctgaagctggggaggacggtggagcccggcccaggccgttctcctgcccccgcggctggagcatcgtctgggactactggctgaaggcgagccccgcagcccaagcgcagcgcacacgcgcgccccgcggccaccgccgttctctcttccctcccctcctctcccctcccctctcctccgcccccggcctcggctgcggcgggaggaagaacgcttcccaaccagccaggagagcccagatctattcccattcggggagaaagaagagaccccgcacttggatccgaccgacttctcgccccggggccacggaagtggctcgccgtccaccggagagtccccgccgagcgtagccctccaaccctcgcccaaccgcagccgcatagacagcgctccccagcgggcccccggccccgccgagcccactccccgcgcggggccggggccggggccggcgatgcctggcacggcagcggcggtggccgcggctgctgctgctgctactgccaccgctgccacggctgctggcccgggcccgggctgggggcttgagtctctgcagtggggctgagcccgcagtcccgccccccgatcctgaggccgctgctccgccgggcgccgggcctcctccgcccgcgcctccgccccaggagctggagccaagcggggagctcgggccccgcgcccaggcccggaccatgcatggccaccgagccccgggggggcgccgggccttcggagcccgaacacccggccacgaacccgccgggcgccgctccgccggcctgtgccgactcggaccctggagcctcggaacccggactgctggcgcgcaggggctcaggttcggctcttggcggcccactggatccccagtttgtcggaccctcggacaccagcctgggcgctgctccaggccaccgggtcttgccctgcggtcccagtccacagcaccaccgggccctgcgcttctcttaccacctggagggctcgcagcctcggcctgggctgcaccagggaaaccggatcctggttaaaagtttgtcccttgaccctggccaaagcctagagcctcatccagaaggtccccagcggcttcgctcagacccaggtcccccgactgaaacccctagccagcgtccttcaccactgaagcgggcaccgggcccgaagccacaggtgcccccaaagcccagctacctgcagatgccccggatgccccccccactggagcccatcccccctccaccatcacgcccactgcctgccgacccccgagtggccaagggcctggctcccagggcagaggccagccccagttctgcagcagtatcctcactgattgagaagtttgaaagagagcctgtgattgtcgcctcggatagaccagtccctggccccagcccaggtcccccagagccagtcatgttgccacagccaacctcgcagccaccagtgccccagctccccgagggtgaggcctcccgctgcctgtttctgctggctcctgggccccgggacggtgagaaggtgcccaaccgggacagcggcattgatagcatcagctcgccatccaacagcgaggagacctgcttcgtcagtgatgacgggccccccagccacagcctctgccctgggccccctgccctggctagtgtgcctgttgccttggccgacccccaccggcctggctcccaagaggttgacagtgacctggaggaggaggacgacgaggaggaggaggaagagaaggacagagaaatcccagtgcccctgatggagagacaggagtctgtggagttgactgtgcagcaaaaggtgtttcacattgccaatgagctcctgcaaactgagaaggcctacgtttccaggctccatctcctggatcaggtgttctgtgcccggctgctggaagaagctcggaaccgcagttccttcccggccgacgttgtccacggcatcttctctaacatctgctccatctattgcttccaccagcagttcctgctgcctgagctagagaagcgcatggaggaatgggaccgctatccacgcattggagacatcctgcagaaactggcccccttcctcaagatgtatggtgagtatgtgaagaactttgaccgggccgtggagctggtcaacacctggacagagcgctccacccagtttaaagtcatcatccatgaggtgcagaaggaggaagcctgtggcaacctgacattgcagcaccacatgctggagcctgtgcagcgcatcccccgctatgagcttcttctcaaggactatctgttaaagctgccccatggctccccggacagcaaggatgcccaaaagtctctggagctgatcgccacagcagcagagcactcgaatgctgccatccgcaaaatggagcgaatgcataagctgctgaaggtatatgagctgttagggggcgaggaggacattgtcagccccaccaaagagctcataaaagaaggccacatccttaagctgtcagcaaagaatgggaccactcaagaccgatacctcatactattcaacgaccgcctcctttactgcgtgcccaggctgcggctccttggccagaagtttagcgtgcgggcacgcattgatgtagatggcatggagctaaaggagagctccaacctcaatctgcctcgaaccttcctggtgtcaggaaagcagcgctccctcgagctccaggccaggactgaggaggagaagaaagactgggtccaggccatcaactccaccctcctgaagcatgaacagacgctggagactttcaaactgttgaactcaacaaacagggaagatgaagacaccccacccaactctccaaacgtggatcttgggaagcgggcacctacgcccatccgggaaaaggaagtcaccatgtgcatgcgctgccaggagcccttcaattctatcaccaaacgcaggcaccactgcaaggcctgcgggcatgtggtttgtgggaagtgctccgagttccgggcccgcctcgtctatgacaacaaccgctccaaccgtgtgtgcactgattgctatgtggccttgcacggggtgcctgggagcagtccagcctgcagccagcatacaccccagcgccggaggtccatcctggagaaacaggcctcagtggctgcagagaacagcgtcatctgcagcttcctgcactacatggagaagggtggcaaaggatggcacaaggcatggttcgtggtccctgaaaatgaacccttggtgctgtatatctacggagcccctcaggatgtgaaagcccagcgcagcctgcccctcattggcttcgaggtgggaccgcccgaggcaggggagcggcctgacagaaggcatgtcttcaagatcacccagagccacctcagctggtacttcagccctgagacagaggaactacagcgacgctggatggctgtgcttggccgggcgggccgaggggacacgttctgcccggggcccacactgtctgaggacagggagatggaggaggcaccggtggctgctttaggagccactgctgaaccccccgaatccccccagacccgagacaagacctagagggtttgggacaaactgggagcccccaccccacactctagttgcccatgtctgattgggggctctagccccttccctcccagctcagtcaatacttgaactcccatcacgggcactttcaatcccgaatgctgggtcttgggttttttaattcatcttttcacaaagcaccagaggtaggagacctggattcaagtgccagctctgccactgaccctggggccccgacccagccctgcctcctcagccagtgtcttcacacgtacaactccacgtggggtggcaactagacctctcctgcctctcccatggcttacagcttctacccggccccaaggctacccagtattttatcgtccagacccatggcagggccagcgggcaggacagggaaacaggggggaggacaatggatactcagttttttgtgtttttttgtgtgtttttttttttttaagaaaaatacagtttatttcaggcttacagtaactt

SEQ ID NO: 282262 - DNA, 3789 bp, Homo sapiens
cagggctccttcccgcccgccgccgccgagacccaggctgaagctggggaggacggtggagcccggcccaggccgttctcctgcccccgcggctggagcatcgtctgggactactggctgaaggcgagccccgcagcccaagcgcagcgcacacgcgcgccccgcggccaccgccgttctctcttccctcccctcctctcccctcccctctcctccgcccccggcctcggctgcggcgggaggaagaacgcttcccaaccagccaggagagcccagatctattcccattcggggagaaagaagagaccccgcacttggatccgaccgacttctcgccccggggccacggaagtggctcgccgtccaccggagagtccccgccgagcgtagccctccaaccctcgcccaaccgcagccgcatagacagcgctccccagcgggcccccggccccgccgagcccactccccgcgcggggccggggccggggccggcgatgcctggcacggcagcggcggtggccgcggctgctgctgctgctactgccaccgctgccacggctgctggcccgggcccgggctgggggcttgagtctctgcagtggggctgagcccgcagtcccgccccccgatcctgaggccgctgctccgccgggcgccgggcctcctccgcccgcgcctccgccccaggagctggagccaagcggggagctcgggccccgcgcccaggcccggaccatgcatggccaccgagccccgggggggcgccgggccttcggagcccgaacacccggccacgaacccgccgggcgccgctccgccggcctgtgccgactcggaccctggagcctcggaacccggactgctggcgcgcaggggctcaggttcggctcttggcggcccactggatccccagtttgtcggaccctcggacaccagcctgggcgctgctccaggccaccgggtcttgccctgcggtcccagtccacagcaccaccgggccctgcgcttctcttaccacctggagggctcgcagcctcggcctgggctgcaccagggaaaccggatcctggttaaaagtttgtcccttgaccctggccaaagcctagagcctcatccagaaggtccccagcggcttcgctcagacccaggtcccccgactgaaacccctagccagcgtccttcaccactgaagcgggcaccgggcccgaagccacaggtgcccccaaagcccagctacctgcagatgccccggatgccccccccactggagcccatcccccctccaccatcacgcccactgcctgccgacccccgagtggccaagggcctggctcccagggcagaggccagccccagttctgcagcagtatcctcactgattgagaagtttgaaagagagcctgtgattgtcgcctcggatagaccagtccctggccccagcccaggtcccccagagccagtcatgttgccacagccaacctcgcagccaccagtgccccagctccccgagggtgaggcctcccgctgcctgtttctgctggctcctgggccccgggacggtgagaaggtgcccaaccgggacagcggcattgatagcatcagctcgccatccaacagcgaggagacctgcttcgtcagtgatgacgggccccccagccacagcctctgccctgggccccctgccctggctagtgtgcctgttgccttggccgacccccaccggcctggctcccaagaggttgacagtgacctggaggaggaggacgacgaggaggaggaggaagagaaggacagagaaatcccagtgcccctgatggagagacaggagtctgtggagttgactgtgcagcaaaaggtgtttcacattgccaatgagctcctgcaaactgagaaggcctacgtttccaggctccatctcctggatcaggtgttctgtgcccggctgctggaagaagctcggaaccgcagttccttcccggccgacgttgtccacggcatcttctctaacatctgctccatctattgcttccaccagcagttcctgctgcctgagctagagaagcgcatggaggaatgggaccgctatccacgcattggagacatcctgcagaaactggcccccttcctcaagatgtatggtgagtatgtgaagaactttgaccgggccgtggagctggtcaacacctggacagagcgctccacccagtttaaagtcatcatccatgaggtgcagaaggaggaagcctgtggcaacctgacattgcagcaccacatgctggagcctgtgcagcgcatcccccgctatgagcttcttctcaaggactatctgttaaagctgccccatggctccccggacagcaaggatgcccaaaagtctctggagctgatcgccacagcagcagagcactcgaatgctgccatccgcaaaatggagcgaatgcataagctgctgaaggtatatgagctgttagggggcgaggaggacattgtcagccccaccaaagagctcataaaagaaggccacatccttaagctgtcagcaaagaatgggaccactcaagaccgatacctcatactattcaacgaccgcctcctttactgcgtgcccaggctgcggctccttggccagaagtttagcgtgcgggcacgcattgatgtagatggcatggagctaaaggagagctccaacctcaatctgcctcgaaccttcctggtgtcaggaaagcagcgctccctcgagctccaggccaggactgaggaggagaagaaagactgggtccaggccatcaactccaccctcctgaagcatgaacagacgctggagactttcaaactgttgaactcaacaaacagggaagatgaagacaccccacccaactctccaaacgtggatcttgggaagcgggcacctacgcccatccgggaaaaggaagtcaccatgtgcatgcgctgccaggagcccttcaattctatcaccaaacgcaggcaccactgcaaggcctgcgggcatgtggtttgtgggaagtgctccgagttccgggcccgcctcgtctatgacaacaaccgctccaaccgtgtgtgcactgattgctatgtggccttgcacggggtgcctgggagcagtccagcctgcagccagcatacaccccagcgccggaggtccatcctggagaaacaggcctcagtggctgcagagaacagcgtcatctgcagcttcctgcactacatggagaagggtggcaaaggatggcacaaggcatggttcgtggtccctgaaaatgaacccttggtgctgtatatctacggagcccctcaggtatgcatcctactccttcgggtcctttcagccacctggcaaagccagatccagtccttgacctctccttggccttggaagataaggtgagccttggaagataaggtgagcctatctctaagaggaaatcagaaccccaacccttgagagacaaagactggctagagacaaggagtggttgtggtatgtagggaaaaccaggatgagttgtgggcctggcttcctggaaggagtagagatggggaactgctaggtccaatttggagtgggtaagagtatgcagatgggaccgagcgcagtggctcacgcctgtaatcccagcactctgagaggccgaggcaggtggctcacctgagatcaggagttcaagaccagcctggccaacatggtgaaaccccgtctctactaaaaatacaaaaattagcctggcgtggtgacgtgtgcctgtagtcccagctactcaggaagctgag

SEQ ID NO: 282263 - DNA, 1987 bp, Homo sapiens
cagggctccttcccgcccgccgccgccgagacccaggctgaagctggggaggacggtggagcccggcccaggccgttctcctgcccccgcggctggagcatcgtctgggactactggctgaaggcgagccccgcagcccaagcgcagcgcacacgcgcgccccgcggccaccgccgttctctcttccctcccctcctctcccctcccctctcctccgcccccggcctcggctgcggcgggaggaagaacgcttcccaaccagccaggagagcccagatctattcccattcggggagaaagaagagaccccgcacttggatccgaccgacttctcgccccggggccacggaagtggctcgccgtccaccggagagtccccgccgagcgtagccctccaaccctcgcccaaccgcagccgcatagacagcgctccccagcgggcccccggccccgccgagcccactccccgcgcggggccggggccggggccggcgatgcctggcacggcagcggcggtggccgcggctgctgctgctgctactgccaccgctgccacggctgctggcccgggcccgggctgggggcttgagtctctgcagtggggctgagcccgcagtcccgccccccgatcctgaggccgctgctccgccgggcgccgggcctcctccgcccgcgcctccgccccaggagctggagccaagcggggagctcgggccccgcgcccaggcccggaccatgcatggccaccgagccccgggggggcgccgggccttcggagcccgaacacccggccacgaacccgccgggcgccgctccgccggcctgtgccgactcggaccctggagcctcggaacccggactgctggcgcgcaggggctcaggttcggctcttggcggcccactggatccccagtttgtcggaccctcggacaccagcctgggcgctgctccaggccaccgggtcttgccctgcggtcccagtccacagcaccaccgggccctgcgcttctcttaccacctggagggctcgcagcctcggcctgggctgcaccagggaaaccggatcctggttaaaagtttgtcccttgaccctggccaaagcctagagcctcatccagaaggtccccagcggcttcgctcagacccaggtcccccgactgaaacccctagccagcgtccttcaccactgaagcgggcaccgggcccgaagccacaggtgcccccaaagcccagctacctgcagatgccccggatgccccccccactggagcccatcccccctccaccatcacgcccactgcctgccgacccccgagtggccaagggcctggctcccagggcagaggccagccccagttctgcagcagtatcctcactgattgagaagtttgaaagagagcctgtgattgtcgcctcggatagaccagtccctggccccagcccaggtcccccagagccagtcatgttgccacagccaacctcgcagccaccagtgccccagctccccgagggtgaggcctcccgctgcctgtttctgctggctcctgggccccgggacggtgagaaggtgcccaaccgggacagcggcattgatagcatcagctcgccatccaacagcgaggagacctgcttcgtcagtgatgacgggccccccagccacagcctctgccctgggccccctgccctggctagtgtgcctgttgccttggccgacccccaccggcctggctcccaagaggttgacagtgacctggaggaggaggacgacgaggaggaggaggaagagaaggacagagaaatcccatggcttacagcttctacccggccccaaggctacccagtattttatcgtccagacccatggcagggccagcgggcaggacagggaaacaggggggaggacaatggatactcagttttttgtgtttttttgtgtgtttttttttttttaagaaaaatacagtttatttcaggcttacagtaactt

SEQ ID NO: 282264 - DNA, 298 bp, Homo sapiens
gtaagtggtcaagctggaaggagcagacttggggaggagaggtctgcagggatgtggtggggcatctgcagccagatctgagcccctctgcttctgcctgtcacagaaggaggaagcctgtggcaacctgacattgcagcaccacatgctggagcctgtgcagcgcatcccccgctatgagcttcttctcaaggactatctgttaaagctgccccatggctccccggacagcaaggatgcccaaagtgagtgtgtgcacccaggccccttcctacttctccacactaatagctctagg

SEQ ID NO: 282265 - DNA, 314 bp, Homo sapiens
gtctgacgactcagacctgacttgctcaggagagccagcccgatccggtccactttcttgaggtctgacgtccaatccacctcactgggttccaacagatctccacttttggaggaaggatcttcacttgatctaagcctattccttggacagggctgggctggcttgaataactgtggtgctcatctcattggtggtatcactctgagtgtgacaaaattttaaaaataatcagataaactgaatacaacaaattcaagtcatgctgatataaactcgggtaatgtaataaaggaatctacacgggttatctt

SEQ ID NO: 282266 - DNA, 581 bp, Homo sapiens
gcaggacagagttttacttccttggtctgatgtaattttactttcacccctgtcttactttgagacaccaaacagtctggatgtttcaccagtcctgtacttttgaaagttagatatgttggaatcccttccgtattctagaaagaaactctagtttcttcaagatcttaggtcaattttctgaatttctattttggtgaagaaagtattctcattttctcctatcgtccagtgtcaaaggtgccttgttgacccatttagcccctgccagtccttgcactgttggaaataagccatttatcttcttccttccctgctgctgaacatatcttgcctgtgtctctctgtggccagaactccgcactttatacctcaaagagagaaggaagagaaaggggtgggagagtggaaaggcaggagcaacaaggacatgacctccccagttaagccccccagctatgcctgtgatacccgctgagcaggccagctggagcctgtgtgtgcttgggtagcagaaaggcagtcctattctgtggatctcaaggatggcatgcggtgtcctttttccagggaattgtact

SEQ ID NO: 282267 - DNA, 675 bp, Homo sapiens
aggtagcaaggcagccccctctgataaccacgatgaggctcctctcccttccctttctgcccccattgtcggagtatctgctggagtgaggtacggatggaggagctggctgactgcagtgagggaaaagctccctgtggccacaaaccctccccaagcacacactccaggctgcacacgactctgcctcttgttagctgggcagccttgggcaagggggagaactgactccagcctcagtttctttctctctacatggggatcctcctccttccttaggttgccaagaggatgaaagtcacaagtgggcgtggcagggctttgttccttctgaagctcaggacaaagcactgggcttccctcctgcctgggagccttcaggacggcatggagtttggccacgtggtgggagcgccctgagtgcgtggcacagaatgttcaactggttacctctcctgagcctcacagcctctcaaggaagatctgaggaggaaactgaggcccacccccacccagactgaggggcaggactcactgcaagtggcctcggactcatcggagccatcaggacactcctcctcgccgtcacacttccaccgttcgtggatgcagtggccgttgtcacaggtgaagtcactgtctgcacaggtcttcttggctgcagggcaaggaaga

SEQ ID NO: 282268 - DNA, 2498 bp, Homo sapiens
gtagtgacggggattgttgtgttgcagaaatccggcaatcgacctgaggacttgcgagccgctcagctcccgggacgtttggagctgctgctaaataatttctgctcagccatgtcgccggctccagatgcagccccggctcctgcgtcgatctccctgtttgacctcagcgcggatgctccggtctttcagggcctgagcctggtgagccacgcgcctggggaggctctggcccgggctccgcgtacttcctgttcaggctcaggggagagagaaagcccagaaagaaagctactccagggtcctatggatatttcagagaagttattttgttcaacttgtgaccagaccttccagaaccaccaagaacagagggaacattataagcttgactggcatcggtttaacctaaagcaacgtctcaaggacaagcctctcctgtctgccctggactttgaaaagcagagctccacaggagatctttccagcatctcgggatcagaagactcagactcagccagtgaggaggacttgcagacactggatcgggagagggctacatttgagaagttgagccgacccccaggcttttaccctcatcgagttcttttccagaatgcccagggccagtttctttatgcctaccgctgtgtcctaggccctcatcaggatcccccagaagaggcagaactgctgctacagaacctgcaaagtagaggtcccagagactgcgtggtgctcatggctgcagctgggcactttgctggtgctatatttcaaggaagagaagtggtgacacacaaaacttttcaccgctatacggttcgggccaagcggggcacagcccaggggcttcgggatgcccgaggtgggccatcacactctgctggagccaacctgaggcgctacaatgaagccacactatataaggatgttcgtgacctgctggcagggccaagctgggctaaggcgctggaggaggctggtacaatactgttgcgtgctccccgctctggccggtctttgttctttggaggcaagggagcacccctgcaaaggggggatccccgactttgggatatccccctcgccacccgcagacccaccttccaagagctacagcgtgtgctccataagctgaccactttgcatgtctatgaagaagaccctcgggaagcagtcagactgcactcacctcagacacactggaaaacagtaagagaggagagaaagaagcctactgaggaagaaataagaaagatctgcagggatgaaaaggaagcgctggggcagaatgaggaatctcccaaacagggttcagggtcggagggagaagatggctttcaggtagagttggagctagtggagttgactgtggggactctggatctttgtgagtctgaagtattgcccaagcggaggaggagaaaaaggaataagaaggagaaaagccgagaccaggaggctggggcacatcggactcttctccagcaaactcaagaagaggagccttccacacagtcatcccaggcagttgctgcccccttgggccctttgctggatgaggccaaagcccctggtcagccagagctctggaatgcactgcttgctgcttgccgagctggagatgttggagtgctaaagctgcagctagctcccagccctgcagaccctagagttctgtctctgctcagtgcccccttgggctccggtggctttactctcctgcatgcagcagctgcagctggaagaggctcagtggttcgtctgctgctggaagcaggtgctgaccccactgtgcaggactctcgggcccggccaccttatactgttgcggctgacaaatcaacacgtaatgagttccgaaggttcatggagaagaatccagatgcctacgattacaacaaggctcaggtgccaggaccattgacaccagaaatggaggcacggcaggctacacggaaaagggagcagaaggcagcccggcggcaacgggaggaacagcagcagaggcagcaggagcaggaggagcgtgaacgagaagagcagcggcgatttgccgccctcagtgaccgagagaagagagctctggctgcagagcgccgactcgctgcccagttgggagcccctacctctccaatccctgactctgcaatcgtcaatactcgacgctgctggagttgtggggcatccctccaaggcctgactccctttcactacctcgacttctctttctgctccacacgttgcctccaggatcatcgccgtcaggcagggaggccctcttcctgatctcttacagctctacctggggccaactcagggacctgagagggcacattcacagcagccctaggttttttcttccccgtgaaaccagagatgatttggaagatgggggtgaaggacactcgggaactagggcaaagacagggctagaggtatgtggagctggtactgtctctggaattttaatcacaataaagtttggcaaggaa

SEQ ID NO: 282269 - DNA, 409 bp, Homo sapiens
gcttctcttccttcctgttggttgtggattggaaagtttctggggtacctgtccagccatttttcttcctcttgttcagacgctgctggagttgtggggcatccctccaaggcctgactccctttcactacctcgacttctctttctgctccacacgttgcctccaggatcatcgccgtcaggcagggaggccctcttcctgatctcttacagctctacctggggccaactcagggacctgagagggcacattcacagcagccctaggttttttcttccccgtgaaaccagagatgatttggaagatgggggtgaaggacactcgggaactagggcaaagacagggctagaggtatgtggagctggtactgtctctggaattttaatcacaataaagtttggcaaggaa

SEQ ID NO: 282270 - DNA, 574 bp, Homo sapiens
ctgctttgtatatcacactctgaatataattcttgtcactgtggatttgggctccctttctatgtccaattcctcttcccttatttaggctcaggggagagagaaagcccagaaagaaagctactccagggtcctatggatatttcagagaagttattttgttcaacttgtgaccagaccttccagaaccaccaagaacagagggaacattataagcttgactggcatcggtttaacctaaagcaacgtctcaaggacaagcctctcctgtctgccctggactttgaaaagcagagctccacaggagatctttccagcatctcgggatcagaagactcagactcagccagtgaggaggacttgcagacactggatcgggagagggctacatttgagaagttgagccgacccccaggcttttaccctcatcgagttcttttccagaatgcccagggccagtttctttatgcctaccgctgtgtcctaggccctcatcaggcaagtgacagtacaggttgcatggctaaccccaaccttttgtacacccagcctagatttcccttagcctagtgca

SEQ ID NO: 282271 - DNA, 215 bp, Homo sapiens
taccgactcgagcttggtaccctcgataagggcaactcagggacctgagagggcacattcacagcagccctaggttttttcttccccgtgaaaccagagatgatttggaagatgggggtgaaggacactcgggaactagggcaaagacagggctagaggtatgtggagctggtactgtctctggaattttaatcacaataaagtttggcaaggaa

SEQ ID NO: 282272 - DNA, 204 bp, Homo sapiens
ctgttctctccaacctaagcctccattctcattggtatatccagaggattttctaagccttggactgcagcccagctacatctgcattgagagaaacctgcgctagcttctcctcagctaaggttgagaaagatcttttcttttatggcagaagaagaccctcgggaagcagtcagactgccataaaaaaaaagttggcggccg

SEQ ID NO: 282273 - DNA, 2509 bp, Homo sapiens
agttattgcagtggaggctgggttgaatcggccgagggaaatccggcaatcgacctgaggacttgcgagccgctcagctcccgggacgtttggagctgctgctaaataatttctgctcagccatgtcgccggctccagatgcagccccggctcctgcgtcgatctccctgtttgacctcagcgcggatgctccggtctttcagggcctgagcctggtgagccacgcgcctggggaggctctggcccgggctccgcgtacttcctgttcaggctcaggggagagagaaagcccagaaagaaagctactccagggtcctatggatatttcagagaagttattttgttcaacttgtgaccagaccttccagaaccaccaagaacagagggaacattataagcttgactggcatcggtttaacctaaagcaacgtctcaaggacaagcctctcctgtctgccctggactttgaaaagcagagctccacaggagatctttccagcatctcgggatcagaagactcagactcagccagtgaggaggacttgcagacactggatcgggagagggctacatttgagaagttgagccgacccccaggcttttaccctcatcgagttcttttccagaatgcccagggccagtttctttatgcctaccgctgtgtcctaggccctcatcaggatcccccagaagaggcagaactgctgctacagaacctgcaaagtagaggtcccagagactgcgtggtgctcatggctgcagctgggcactttgctggtgctatatttcaaggaagagaagtggtgacacacaaaacttttcaccgctatacggttcgggccaagcggggcacagcccaggggcttcgggatgcccgaggtgggccatcacactctgctggagccaacctgaggcgctacaatgaagccacactatataaggatgttcgtgacctgctggcagggccaagctgggctaaggcgctggaggaggctggtacaatactgttgcgtgctccccgctctggccggtctttgttctttggaggcaagggagcacccctgcaaaggggggatccccgactttgggatatccccctcgccacccgcagacccaccttccaagagctacagcgtgtgctccataagctgaccactttgcatgtctatgaagaagaccctcgggaagcagtcagactgcactcacctcagacacactggaaaacagtaagagaggagagaaagaagcctactgaggaagaaataagaaagatctgcagggatgaaaaggaagcgctggggcagaatgaggaatctcccaaacagggttcagggtcggagggagaagatggctttcaggtagagttggagctagtggagttgactgtggggactctggatctttgtgagtctgaagtattgcccaagcggaggaggagaaaaaggaataagaaggagaaaagccgagaccaggaggctggggcacatcggactcttctccagcaaactcaagaagaggagccttccacacagtcatcccaggcagttgctgcccccttgggccctttgctggatgaggccaaagcccctggtcagccagagctctggaatgcactgcttgctgcttgccgagctggagatgttggagtgctaaagctgcagctagctcccagccctgcagaccctagagttctgtctctgctcagtgcccccttgggctccggtggctttactctcctgcatgcagcagctgcagctggaagaggctcagtggttcgtctgctgctggaagcaggtgctgaccccactgtgcaggactctcgggcccggccaccttatactgttgcggctgacaaatcaacacgtaatgagttccgaaggttcatggagaagaatccagatgcctacgattacaacaaggctcaggtgccaggaccattgacaccagaaatggaggcacggcaggctacacggaaaagggagcagaaggcagcccggcggcaacgggaggaacagcagcagaggcagcaggagcaggaggagcgtgaacgagaagagcagcggcgatttgccgccctcagtgaccgagagaagagagctctggctgcagagcgccgactcgctgcccagttgggagcccctacctctccaatccctgactctgcaatcgtcaatactcgacgctgctggagttgtggggcatccctccaaggcctgactccctttcactacctcgacttctctttctgctccacacgttgcctccaggatcatcgccgtcaggcagggaggccctcttcctgatctcttacagctctacctggggccaactcagggacctgagagggcacattcacagcagccctaggttttttcttccccgtgaaaccagagatgatttggaagatgggggtgaaggacactcgggaactagggcaaagacagggctagaggtatgtggagctggtactgtctctggaattttaatcacaataaagtttggcaaggaa

SEQ ID NO: 282274 - DNA, 3318 bp, Homo sapiens
gtagtgacggggattgttgtgttgcagaaatccggcaatcgacctgaggacttgcgagccgctcagctcccgggacgtttggagctgctgctaaataatttctgctcagccatgtcgccggctccagatgcagccccggctcctgcgtcgatctccctgtttgacctcagcgcggatgctccggtctttcagggcctgagcctggtgagccacgcgcctggggaggctctggcccgggctccgcgtacttcctgttcaggctcaggggagagagaaagcccagaaagaaagctactccagggtcctatggatatttcagagaagttattttgttcaacttgtgaccagaccttccagaaccaccaagaacagagggaacattataagcttgactggcatcggtttaacctaaagcaacgtctcaaggacaagcctctcctgtctgccctggactttgaaaagcagagctccacaggagatctttccagcatctcgggatcagaagactcagactcagccagtgaggaggacttgcagacactggatcgggagagggctacatttgagaagttgagccgacccccaggcttttaccctcatcgagttcttttccagaatgcccagggccagtttctttatgcctaccgctgtgtcctaggccctcatcaggatcccccagaagaggcagaactgctgctacagaacctgcaaagtagaggtcccagagactgcgtggtgctcatggctgcagctgggcactttgctggtgctatatttcaaggaagagaagtggtgacacacaaaacttttcaccgctatacggttcgggccaagcggggcacagcccaggggcttcgggatgcccgaggtgggccatcacactctgctggagccaacctgaggcgctacaatgaagccacactatataaggatgttcgtgacctgctggcagggccaagctgggctaaggcgctggaggaggctggtacaatactgttgcgtgctccccgctctggccggtctttgttctttggaggcaagggagcacccctgcaaaggggggatccccgactttgggatatccccctcgccacccgcagacccaccttccaagagctacagcgtgtgctccataagctgaccactttgcatgtctatgaagaagaccctcgggaagcagtcagactgcactcacctcagacacactggaaaacagtaagagaggagagaaagaagcctactgaggaagaaataagaaagatctgcagggatgaaaaggaagcgctggggcagaatgaggaatctcccaaacagggtttgattactatctggcaactgtcagatctgagtttctgtcctaaaaatgcactggcaaattccctactctcataactgacccatttccttatttaaacacacacccacagtgtctatcttagcaattactgagacatgtttagtgacctttccaaatctattatctcttttgttatggatgtttccccagagctaagaaaatctttgtgtggagcagatgcgtggatgtgttgcatggatctcacatagtttatctttgattggatgctgtggtttgaggctgagggctgcttccatgctttcctctattgtgcggcaccctaaggctactcatacggagagtccagggacttgttcttgtctgggctgagagcctcatttctgcatgtgatataatggactcagctcttgatgtgctacttttatctgggtgacaaaataaaaacaatttcatttcaggctttcattcttatgcatctgcttctaccctctgagtactccctagatggatttcacatgtcaggtttttccctaggttcagggtcggagggagaagatggctttcaggtagagttggagctagtggagttgactgtggggactctggatctttgtgagtctgaagtattgcccaagcggaggaggagaaaaaggaataagaaggagaaaagccgagaccaggaggctggggcacatcggactcttctccagcaaactcaagaagaggagccttccacacagtcatcccaggcagttgctgcccccttgggccctttgctggatgaggccaaagcccctggtcagccagagctctggaatgcactgcttgctgcttgccgagctggagatgttggagtgctaaagctgcagctagctcccagccctgcagaccctagagttctgtctctgctcagtgcccccttgggctccggtggctttactctcctgcatgcagcagctgcagctggaagaggctcagtggttcgtctgctgctggaagcaggtgctgaccccactgtgcagtgagtaaaggtccccatcctgagtcattttgggtatagagaggataatttggaggttaaagttggcattggctacttggcaatattcccttggtctggttgggtgatgttgggaaaggcaggaggcaagttaaacccatttttggagtttttgcacctagggactctcgggcccggccaccttatactgttgcggctgacaaatcaacacgtaatgagttccgaaggttcatggagaagaatccagatgcctacgattacaacaaggctcaggtcatctggaataggaaggacaagcagagtgggaaggcatcacagatcctggctagatcctttctacttcttgcagttttaccaaagataacttatagggtcttatatttgaaatcctccaggtgccaggaccattgacaccagaaatggaggcacggcaggctacacggaaaagggagcagaaggcagcccggcggcaacgggaggaacagcagcagaggcagcaggagcaggaggagcgtgaacgagaagagcagcggcgatttgccgccctcagtgaccgagagaagagagctctggctgcagagcgccgactcgctgcccagttgggagcccctacctctccaatccctgactctgcaatcgtcaatactcgacgctgctggagttgtggggcatccctccaaggcctgactccctttcactacctcgacttctctttctgctccacacgttgcctccaggatcatcgccgtcaggcagggaggccctcttcctgatctcttacagctctacctggggccaactcagggacctgagagggcacattcacagcagccctaggttttttcttccccgtgaaaccagagatgatttggaagatgggggtgaaggacactcgggaactagggcaaagacagggctagaggtatgtggagctggtactgtctctggaattttaatcacaataaagtttggcaaggaa

SEQ ID NO: 282275 - DNA, 3196 bp, Homo sapiens
gtagtgacggggattgttgtgttgcagaaatccggcaatcgacctgaggacttgcgagccgctcagctcccgggacgtttggagctgctgctaaataatttctgctcagccatgtcgccggctccagatgcagccccggctcctgcgtcgatctccctgtttgacctcagcgcggatgctccggtctttcagggcctgagcctggtgagccacgcgcctggggaggctctggcccgggctccgcgtacttcctgttcaggctcaggggagagagaaagcccagaaagaaagctactccagggtcctatggatatttcagagaagttattttgttcaacttgtgaccagaccttccagaaccaccaagaacagagggaacattataagcttgactggcatcggtttaacctaaagcaacgtctcaaggacaagcctctcctgtctgccctggactttgaaaagcagagctccacaggagatctttccagcatctcgggatcagaagactcagactcagccagtgaggaggacttgcagacactggatcgggagagggctacatttgagaagttgagccgacccccaggcttttaccctcatcgagttcttttccagaatgcccagggccagtttctttatgcctaccgctgtgtcctaggccctcatcaggatcccccagaagaggcagaactgctgctacagaacctgcaaagtagaggtcccagagactgcgtggtgctcatggctgcagctgggcactttgctggtgctatatttcaaggaagagaagtggtgacacacaaaacttttcaccgctatacggttcgggccaagcggggcacagcccaggggcttcgggatgcccgaggtgggccatcacactctgctggagccaacctgaggcgctacaatgaagccacactatataaggatgttcgtgacctgctggcagggccaagctgggctaaggcgctggaggaggctggtacaatactgttgcgtgctccccgctctggccggtctttgttctttggaggcaagggagcacccctgcaaaggggggatccccgactttgggatatccccctcgccacccgcagacccaccttccaagagctacagcgtgtgctccataagctgaccactttgcatgtctatgaagaagaccctcgggaagcagtcagactgcactcacctcagacacactggaaaacagtaagagaggagagaaagaagcctactgaggaagaaataagaaagatctgcagggatgaaaaggaagcgctggggcagaatgaggaatctcccaaacagggtttgattactatctggcaactgtcagatctgagtttctgtcctaaaaatgcactggcaaattccctactctcataactgacccatttccttatttaaacacacacccacagtgtctatcttagcaattactgagacatgtttagtgacctttccaaatctattatctcttttgttatggatgtttccccagagctaagaaaatctttgtgtggagcagatgcgtggatgtgttgcatggatctcacatagtttatctttgattggatgctgtggtttgaggctgagggctgcttccatgctttcctctattgtgcggcaccctaaggctactcatacggagagtccagggacttgttcttgtctgggctgagagcctcatttctgcatgtgatataatggactcagctcttgatgtgctacttttatctgggtgacaaaataaaaacaatttcatttcaggctttcattcttatgcatctgcttctaccctctgagtactccctagatggatttcacatgtcaggtttttccctaggttcagggtcggagggagaagatggctttcaggtagagttggagctagtggagttgactgtggggactctggatctttgtgagtctgaagtattgcccaagcggaggaggagaaaaaggaataagaaggagaaaagccgagaccaggaggctggggcacatcggactcttctccagcaaactcaagaagaggagccttccacacagtcatcccaggcagttgctgcccccttgggccctttgctggatgaggccaaagcccctggtcagccagagctctggaatgcactgcttgctgcttgccgagctggagatgttggagtgctaaagctgcagctagctcccagccctgcagaccctagagttctgtctctgctcagtgcccccttgggctccggtggctttactctcctgcatgcagcagctgcagctggaagaggctcagtggttcgtctgctgctggaagcaggtgctgaccccactgtgcagtgagtaaaggtccccatcctgagtcattttgggtatagagaggataatttggaggttaaagttggcattggctacttggcaatattcccttggtctggttgggtgatgttgggaaaggcaggaggcaagttaaacccatttttggagtttttgcacctagggactctcgggcccggccaccttatactgttgcggctgacaaatcaacacgtaatgagttccgaaggttcatggagaagaatccagatgcctacgattacaacaaggctcaggtgccaggaccattgacaccagaaatggaggcacggcaggctacacggaaaagggagcagaaggcagcccggcggcaacgggaggaacagcagcagaggcagcaggagcaggaggagcgtgaacgagaagagcagcggcgatttgccgccctcagtgaccgagagaagagagctctggctgcagagcgccgactcgctgcccagttgggagcccctacctctccaatccctgactctgcaatcgtcaatactcgacgctgctggagttgtggggcatccctccaaggcctgactccctttcactacctcgacttctctttctgctccacacgttgcctccaggatcatcgccgtcaggcagggaggccctcttcctgatctcttacagctctacctggggccaactcagggacctgagagggcacattcacagcagccctaggttttttcttccccgtgaaaccagagatgatttggaagatgggggtgaaggacactcgggaactagggcaaagacagggctagaggtatgtggagctggtactgtctctggaattttaatcacaataaagtttggcaaggaa

SEQ ID NO: 282276 - DNA, 2923 bp, Homo sapiens
gtagtgacggggattgttgtgttgcagaaatccggcaatcgacctgaggacttgcgagccgctcagctcccgggacgtttggagctgctgctaaataatttctgctcagccatgtcgccggctccagatgcagccccggctcctgcgtcgatctccctgtttgacctcagcgcggatgctccggtctttcagggcctgagcctggtgagccacgcgcctggggaggctctggcccgggctccgcgtacttcctgttcaggctcaggggagagagaaagcccagaaagaaagctactccagggtcctatggatatttcagagaagttattttgttcaacttgtgaccagaccttccagaaccaccaagaacagagggaacattataagcttgactggcatcggtttaacctaaagcaacgtctcaaggacaagcctctcctgtctgccctggactttgaaaagcagagctccacaggagatctttccagcatctcgggatcagaagactcagactcagccagtgaggaggacttgcagacactggatcgggagagggctacatttgagaagttgagccgacccccaggcttttaccctcatcgagttcttttccagaatgcccagggccagtttctttatgcctaccgctgtgtcctaggccctcatcaggatcccccagaagaggcagaactgctgctacagaacctgcaaagtagaggtcccagagactgcgtggtgctcatggctgcagctgggcactttgctggtgctatatttcaaggaagagaagtggtgacacacaaaacttttcaccgctatacggttcgggccaagcggggcacagcccaggggcttcgggatgcccgaggtgggccatcacactctgctggagccaacctgaggcgctacaatgaagccacactatataaggatgttcgtgacctgctggcagggccaagctgggctaaggcgctggaggaggctggtacaatactgttgcgtgctccccgctctggccggtctttgttctttggaggcaagggagcacccctgcaaaggggggatccccgactttgggatatccccctcgccacccgcagacccaccttccaagagctacagcgtgtgctccataagctgaccactttgcatgtctatgaagaagaccctcgggaagcagtcagactgcactcacctcagacacactggaaaacagtaagagaggagagaaagaagcctactgaggaagaaataagaaagatctgcagggatgaaaaggaagcgctggggcagaatgaggaatctcccaaacagggtttgattactatctggcaactgtcagatctgagtttctgtcctaaaaatgcactggcaaattccctactctcataactgacccatttccttatttaaacacacacccacagtgtctatcttagcaattactgagacatgtttagtgacctttccaaatctattatctcttttgttatggatgtttccccagagctaagaaaatctttgtgtggagcagatgcgtggatgtgttgcatggatctcacatagtttatctttgattggatgctgtggtttgaggctgagggctgcttccatgctttcctctattgtgcggcaccctaaggctactcatacggagagtccagggacttgttcttgtctgggctgagagcctcatttctgcatgtgatataatggactcagctcttgatgtgctacttttatctgggtgacaaaataaaaacaatttcatttcaggctttcattcttatgcatctgcttctaccctctgagtactccctagatggatttcacatgtcaggtttttccctaggttcagggtcggagggagaagatggctttcaggtagagttggagctagtggagttgactgtggggactctggatctttgtgagtctgaagtattgcccaagcggaggaggagaaaaaggaataagaaggagaaaagccgagaccaggaggctggggcacatcggactcttctccagcaaactcaagaagaggagccttccacacagtcatcccaggcagttgctgcccccttgggccctttgctggatgaggccaaagcccctggtcagccagagctctggaatgcactgcttgctgcttgccgagctggagatgttggagtgctaaagctgcagctagctcccagccctgcagaccctagagttctgtctctgctcagtgcccccttgggctccggtggctttactctcctgcatgcagcagctgcagctggaagaggctcagtggttcgtctgctgctggaagcaggtgctgaccccactgtgcagtgccaggaccattgacaccagaaatggaggcacggcaggctacacggaaaagggagcagaaggcagcccggcggcaacgggaggaacagcagcagaggcagcaggagcaggaggagcgtgaacgagaagagcagcggcgatttgccgccctcagtgaccgagagaagagagctctggctgcagagcgccgactcgctgcccagttgggagcccctacctctccaatccctgactctgcaatcgtcaatactcgacgctgctggagttgtggggcatccctccaaggcctgactccctttcactacctcgacttctctttctgctccacacgttgcctccaggatcatcgccgtcaggcagggaggccctcttcctgatctcttacagctctacctggggccaactcagggacctgagagggcacattcacagcagccctaggttttttcttccccgtgaaaccagagatgatttggaagatgggggtgaaggacactcgggaactagggcaaagacagggctagaggtatgtggagctggtactgtctctggaattttaatcacaataaagtttggcaaggaa

SEQ ID NO: 282277 - DNA, 3602 bp, Homo sapiens
gtagtgacggggattgttgtgttgcagaaatccggcaatcgacctgaggacttgcgagccgctcagctcccgggacgtttggagctgctgctaaataatttctgctcagccatgtcgccggctccagatgcagccccggctcctgcgtcgatctccctgtttgacctcagcgcggatgctccggtctttcagggcctgagcctggtgagccacgcgcctggggaggctctggcccgggctccgcgtacttcctgttcaggctcaggggagagagaaagcccagaaagaaagctactccagggtcctatggatatttcagagaagttattttgttcaacttgtgaccagaccttccagaaccaccaagaacagagggaacattataagcttgactggcatcggtttaacctaaagcaacgtctcaaggacaagcctctcctgtctgccctggactttgaaaagcagagctccacaggagatctttccagcatctcgggatcagaagactcagactcagccagtgaggaggacttgcagacactggatcgggagagggctacatttgagaagttgagccgacccccaggcttttaccctcatcgagttcttttccagaatgcccagggccagtttctttatgcctaccgctgtgtcctaggccctcatcaggatcccccagaagaggcagaactgctgctacagaacctgcaaagtagaggtcccagagactgcgtggtgctcatggctgcagctgggcactttgctggtgctatatttcaaggaagagaagtggtgacacacaaaacttttcaccgctatacggttcgggccaagcggggcacagcccaggggcttcgggatgcccgaggtgggccatcacactctgctggagccaacctgaggcgctacaatgaagccacactatataaggatgttcgtgacctgctggcagggccaagctgggctaaggcgctggaggaggctggtacaatactgttgcgtgctccccgctctggccggtctttgttctttggaggcaagggagcacccctgcaaaggggggatccccgactttgggatatccccctcgccacccgcagacccaccttccaagagctacagcgtgtgctccataagctgaccactttgcatgtctatgaagaagaccctcgggaagcagtcagactgcactcacctcagacacactggaaaacagtaagagaggagagaaagaagcctactgaggaagaaataagaaagatctgcagggatgaaaaggaagcgctggggcagaatgaggaatctcccaaacagggtttgattactatctggcaactgtcagatctgagtttctgtcctaaaaatgcactggcaaattccctactctcataactgacccatttccttatttaaacacacacccacagtgtctatcttagcaattactgagacatgtttagtgacctttccaaatctattatctcttttgttatggatgtttccccagagctaagaaaatctttgtgtggagcagatgcgtggatgtgttgcatggatctcacatagtttatctttgattggatgctgtggtttgaggctgagggctgcttccatgctttcctctattgtgcggcaccctaaggctactcatacggagagtccagggacttgttcttgtctgggctgagagcctcatttctgcatgtgatataatggactcagctcttgatgtgctacttttatctgggtgacaaaataaaaacaatttcatttcaggctttcattcttatgcatctgcttctaccctctgagtactccctagatggatttcacatgtcaggtttttccctaggttcagggtcggagggagaagatggctttcaggtagagttggagctagtggagttgactgtggggactctggatctttgtgagtctgaagtattgcccaagcggaggaggagaaaaaggaataagaaggagaaaagccgagaccaggaggctggggcacatcggactcttctccagcaaactcaagaagaggagccttccacacagtcatcccaggcagttgctgcccccttgggccctttgctggatgaggccaaagcccctggtcagccagagctctggaatgcactgcttgctgcttgccgagctggagatgttggagtgctaaagctgcagctagctcccagccctgcagaccctagagttctgtctctgctcagtgcccccttgggctccggtggctttactctcctgcatgcagcagctgcagctggaagaggctcagtggttcgtctgctgctggaagcaggtgctgaccccactgtgcaggactctcgggcccggccaccttatactgttgcggctgacaaatcaacacgtaatgagttccgaaggttcatggagaagaatccagatgcctacgattacaacaaggctcaggtgccaggaccattgacaccagaaatggaggcacggcaggctacacggaaaagggagcagaaggcagcccggcggcaacgggaggaacagcagcagaggcagcaggagcaggaggagcgtgaacgagaagagcagcggcgatttgccgccctcagtgaccgagagaagagagctctggctgcagagcgccgactcgctgcccagttgggagcccctacctctccaatccctgactctgcaatcgtcaatactcgacgctgctggagttgtggggcatccctccaaggcctgactccctttcactacctcgacttctctttctgctccacacgttgcctccaggatcatcgccgtcaggcagggaggccctcttcctgatctcttacagctctacctggggccaactcagggacctgagagggcacattcacagcagccctaggttttttcttccccgtgaaaccagagatgatttggaagatgggggtgaaggacactcgggaactagggcaaagacagggctagaggtatgtggagctggtactgtctctggaattttaatcacaataaagtttggcaaggaatgtgtacttgtacttacattcagaggcactgtggcctttagttccttagggtcaccgtggccagcaccaagggatcctgcccactccatgtcccaggtccaagggttactttttttttttttttttttttttgagatggagtgtctcactgtcagccaggctggaagcgagactctgtctcaaaaaacacaaacaaacaaacaaaagaaatgtaaaatctcagatcctacctcagacctatagaatcagaatttgtattttaacaagattcccaggtgatcctaggcaccttcaaaattgagaagcatggctttacttgactgggctccctgaggacagggagtgccctgttcatctcaaatcctcagcctctagcacagggccgggtatatagtaggttaaatctggatgaatcaatgtcataaccaaaaggctaaaacaggttcagaaccaggggaaaccattggaaaatcttcagggtgatccggggtgtggaagggaggaaccaggtcacaagaaggacctctttcctggagagtcctgtttcagcaaaacagccattccctc

SEQ ID NO: 282278 - DNA, 2991 bp, Homo sapiens
agttattgcagtggaggctgggttgaatcggccgagggaaatccggcaatcgacctgaggacttgcgagccgctcagctcccgggacgtttggagctgctgctaaataatttctgctcagccatgtcgccggctccagatgcagccccggctcctgcgtcgatctccctgtttgacctcagcgcggatgctccggtctttcagggcctgagcctggctcaggggagagagaaagcccagaaagaaagctactccagggtcctatggatatttcagagaagttattttgttcaacttgtgaccagaccttccagaaccaccaagaacagagggaacattataagcttgactggcatcggtttaacctaaagcaacgtctcaaggacaagcctctcctgtctgccctggactttgaaaagcagagctccacaggagatctttccagcatctcgggatcagaagactcagactcagccagtgaggaggacttgcagacactggatcgggagagggctacatttgagaagttgagccgacccccaggcttttaccctcatcgagttcttttccagaatgcccagggccagtttctttatgcctaccgctgtgtcctaggccctcatcaggatcccccagaagaggcagaactgctgctacagaacctgcaaagtagaggtcccagagactgcgtggtgctcatggctgcagctgggcactttgctggtgctatatttcaaggaagagaagtggtgacacacaaaacttttcaccgctatacggttcgggccaagcggggcacagcccaggggcttcgggatgcccgaggtgggccatcacactctgctggagccaacctgaggcgctacaatgaagccacactatataaggatgttcgtgacctgctggcagggccaagctgggctaaggcgctggaggaggctggtacaatactgttgcgtgctccccgctctggccggtctttgttctttggaggcaagggagcacccctgcaaaggggggatccccgactttgggatatccccctcgccacccgcagacccaccttccaagagctacagcgtgtgctccataagctgaccactttgcatgtctatgaagaagaccctcgggaagcagtcagactgcactcacctcagacacactggaaaacagtaagagaggagagaaagaagcctactgaggaagaaataagaaagatctgcagggatgaaaaggaagcgctggggcagaatgaggaatctcccaaacagggtttgattactatctggcaactgtcagatctgagtttctgtcctaaaaatgcactggcaaattccctactctcataactgacccatttccttatttaaacacacacccacagtgtctatcttagcaattactgagacatgtttagtgacctttccaaatctattatctcttttgttatggatgtttccccagagctaagaaaatctttgtgtggagcagatgcgtggatgtgttgcatggatctcacatagtttatctttgattggatgctgtggtttgaggctgagggctgcttccatgctttcctctattgtgcggcaccctaaggctactcatacggagagtccagggacttgttcttgtctgggctgagagcctcatttctgcatgtgatataatggactcagctcttgatgtgctacttttatctgggtgacaaaataaaaacaatttcatttcaggctttcattcttatgcatctgcttctaccctctgagtactccctagatggatttcacatgtcaggtttttccctaggttcagggtcggagggagaagatggctttcaggtagagttggagctagtggagttgactgtggggactctggatctttgtgagtctgaagtattgcccaagcggaggaggagaaaaaggaataagaaggagaaaagccgagaccaggaggctggggcacatcggactcttctccagcaaactcaagaagaggagccttccacacagtcatcccaggcagttgctgcccccttgggccctttgctggatgaggccaaagcccctggtcagccagagctctggaatgcactgcttgctgcttgccgagctggagatgttggagtgctaaagctgcagctagctcccagccctgcagaccctagagttctgtctctgctcagtgcccccttgggctccggtggctttactctcctgcatgcagcagctgcagctggaagaggctcagtggttcgtctgctgctggaagcaggtgctgaccccactgtgcaggactctcgggcccggccaccttatactgttgcggctgacaaatcaacacgtaatgagttccgaaggttcatggagaagaatccagatgcctacgattacaacaaggctcaggtgccaggaccattgacaccagaaatggaggcacggcaggctacacggaaaagggagcagaaggcagcccggcggcaacgggaggaacagcagcagaggcagcaggagcaggaggagcgtgaacgagaagagcagcggcgatttgccgccctcagtgaccgagagaagagagctctggctgcagagcgccgactcgctgcccagttgggagcccctacctctccaatccctgactctgcaatcgtcaatactcgacgctgctggagttgtggggcatccctccaaggcctgactccctttcactacctcgacttctctttctgctccacacgttgcctccaggatcatcgccgtcaggcagggaggccctcttcctgatctcttacagctctacctggggccaactcagggacctgagagggcacattcacagcagccctaggttttttcttccccgtgaaaccagagatgatttggaagatgggggtgaaggacactcgggaactagggcaaagacagggctagaggtatgtggagctggtactgtctctggaattttaatcacaataaagtttggcaaggaa

SEQ ID NO: 282279 - DNA, 2878 bp, Homo sapiens
agttattgcagtggaggctgggttgaatcggccgagggaaatccggcaatcgacctgaggacttgcgagccgctcagctcccgggacgtttggagctgctgctaaataatttctgctcagccatgtcgccggctccagatgcagccccggctcctgcgtcgatctccctgtttgacctcagcgcggatgctccggtctttcagggcctgagcctgagggaacattataagcttgactggcatcggtttaacctaaagcaacgtctcaaggacaagcctctcctgtctgccctggactttgaaaagcagagctccacaggagatctttccagcatctcgggatcagaagactcagactcagccagtgaggaggacttgcagacactggatcgggagagggctacatttgagaagttgagccgacccccaggcttttaccctcatcgagttcttttccagaatgcccagggccagtttctttatgcctaccgctgtgtcctaggccctcatcaggatcccccagaagaggcagaactgctgctacagaacctgcaaagtagaggtcccagagactgcgtggtgctcatggctgcagctgggcactttgctggtgctatatttcaaggaagagaagtggtgacacacaaaacttttcaccgctatacggttcgggccaagcggggcacagcccaggggcttcgggatgcccgaggtgggccatcacactctgctggagccaacctgaggcgctacaatgaagccacactatataaggatgttcgtgacctgctggcagggccaagctgggctaaggcgctggaggaggctggtacaatactgttgcgtgctccccgctctggccggtctttgttctttggaggcaagggagcacccctgcaaaggggggatccccgactttgggatatccccctcgccacccgcagacccaccttccaagagctacagcgtgtgctccataagctgaccactttgcatgtctatgaagaagaccctcgggaagcagtcagactgcactcacctcagacacactggaaaacagtaagagaggagagaaagaagcctactgaggaagaaataagaaagatctgcagggatgaaaaggaagcgctggggcagaatgaggaatctcccaaacagggtttgattactatctggcaactgtcagatctgagtttctgtcctaaaaatgcactggcaaattccctactctcataactgacccatttccttatttaaacacacacccacagtgtctatcttagcaattactgagacatgtttagtgacctttccaaatctattatctcttttgttatggatgtttccccagagctaagaaaatctttgtgtggagcagatgcgtggatgtgttgcatggatctcacatagtttatctttgattggatgctgtggtttgaggctgagggctgcttccatgctttcctctattgtgcggcaccctaaggctactcatacggagagtccagggacttgttcttgtctgggctgagagcctcatttctgcatgtgatataatggactcagctcttgatgtgctacttttatctgggtgacaaaataaaaacaatttcatttcaggctttcattcttatgcatctgcttctaccctctgagtactccctagatggatttcacatgtcaggtttttccctaggttcagggtcggagggagaagatggctttcaggtagagttggagctagtggagttgactgtggggactctggatctttgtgagtctgaagtattgcccaagcggaggaggagaaaaaggaataagaaggagaaaagccgagaccaggaggctggggcacatcggactcttctccagcaaactcaagaagaggagccttccacacagtcatcccaggcagttgctgcccccttgggccctttgctggatgaggccaaagcccctggtcagccagagctctggaatgcactgcttgctgcttgccgagctggagatgttggagtgctaaagctgcagctagctcccagccctgcagaccctagagttctgtctctgctcagtgcccccttgggctccggtggctttactctcctgcatgcagcagctgcagctggaagaggctcagtggttcgtctgctgctggaagcaggtgctgaccccactgtgcaggactctcgggcccggccaccttatactgttgcggctgacaaatcaacacgtaatgagttccgaaggttcatggagaagaatccagatgcctacgattacaacaaggctcaggtgccaggaccattgacaccagaaatggaggcacggcaggctacacggaaaagggagcagaaggcagcccggcggcaacgggaggaacagcagcagaggcagcaggagcaggaggagcgtgaacgagaagagcagcggcgatttgccgccctcagtgaccgagagaagagagctctggctgcagagcgccgactcgctgcccagttgggagcccctacctctccaatccctgactctgcaatcgtcaatactcgacgctgctggagttgtggggcatccctccaaggcctgactccctttcactacctcgacttctctttctgctccacacgttgcctccaggatcatcgccgtcaggcagggaggccctcttcctgatctcttacagctctacctggggccaactcagggacctgagagggcacattcacagcagccctaggttttttcttccccgtgaaaccagagatgatttggaagatgggggtgaaggacactcgggaactagggcaaagacagggctagaggtatgtggagctggtactgtctctggaattttaatcacaataaagtttggcaaggaa

SEQ ID NO: 282280 - DNA, 1135 bp, Homo sapiens
gcggcccctactactactaaattagcggccggcgatctgaagtattgcccaagcggaggaggagaaaaaggaataagaaggagaaaagccgagaccaggaggctggggcacatcggactcttctccagcaaactcaagaagaggagccttccacacagtcatcccaggcagttgctgcccccttgggccctttgctggatgaggccaaagcccctggtcagccagagctctggaatgcactgcttgctgcttgccgagctggagatgttggagtgctaaagctgcagctagctcccagccctgcagaccctagagttctgtctctgctcagtgcccccttgggctccggtggctttactctcctgcatgcagcagctgcagctggaagaggctcagtggttcgtctgctgctggaagcaggtgctgaccccactgtgcaggactctcgggcccggccaccttatactgttgcggctgacaaatcaacacgtaatgagttccgaaggttcatggagaagaatccagatgcctacgattacaacaaggctcaggtgccaggaccattgacaccagaaatggaggcacggcaggctacacggaaaagggagcagaaggcagcccggcggcaacgggaggaacagcagcagaggcagcaggagcaggaggagcgtgaacgagaagagcagcggcgatttgccgccctcagtgaccgagagaagagagctctggctgcagagcgccgactcgctgcccagttgggagcccctacctctccaatccctgactctgcaatcgtcaatactcgacgctgctggagttgtggggcatccctccaaggcctgactccctttcactacctcgacttctctttctgctccacacgttgcctccaggatcatcgccgtcaggcagggaggccctcttcctgatctcttacagctctacctggggccaactcagggacctgagagggcacattcacagcagccctaggttttttcttccccgtgaaaccagagatgatttggaagatgggggtgaaggacactcgggaactagggcaaagacagggctagaggtatgtggagctggtactgtctctggaattttaatcacaataaagtttggcaaggaa

SEQ ID NO: 282281 - DNA, 1054 bp, Homo sapiens
gtagtgacggggattgttgtgttgcagaaatccggcaatcgacctgaggacttgcgagccgctcagctcccgggacgtttggagctgctgctaaataatttctgctcagccatgtcgccggctccagatgcagccccggctcctgcgtcgatctccctgtttgacctcagcgcggatgctccggtctttcagggcctgagcctggtgagccacgcgcctggggaggctctggcccgggctccgcgtacttcctgttcaggctcaggggagagagaaagcccagaaagaaagctactccagggtcctatggatatttcagagaagttattttgttcaacttgtgaccagaccttccagaaccaccaagaacagagggaacattataagcttgactggcatcggtttaacctaaagcaacgtctcaaggacaagcctctcctgtctgccctggactttgaaaagcagagctccacaggagatctttccagcatctcgggatcagaagactcagactcagccagtgaggaggacttgcagacactggatcgggagagggctacatttgagaagttgagccgacccccaggcttttaccctcatcgagttcttttccagaatgcccagggccagtttctttatgcctaccgctgtgtcctaggccctcatcaggatcccccagaagaggcagaactgctgctacagaacctgcaaagtagaggtcccagagactgcgtggtgctcatggctgcagctgggcactttgctggtgctatatttcaagggtgagagggtgctgcatgggggtaaggatggagtggatcctgttagccagggagcaccagctggtctccagtactgagtctgtgctgtctacagaagagaagtggtgacacacaaaacttttcaccgctatacggttcgggccaagcggggcacagcccaggggcttcgggatgcccgaggtgggccatcacactctgctggagccaacctgaggcgctacaatgaagccacactatataaggtgagttaagccttttagatctggtggtac

SEQ ID NO: 282282 - DNA, 253 bp, Homo sapiens
ctggcatcggtttaacctaaagcaacgtctcaaggacaagcctctcctgtctgccctggactttgaaaagcagagctccacaggtgatgagtggtagggggacctatgtaggagtaggacatggaggtataagaaagcactagtttagagtttgaggaaagaacaaaaatggggtaccaaacttgtgtatctcatattgtctgtcttcaggagatctttccagcatctcgggatcagaagactcagactcagc

SEQ ID NO: 282283 - DNA, 682 bp, Homo sapiens
tgggtatcacgcttgacaacatagtcttgaattgaaactggcctgaattgtggaagggttaagtgtaatggaattaagtttggaaacaaaccaatttaggtttgaattgtgattctaccacttcatcttgactgcctcgccaagcctcaaatttccttgtttgtcaaatggaaacaagcctcagggtggtaatattaaatgagataatgtttgtgaaaattggcccttagtttcttgctctcagtgaatgcaacagatatgtttctgatgcttctctgtcatcaaggatcccccagaagaggcagaactgctgctacagaacctgcaaagtagaggtcccagagactgcgtggtgctcatggctgcagctgggcactttgctggtgctatatttcaagggtgagagggtgctgcatgggggtaaggatggagtggatcctgttagccagggagcaccagctggtctccagtactgagtctgtgctgtctacagaagagaagtggtgacacacaaaacttttcaccgctatacggttcgggccaagcggggcacagcccaggggcttcgggatgcccgaggtgggccatcacactctgctggagccaacctgaggcgctacaatgaagccacactatataaggtgagttaagccttttagatctggtggtactgatccatact

SEQ ID NO: 282284 - DNA, 387 bp, Homo sapiens
tggtactgtctctggaattttaatcacaataaagtttggcaaggaatgtgtacttgtacttacattcagaggcactgtggcctttagttccttagggtcaccgtggccagcaccaagggatcctgcccactccatgtcccaggtccaagggttactttttttttttttttttttttttgagatggagtgtctcactgtcagccaggctggagtgcagtggtacaacctccactcactgcaacctctgcctcctggattcaagcaattctcctgccctcagcctcccaagtagctgggattagaggtgcccaccatcacgcccggctaatttttgtatttttgtggagacggggtttcaccatgttggccaggctggtcttgaagtcc

SEQ ID NO: 282285 - DNA, 2488 bp, Homo sapiens
cccgggacgtttggtgcgtcttctaagggcgtgggcgagtttacgcgggccagttgttgctggtcgcatgggagctgctgctaaataatttctgctcagccatgtcgccggctccagatgcagccccggctcctgcgtcgatctccctgtttgacctcagcgcggatgctccggtctttcagggcctgagcctggtgagccacgcgcctggggaggctctggcccgggctccgcgtacttcctgttcaggctcaggggagagagaaagcccagaaagaaagctactccagggtcctatggatatttcagagaagttattttgttcaacttgtgaccagaccttccagaaccaccaagaacagagggaacattataagcttgactggcatcggtttaacctaaagcaacgtctcaaggacaagcctctcctgtctgccctggactttgaaaagcagagctccacaggagatctttccagcatctcgggatcagaagactcagactcagccagtgaggaggacttgcagacactggatcgggagagggctacatttgagaagttgagccgacccccaggcttttaccctcatcgagttcttttccagaatgcccagggccagtttctttatgcctaccgctgtgtcctaggccctcatcaggatcccccagaagaggcagaactgctgctacagaacctgcaaagtagaggtcccagagactgcgtggtgctcatggctgcagctgggcactttgctggtgctatatttcaaggaagagaagtggtgacacacaaaacttttcaccgctatacggttcgggccaagcggggcacagcccaggggcttcgggatgcccgaggtgggccatcacactctgctggagccaacctgaggcgctacaatgaagccacactatataaggatgttcgtgacctgctggcagggccaagctgggctaaggcgctggaggaggctggtacaatactgttgcgtgctccccgctctggccggtctttgttctttggaggcaagggagcacccctgcaaaggggggatccccgactttgggatatccccctcgccacccgcagacccaccttccaagagctacagcgtgtgctccataagctgaccactttgcatgtctatgaagaagaccctcgggaagcagtcagactgcactcacctcagacacactggaaaacagtaagagaggagagaaagaagcctactgaggaagaaataagaaagatctgcagggatgaaaaggaagcgctggggcagaatgaggaatctcccaaacagggttcagggtcggagggagaagatggctttcaggtagagttggagctagtggagttgactgtggggactctggatctttgtgagtctgaagtattgcccaagcggaggaggagaaaaaggaataagaaggagaaaagccgagaccaggaggctggggcacatcggactcttctccagcaaactcaagaagaggagccttccacacagtcatcccaggcagttgctgcccccttgggccctttgctggatgaggccaaagcccctggtcagccagagctctggaatgcactgcttgctgcttgccgagctggagatgttggagtgctaaagctgcagctagctcccagccctgcagaccctagagttctgtctctgctcagtgcccccttgggctccggtggctttactctcctgcatgcagcagctgcagctggaagaggctcagtggttcgtctgctgctggaagcaggtgctgaccccactgtgcaggactctcgggcccggccaccttatactgttgcggctgacaaatcaacacgtaatgagttccgaaggttcatggagaagaatccagatgcctacgattacaacaaggctcaggtgccaggaccattgacaccagaaatggaggcacggcaggctacacggaaaagggagcagaaggcagcccggcggcaacgggaggaacagcagcagaggcagcaggagcaggaggagcgtgaacgagaagagcagcggcgatttgccgccctcagtgaccgagagaagagagctctggctgcagagcgccgactcgctgcccagttgggagcccctacctctccaatccctgactctgcaatcgtcaatactcgacgctgctggagttgtggggcatccctccaaggcctgactccctttcactacctcgacttctctttctgctccacacgttgcctccaggatcatcgccgtcaggcagggaggccctcttcctgatctcttacagctctacctggggccaactcagggacctgagagggcacattcacagcagccctaggttttttcttccccgtgaaaccagagatgatttggaagatgggggtgaaggacactcgggaactagggcaaagacagggctagaggtatgtggagctggtactgtctctggaattttaatcacaataaagtttggcaaggaa

SEQ ID NO: 282286 - DNA, 3035 bp, Homo sapiens
gtagtgacggggattgttgtgttgcagaaatccggcaatcgacctgaggacttgcgagccgctcagctcccgggacgtttggagctgctgctaaataatttctgctcagccatgtcgccggctccagatgcagccccggctcctgcgtcgatctccctgtttgacctcagcgcggatgctccggtctttcagggcctgagcctggtgagccacgcgcctggggaggctctggcccgggctccgcgtacttcctgttcaggctcaggggagagagaaagcccagaaagaaagctactccagggtcctatggatatttcagagaagttattttgttcaacttgtgaccagaccttccagaaccaccaagaacagagggaacattataagcttgactggcatcggtttaacctaaagcaacgtctcaaggacaagcctctcctgtctgccctggactttgaaaagcagagctccacaggagatctttccagcatctcgggatcagaagactcagactcagccagtgaggaggacttgcagacactggatcgggagagggctacatttgagaagttgagccgacccccaggcttttaccctcatcgagttcttttccagaatgcccagggccagtttctttatgcctaccgctgtgtcctaggccctcatcaggatcccccagaagaggcagaactgctgctacagaacctgcaaagtagaggtcccagagactgcgtggtgctcatggctgcagctgggcactttgctggtgctatatttcaaggaagagaagtggtgacacacaaaacttttcaccgctatacggttcgggccaagcggggcacagcccaggggcttcgggatgcccgaggtgggccatcacactctgctggagccaacctgaggcgctacaatgaagccacactatataaggatgttcgtgacctgctggcagggccaagctgggctaaggcgctggaggaggctggtacaatactgttgcgtgctccccgctctggccggtctttgttctttggaggcaagggagcacccctgcaaaggggggatccccgactttgggatatccccctcgccacccgcagacccaccttccaagagctacagcgtgtgctccataagctgaccactttgcatgtctatgaagaagaccctcgggaagcagtcagactgcactcacctcagacacactggaaaacagtaagagaggagagaaagaagcctactgaggaagaaataagaaagatctgcagggatgaaaaggaagcgctggggcagaatgaggaatctcccaaacagggtttgattactatctggcaactgtcagatctgagtttctgtcctaaaaatgcactggcaaattccctactctcataactgacccatttccttatttaaacacacacccacagtgtctatcttagcaattactgagacatgtttagtgacctttccaaatctattatctcttttgttatggatgtttccccagagctaagaaaatctttgtgtggagcagatgcgtggatgtgttgcatggatctcacatagtttatctttgattggatgctgtggtttgaggctgagggctgcttccatgctttcctctattgtgcggcaccctaaggctactcatacggagagtccagggacttgttcttgtctgggctgagagcctcatttctgcatgtgatataatggactcagctcttgatgtgctacttttatctgggtgacaaaataaaaacaatttcatttcaggctttcattcttatgcatctgcttctaccctctgagtactccctagatggatttcacatgtcaggtttttccctaggttcagggtcggagggagaagatggctttcaggtagagttggagctagtggagttgactgtggggactctggatctttgtgagtctgaagtattgcccaagcggaggaggagaaaaaggaataagaaggagaaaagccgagaccaggaggctggggcacatcggactcttctccagcaaactcaagaagaggagccttccacacagtcatcccaggcagttgctgcccccttgggccctttgctggatgaggccaaagcccctggtcagccagagctctggaatgcactgcttgctgcttgccgagctggagatgttggagtgctaaagctgcagctagctcccagccctgcagaccctagagttctgtctctgctcagtgcccccttgggctccggtggctttactctcctgcatgcagcagctgcagctggaagaggctcagtggttcgtctgctgctggaagcaggtgctgaccccactgtgcaggactctcgggcccggccaccttatactgttgcggctgacaaatcaacacgtaatgagttccgaaggttcatggagaagaatccagatgcctacgattacaacaaggctcaggtgccaggaccattgacaccagaaatggaggcacggcaggctacacggaaaagggagcagaaggcagcccggcggcaacgggaggaacagcagcagaggcagcaggagcaggaggagcgtgaacgagaagagcagcggcgatttgccgccctcagtgaccgagagaagagagctctggctgcagagcgccgactcgctgcccagttgggagcccctacctctccaatccctgactctgcaatcgtcaatactcgacgctgctggagttgtggggcatccctccaaggcctgactccctttcactacctcgacttctctttctgctccacacgttgcctccaggatcatcgccgtcaggcagggaggccctcttcctgatctcttacagctctacctggggccaactcagggacctgagagggcacattcacagcagccctaggttttttcttccccgtgaaaccagagatgatttggaagatgggggtgaaggacactcgggaactagggcaaagacagggctagaggtatgtggagctggtactgtctctggaattttaatcacaataaagtttggcaaggaa

SEQ ID NO: 282287 - DNA, 3425 bp, Homo sapiens
gtagtgacggggattgttgtgttgcagaaatccggcaatcgacctgaggacttgcgagccgctcagctcccgggacgtttggagctgctgctaaataatttctgctcagccatgtcgccggctccagatgcagccccggctcctgcgtcgatctccctgtttgacctcagcgcggatgctccggtctttcagggcctgagcctggtgagccacgcgcctggggaggctctggcccgggctccgcgtacttcctgttcaggctcaggggagagagaaagcccagaaagaaagctactccagggtcctatggatatttcagagaagttattttgttcaacttgtgaccagaccttccagaaccaccaagaacagagggaacattataagcttgactggcatcggtttaacctaaagcaacgtctcaaggacaagcctctcctgtctgccctggactttgaaaagcagagctccacaggagatctttccagcatctcgggatcagaagactcagactcagccagtgaggaggacttgcagacactggatcgggagagggctacatttgagaagttgagccgacccccaggcttttaccctcatcgagttcttttccagaatgcccagggccagtttctttatgcctaccgctgtgtcctaggccctcatcaggatcccccagaagaggcagaactgctgctacagaacctgcaaagtagaggtcccagagactgcgtggtgctcatggctgcagctgggcactttgctggtgctatatttcaaggaagagaagtggtgacacacaaaacttttcaccgctatacggttcgggccaagcggggcacagcccaggggcttcgggatgcccgaggtgggccatcacactctgctggagccaacctgaggcgctacaatgaagccacactatataaggatgttcgtgacctgctggcagggccaagctgggctaaggcgctggaggaggctggtacaatactgttgcgtgctccccgctctggccggtctttgttctttggaggcaagggagcacccctgcaaaggggggatccccgactttgggatatccccctcgccacccgcagacccaccttccaagagctacagcgtgtgctccataagctgaccactttgcatgtctatgaagaagaccctcgggaagcagtcagactgcactcacctcagacacactggaaaacagtaagagaggagagaaagaagcctactgaggaagaaataagaaagatctgcagggatgaaaaggaagcgctggggcagaatgaggaatctcccaaacagggtttgattactatctggcaactgtcagatctgagtttctgtcctaaaaatgcactggcaaattccctactctcataactgacccatttccttatttaaacacacacccacagtgtctatcttagcaattactgagacatgtttagtgacctttccaaatctattatctcttttgttatggatgtttccccagagctaagaaaatctttgtgtggagcagatgcgtggatgtgttgcatggatctcacatagtttatctttgattggatgctgtggtttgaggctgagggctgcttccatgctttcctctattgtgcggcaccctaaggctactcatacggagagtccagggacttgttcttgtctgggctgagagcctcatttctgcatgtgatataatggactcagctcttgatgtgctacttttatctgggtgacaaaataaaaacaatttcatttcaggctttcattcttatgcatctgcttctaccctctgagtactccctagatggatttcacatgtcaggtttttccctaggttcagggtcggagggagaagatggctttcaggtagagttggagctagtggagttgactgtggggactctggatctttgtgagtctgaagtattgcccaagcggaggaggagaaaaaggaataagaaggagaaaagccgagaccaggaggctggggcacatcggactcttctccagcaaactcaagaagaggagccttccacacagtcatcccaggcagttgctgcccccttgggccctttgctggatgaggccaaagcccctggtcagccagagctctggaatgcactgcttgctgcttgccgagctggagatgttggagtgctaaagctgcagctagctcccagccctgcagaccctagagttctgtctctgctcagtgcccccttgggctccggtggctttactctcctgcatgcagcagctgcagctggaagaggctcagtggttcgtctgctgctggaagcaggtgctgaccccactgtgcaggactctcgggcccggccaccttatactgttgcggctgacaaatcaacacgtaatgagttccgaaggttcatggagaagaatccagatgcctacgattacaacaaggctcaggtgccaggaccattgacaccagaaatggaggcacggcaggctacacggaaaagggagcagaaggcagcccggcggcaacgggaggaacagcagcagaggcagcaggagcaggaggagcgtgaacgagaagagcagcggcgatttgccgccctcagtgaccgagagaagagagctctggctgcagagcgccgactcgctgcccagttgggagcccctacctctccaatccctgactctgcaatcgtcaatactcgacgctgctggagttgtggggcatccctccaaggcctgactccctttcactacctcgacttctctttctgctccacacgttgcctccaggatcatcgccgtcaggcagggaggccctcttcctgatctcttacagctctacctggggccaactcagggacctgagagggcacattcacagcagccctaggttttttcttccccgtgaaaccagagatgatttggaagatgggggtgaaggacactcgggaactagggcaaagacagggctagaggtatgtggagctggtactgtctctggaattttaatcacaataaagtttggcaaggaatgtgtacttgtacttacattcagaggcactgtggcctttagttccttagggtcaccgtggccagcaccaagggatcctgcccactccatgtcccaggtccaagggttactttttttttttttttttttttttgagatggagtgtctcactgtcagccaggctggagtgcagtggtacaacctccactcactgcaacctctgcctcctggattcaagcaattctcctgccctcagcctcccaagtagctgggattagaggtgcccaccatcacgcccggctaatttttgtatttttttgagatggagtgtctcactgtcagccaggctggagtgcagtggcacaatctcggctcactgcaacctctgcctccgagattcaagcgattctcc

SEQ ID NO: 282288 - DNA, 3500 bp, Homo sapiens
  misc_feature (3044)..(3044): n is a, c, g, or t
gtagtgacggggattgttgtgttgcagaaatccggcaatcgacctgaggacttgcgagccgctcagctcccgggacgtttggagctgctgctaaataatttctgctcagccatgtcgccggctccagatgcagccccggctcctgcgtcgatctccctgtttgacctcagcgcggatgctccggtctttcagggcctgagcctggtgagccacgcgcctggggaggctctggcccgggctccgcgtacttcctgttcaggctcaggggagagagaaagcccagaaagaaagctactccagggtcctatggatatttcagagaagttattttgttcaacttgtgaccagaccttccagaaccaccaagaacagagggaacattataagcttgactggcatcggtttaacctaaagcaacgtctcaaggacaagcctctcctgtctgccctggactttgaaaagcagagctccacaggagatctttccagcatctcgggatcagaagactcagactcagccagtgaggaggacttgcagacactggatcgggagagggctacatttgagaagttgagccgacccccaggcttttaccctcatcgagttcttttccagaatgcccagggccagtttctttatgcctaccgctgtgtcctaggccctcatcaggatcccccagaagaggcagaactgctgctacagaacctgcaaagtagaggtcccagagactgcgtggtgctcatggctgcagctgggcactttgctggtgctatatttcaaggaagagaagtggtgacacacaaaacttttcaccgctatacggttcgggccaagcggggcacagcccaggggcttcgggatgcccgaggtgggccatcacactctgctggagccaacctgaggcgctacaatgaagccacactatataaggatgttcgtgacctgctggcagggccaagctgggctaaggcgctggaggaggctggtacaatactgttgcgtgctccccgctctggccggtctttgttctttggaggcaagggagcacccctgcaaaggggggatccccgactttgggatatccccctcgccacccgcagacccaccttccaagagctacagcgtgtgctccataagctgaccactttgcatgtctatgaagaagaccctcgggaagcagtcagactgcactcacctcagacacactggaaaacagtaagagaggagagaaagaagcctactgaggaagaaataagaaagatctgcagggatgaaaaggaagcgctggggcagaatgaggaatctcccaaacagggtttgattactatctggcaactgtcagatctgagtttctgtcctaaaaatgcactggcaaattccctactctcataactgacccatttccttatttaaacacacacccacagtgtctatcttagcaattactgagacatgtttagtgacctttccaaatctattatctcttttgttatggatgtttccccagagctaagaaaatctttgtgtggagcagatgcgtggatgtgttgcatggatctcacatagtttatctttgattggatgctgtggtttgaggctgagggctgcttccatgctttcctctattgtgcggcaccctaaggctactcatacggagagtccagggacttgttcttgtctgggctgagagcctcatttctgcatgtgatataatggactcagctcttgatgtgctacttttatctgggtgacaaaataaaaacaatttcatttcaggctttcattcttatgcatctgcttctaccctctgagtactccctagatggatttcacatgtcaggtttttccctaggttcagggtcggagggagaagatggctttcaggtagagttggagctagtggagttgactgtggggactctggatctttgtgagtctgaagtattgcccaagcggaggaggagaaaaaggaataagaaggagaaaagccgagaccaggaggctggggcacatcggactcttctccagcaaactcaagaagaggagccttccacacagtcatcccaggcagttgctgcccccttgggccctttgctggatgaggccaaagcccctggtcagccagagctctggaatgcactgcttgctgcttgccgagctggagatgttggagtgctaaagctgcagctagctcccagccctgcagaccctagagttctgtctctgctcagtgcccccttgggctccggtggctttactctcctgcatgcagcagctgcagctggaagaggctcagtggttcgtctgctgctggaagcaggtgctgaccccactgtgcaggactctcgggcccggccaccttatactgttgcggctgacaaatcaacacgtaatgagttccgaaggttcatggagaagaatccagatgcctacgattacaacaaggctcaggtgccaggaccattgacaccagaaatggaggcacggcaggctacacggaaaagggagcagaaggcagcccggcggcaacgggaggaacagcagcagaggcagcaggagcaggaggagcgtgaacgagaagagcagcggcgatttgccgccctcagtgaccgagagaagagagctctggctgcagagcgccgactcgctgcccagttgggagcccctacctctccaatccctgactctgcaatcgtcaatactcgacgctgctggagttgtggggcatccctccaaggcctgactccctttcactacctcgacttctctttctgctccacacgttgcctccaggatcatcgccgtcaggcagggaggccctcttcctgatctcttacagctctacctggggccaactcagggacctgagagggcacattcacagcagccctaggttttttcttccccgtgaaaccagagatgatttggaagatgggggtgaaggacactcgggaactagggcaaagacagggctagaggtatgtggagctggtactgtctctggaattttaatcacaataaagtttggcaaggaaaaaaaaaanaaaaaaaaaaaaaaaaacacaaacaaaaaaaaagacaaagccacaacacagaaaacaccacaacgaagcaacagcacgaaagaacaagacacaacacaaaaaacaaaaaacaaaaaaaagaggggggggcgcccgaaaacaccacaccaccacagggacgcacagagacaagcaacacaacacacacagaaacacaacaaacaggcagaggacaccaacaaaggagagccacacaaaaaacaaagacaaaaggggcgaggccacacacaaaccagaagaaacagagagacaggcacgccacaacccagggaagacctcaggagcagcgcaacaccaacacaacaaaacgaagggcgggagacacaaacaagcgcaaccaacaccgaccgacgaagacagccgcccaaggggagacgaaggaaaaacaaaagagggcgcgaggagcaaacaacgagt

SEQ ID NO: 282289 - DNA, 2027 bp, Homo sapiens
ctgttctctccaacctaagcctccattctcattggtatatccagaggattttctaagccttggactgcagcccagctacatctgcattgagagaaacctgcgctagcttctcctcagctaaggttgagaaagatcttttcttttatggcagaagaagaccctcgggaagcagtcagactgcactcacctcagacacactggaaaacagtaagagaggagagaaagaagcctactgaggaagaaataagaaagatctgcagggatgaaaaggaagcgctggggcagaatgaggaatctcccaaacagggtttgattactatctggcaactgtcagatctgagtttctgtcctaaaaatgcactggcaaattccctactctcataactgacccatttccttatttaaacacacacccacagtgtctatcttagcaattactgagacatgtttagtgacctttccaaatctattatctcttttgttatggatgtttccccagagctaagaaaatctttgtgtggagcagatgcgtggatgtgttgcatggatctcacatagtttatctttgattggatgctgtggtttgaggctgagggctgcttccatgctttcctctattgtgcggcaccctaaggctactcatacggagagtccagggacttgttcttgtctgggctgagagcctcatttctgcatgtgatataatggactcagctcttgatgtgctacttttatctgggtgacaaaataaaaacaatttcatttcaggctttcattcttatgcatctgcttctaccctctgagtactccctagatggatttcacatgtcaggtttttccctaggttcagggtcggagggagaagatggctttcaggtagagttggagctagtggagttgactgtggggactctggatctttgtgagtctgaagtattgcccaagcggaggaggagaaaaaggaataagaaggagaaaagccgagaccaggaggctggggcacatcggactcttctccagcaaactcaagaagaggagccttccacacagtcatcccaggcagttgctgcccccttgggccctttgctggatgaggccaaagcccctggtcagccagagctctggaatgcactgcttgctgcttgccgagctggagatgttggagtgctaaagctgcagctagctcccagccctgcagaccctagagttctgtctctgctcagtgcccccttgggctccggtggctttactctcctgcatgcagcagctgcagctggaagaggctcagtggttcgtctgctgctggaagcaggtgctgaccccactgtgcaggactctcgggcccggccaccttatactgttgcggctgacaaatcaacacgtaatgagttccgaaggttcatggagaagaatccagatgcctacgattacaacaaggctcaggtgccaggaccattgacaccagaaatggaggcacggcaggctacacggaaaagggagcagaaggcagcccggcggcaacgggaggaacagcagcagaggcagcaggagcaggaggagcgtgaacgagaagagcagcggcgatttgccgccctcagtgaccgagagaagagagctctggctgcagagcgccgactcgctgcccagttgggagcccctacctctccaatccctgactctgcaatcgtcaatactcgacgctgctggagttgtggggcatccctccaaggcctgactccctttcactacctcgacttctctttctgctccacacgttgcctccaggatcatcgccgtcaggcagggaggccctcttcctgatctcttacagctctacctggggccaactcagggacctgagagggcacattcacagcagccctaggttttttcttccccgtgaaaccagagatgatttggaagatgggggtgaaggacactcgggaactagggcaaagacagggctagaggtatgtggagctggtactgtctctggaattttaatcacaataaagtttggcaaggaa

SEQ ID NO: 282290 - DNA, 701 bp, Homo sapiens
ccccccgaaattgggatcaacacgcccaaaactgttgcggctgacaaatcaacacgtaatgagttccgaaggttcatggagaagaatccagatgcctacgattacaacaaggctcaggtgccaggaccattgacaccagaaatggaggcacggcaggctacacggaaaagggagcagaaggcagcccggcggcaacgggaggaacagcagcagaggcagcaggagcaggaggagcgtgaacgagaagagcagcggcgatttgccgccctcagtgaccgagagaagagagctctggctgcagagcgccgactcgctgcccagttgggagcccctacctctccaatccctgactctgcaatcgtcaatactcgacgctgctggagttgtggggcatccctccaaggcctgactccctttcactacctcgacttctctttctgctccacacgttgcctccaggatcatcgccgtcaggcagggaggccctcttcctgatctcttacagctctacctggggccaactcagggacctgagagggcacattcacagcagccctaggttttttcttccccgtgaaaccagagatgatttggaagatgggggtgaaggacactcgggaactagggcaaagacagggctagaggtatgtggagctggtactgtctctggaattttaatcacaataaagtttggcaaggaa

SEQ ID NO: 282291 - DNA, 897 bp, Homo sapiens
agttattgcagtggaggctgggttgaatcggccgagggaaatccggcaatcgacctgaggacttgcgagccgctcagctcccgggacgtttggagctgctgctaaataatttctgctcagccatgtcgccggctccagatgcagccccggctcctgcgtcgatctccctgtttgacctcagcgcggatgctccggtctttcagggcctgagcctgagggaacattataagcttgactggcatcggtttaacctaaagcaacgtctcaaggacaagcctctcctgtctgccctggactttgaaaagcagagctccacaggagatctttccagcatctcgggatcagaagactcagactcagccagtgaggaggacttgcagacactggatcgggagagggctacatttgagaagttgagccgacccccaggcttttaccctcatcgagttcttttccagaatgcccagggccagtttctttatgcctaccgctgtgtcctaggccctcatcaggatcccccagaagaggcagaactgctgctacagaacctgcaaagtagaggtcccagagactgcgtggtgctcatggctgcagctgggcactttgctggtgctatatttcaagggtgagagggtgctgcatgggggtaaggatggagtggatcctgttagccagggagcaccagctggtctccagtactgagtctgtgctgtctacagaagagaagtggtgacacacaaaacttttcaccgctatacggttcgggccaagcggggcacagcccaggggcttcgggatgcccgaggtgggccatcacactctgctggagccaacctgaggcgctacaatgaagccacactatataaggtgagttaagccttttagatctggtggtac

SEQ ID NO: 282292 - DNA, 2374 bp, Homo sapiens
cacctggcgcacctgtccttttttcttctatttttcagaaccctgggcggaaagcgcgagcgagttgggcagatgccggcggccgcggtgcaggaagcggtcggcgtgtgctcctacgggatgcagctcagctgggacatcaacgatccgcagatgcctcaggagctggccctctttgaccaattccgagagtggcctgacggctatgtgcgcttcatctacagcagcgatgagaagaaggcacagcgtcacctgagcggctgggccatgcgcaacaccaacaaccacaatggccacatcctcaagaagtcgtgcctgggtgtggtggtgtgtacacaggcctgcaccctgcccgacggttcccgcctgcagctgaggccggccatctgcgacaaggcacggctgaaacagcagaagaaggcatgccctaactgtcattctgctttggagttgattccttgtcgagggcacagcggataccccgtaaccaacttttggcggcttgatggcaacgcgatcttttttcaggccaagggagttcatgatcatccaagaccagagagcaaatcagagacagaagctagaagaagcgccatcaagagacaaatggcctctttctaccaaccccagaaaaagagaattcgagaatccgaggcagaagaaaatcaagacagcagtggtcatttcagcaacatacctcccttggaaaatccagaagactttgatatagttactgaaaccagcttccctattccagggcagccttgcccttccttcccaaagtctgatgtttacaaagctacctgtgacctagccacctttcaaggagacaaaatgccacccttccagaaatactcaagcccaagaatctatttgcctaggccaccttgcagctatgaattggcaaaccctggttatacaaattcaagcccatatcccaccctttataaggattccaccagtatccctaatgacacagactgggttcatctgaacacactacaatgtaatgtcaattcatacagcagctatgagagaagctttgatttcaccaacaaacagcatggctggaaaccagctcttggaaaacccagccttgtggaaaggactaaccatgggcagtttcaggccatggccactcgcccttattataacccagagcttccctgcaggtacctcacgactccaccaccaggtgcccctgccctacaaaccgtgatcaccaccaccactaaagtgtcctaccaggcctaccagccccctgctatgaaatacagtgacagtgtgcgagaggtgaagagcctttcgagctgtaactatgctcctgaagatactgggatgtctgtctatccagaaccctggggtcctccggtgacagtcaccagggcagcctctccttcagggccacctcctatgaaaattgcaggagattgccgggccatcagacccactgtggctattccccacgagccagtttcctctaggacagatgaagcagagacttgggatgtgtgtctgtctgggctgggctccgcagtcagttactcagacagagtgggtcccttctttacctacaacaatgaggatttttgaaagacaatccaggggacataatagcagtgtgcatgcaggcaggaggcagggaaatgtgaaatggcaatgatctcttattgagttgggagattcaccttgtgtgcaaagaaacacagatagtagtaaaaattctgagtaactgagaaaataatcagttggaaatgattagataatatgggaaatttcacacagcattttgaaactggctacaatacatagaagtagtgaggaaagtgtgagtctctcaaatgaacaaataagcaaactgtaggaggttaaatactgacctaagttcacttagcttattagcaggagtagaagtcaaggattctggttcttattctaggacttttcccattagagcaccttagggaatttcacatccctagaggctgccaaaatagcttcaggaagaaatttttacaatcttatcacctgagtcatttcatgaaatttttgtttagcatttagaacctgttaaactagcttcaggaagtaattttgattgttttatctccaacgtgtgtatctacagcttttcaaaaaatctctagcaatggtaaagttcagttgtttttaaaagattcaatattagcttttcataacatgatagtttcctaaccttttcataaccttttcataacatgatagtttccataacagagacagcctaacaatgatgagttgtatttaatggattaccattgtactaaatacattttttttctgattaggtttcagaattataattaaaatgttttgctgaaatacaaaaaaacgg

SEQ ID NO: 282293 - DNA, 2588 bp, Homo sapiens
gaccggtggcccccacacagggtttcccaaagcctctccatttgtctgcactctccactgccgaccttgtaggaaatttatttccatgcccagaaatattgtttggacacagtggctcggttatcttcgcgcctgcttttcttaaatacatttatttcacctctgccacgctgcagatatttaaagatctgtagataccgtaaccctcagcgatgcgggactcactctggttatagataatattctctgggtggttatttgaacataagttctatctccagcccagatgacacccaagcaggggctgtaaaggacacttgctctagaatgttttcaactgaaatatatgtccacacacggagaatttaagagtatttttatatttctctctagatctaaatattcagatgtgttaattacatgccctagaagctggaagcattcagtggtgttcacactggacgtggagctgtttgtataattttcatctccctgcacttaaacatgactctcagtctaataaattcaaccttgtcatttttagaatcgacgggatttctctggctgtcgtttgcgctgcatttatccgaatacatccagctcgcaggcatcctgcaagaaacggctcccggctcgcgtgtacgccgacacctcggcccaacgcaggactcgaggtggtttctagtgcccgggtggctgcaagtctgccctccgagggaggctggacaagcggcgcccccaggtcgagcggcctctcgctgcctggcagtgcctggcagcccccacctctgccagtgcttcggaaacccgcctggccaggttcgcccgcggtgaaaaatgaaagcaaattccccaacagaggtagccggaactttcctcgacgaaggctccctcctgcgcctgtgtctggagaacccccagagcgctgcaagttagcaagagagattcgatggcggctctggaaggcgcacgaagggtggggcgggggagcaaagaggccactgggtgacccagcctggtccggggtgaaacgctagagaaggcgcctcgccttccttatttcaatgcaactcctcggccccagacggtaaaaatagtttccaagctgccgcggacgcccaggatgtgtttgcagagatcaaactggggaggaggcagctttgtaaaagttgcagaaagattagccgagaagcgtccgcccggcggggctcaagaaagcttggggacagctccatgttccttggggcggaatggcccaagaattggcctgggtaaccccctgcccagttctctgtcctcacttcgagccagtgcttaaataacttcccgccgcctgccctgcaaacttcccggcgcggcgccgttgaggccaggacacagcaaaggctagcaaaaccccgccgcggcgcgctcggccccggccctgagaggctgcgcgggtgggaggaccagtgtggtttctgctcccactcggctgcccagaccctcaagaccgatcccccaactcctgggagcgggtgcttccctctgggagccgagatcttgcggggccagcgagggcgcaaagtgcgcgcgctggcccgcgcgggggcggccgcgcgtctctccgcggggcctgtcgccaggccggccgcggcgcgtgagtgatgagggcagagaagggcgcccataaatcgcgggtgtcagggcgaaaaactctctttattgtctgcgtgatggatgggcccggggacgagacaccaaatacttcgtatcgcctttaaatgggaacacattttccgcggccataattcatgttttttaaatagaaagtttgaaatgttgcctatatttcaccagccctgacatatttatgaatcgctccctgcatgcaaatatcattacttaaagcgccggggagagcgcgggggaggggaggaggcgcggttcccggggcgtgggggtggtgaaccggggaaatatcggtggaggggggccatctccctaaagggcagagggtgaggtgcggtgaatagccgtatccggaaaccgagcgtgccccgggcttctttcccgccgccagaccccgcacagccgccctgggacgtttttcgaggcttgggacctaagacgggtccccggaccctgctgggaaaccagggggcgtttttcgtccctctctgaggccattatccaagctgaaaccaccttttataagaaaaaagtttaaagaaaaaaaatttaacaaacacaaataataataataacccaacatgtttcgcgttctttgccactgcatcgattttattgattttcattctgcaaacctgggaatgtgcgcgctcgggaggggaggctgtcaaaacccagtcatcgcggggactggatgggggacaattctccgacgccgcggcctggacccgcccccacccaaccggcgcaccacctcccaggcaccacggagcctgcgcaagctgcggggccgtaaaggaaccggcccccaatctccggggcttcagtcccgcccctctctccccccagtgccctgcagcgctcccagggtccgtgtctgccctccccaagcccccactgtcaatacaatccctgtt

SEQ ID NO: 282294 - DNA, 2499 bp, Homo sapiens
tgtgcgcctgccctctcggtgtcggagagacgcccttccacctctgggagcctcggtctgttggggtcgcggagttcgggcgcggctccgggtacccgagaccagcggcggcaacttctaacacgggagatttcccgccaccccaccccgccgccgcgagtcctcgcggggcgtgttgcgtgcggaggtcaggctgccaccctctgtagttccctaaccccaaactcggagacttctaagagccacaccaccaaggaacttctagtcctggaggtcaatggtggggcaaacctcgcctcaattctttgaccccctcgggtcgtaagcagggctaagaggctgcgaagaagaggcctggccatgggtgtatgggggaagaaacatctcaggctcactcatgccccctccccgaccttctcccacctgccgccatccccgcaggctggggagccaggaatcgacgggatttctctggctgtcgtttgcgctgcatttatccgaatacatccagctcgcaggcatcctgcaagaaacggctcccggctcgcgtgtacgccgacacctcggcccaacgcaggactcgaggtggtttctagtgcccgggtggctgcaagtctgccctccgagggaggctggacaagcggcgcccccaggtcgagcggcctctcgctgcctggcagtgcctggcagcccccacctctgccagtgcttcggaaacccgcctggccaggttcgcccgcggtgaaaaatgaaagcaaattccccaacagaggtagccggaactttcctcgacgaaggctccctcctgcgcctgtgtctggagaacccccagagcgctgcaagttagcaagagagattcgatggcggctctggaaggcgcacgaagggtggggcgggggagcaaagaggccactgggtgacccagcctggtccggggtgaaacgctagagaaggcgcctcgccttccttatttcaatgcaactcctcggccccagacggtaaaaatagtttccaagctgccgcggacgcccaggatgtgtttgcagagatcaaactggggaggaggcagctttgtaaaagttgcagaaagattagccgagaagcgtccgcccggcggggctcaagaaagcttggggacagctccatgttccttggggcggaatggcccaagaattggcctgggtaaccccctgcccagttctctgtcctcacttcgagccagtgcttaaataacttcccgccgcctgccctgcaaacttcccggcgcggcgccgttgaggccaggacacagcaaaggctagcaaaaccccgccgcggcgcgctcggccccggccctgagaggctgcgcgggtgggaggaccagtgtggtttctgctcccactcggctgcccagaccctcaagaccgatcccccaactcctgggagcgggtgcttccctctgggagccgagatcttgcggggccagcgagggcgcaaagtgcgcgcgctggcccgcgcgggggcggccgcgcgtctctccgcggggcctgtcgccaggccggccgcggcgcgtgagtgatgagggcagagaagggcgcccataaatcgcgggtgtcagggcgaaaaactctctttattgtctgcgtgatggatgggcccggggacgagacaccaaatacttcgtatcgcctttaaatgggaacacattttccgcggccataattcatgttttttaaatagaaagtttgaaatgttgcctatatttcaccagccctgacatatttatgaatcgctccctgcatgcaaatatcattacttaaagcgccggggagagcgcgggggaggggaggaggcgcggttcccggggcgtgggggtggtgaaccggggaaatatcggtggaggggggccatctccctaaagggcagagggtgaggtgcggtgaatagccgtatccggaaaccgagcgtgccccgggcttctttcccgccgccagaccccgcacagccgccctgggacgtttttcgaggcttgggacctaagacgggtccccggaccctgctgggaaaccagggggcgtttttcgtccctctctgaggccattatccaagctgaaaccaccttttataagaaaaaagtttaaagaaaaaaaatttaacaaacacaaataataataataacccaacatgtttcgcgttctttgccactgcatcgattttattgattttcattctgcaaacctgggaatgtgcgcgctcgggaggggaggctgtcaaaacccagtcatcgcggggactggatgggggacaattctccgacgccgcggcctggacccgcccccacccaaccggcgcaccacctcccaggcaccacggagcctgcgcaagctgcggggccgtaaaggaaccggcccccaatctccggggcttcagtcccgcccctctctccccccagtgccctgcagcgctcccagggtccgtgtctgccctccccaagcccccactgtcaatacaatccctgtt

SEQ ID NO: 282295 - DNA, 2190 bp, Homo sapiens
gtgcggcacgaggagcgggtctggaactgcccttggtatgctcgccctctcctcttggcccatctcactcccctcccccacctgactcccctccccggcttctttctctgtctcccactccgcacgggtaccgagaactttccgggaatcgacgggatttctctggctgtcgtttgcgctgcatttatccgaatacatccagctcgcaggcatcctgcaagaaacggctcccggctcgcgtgtacgccgacacctcggcccaacgcaggactcgaggtggtttctagtgcccgggtggctgcaagtctgccctccgagggaggctggacaagcggcgcccccaggtcgagcggcctctcgctgcctggcagtgcctggcagcccccacctctgccagtgcttcggaaacccgcctggccaggttcgcccgcggtgaaaaatgaaagcaaattccccaacagaggtagccggaactttcctcgacgaaggctccctcctgcgcctgtgtctggagaacccccagagcgctgcaagttagcaagagagattcgatggcggctctggaaggcgcacgaagggtggggcgggggagcaaagaggccactgggtgacccagcctggtccggggtgaaacgctagagaaggcgcctcgccttccttatttcaatgcaactcctcggccccagacggtaaaaatagtttccaagctgccgcggacgcccaggatgtgtttgcagagatcaaactggggaggaggcagctttgtaaaagttgcagaaagattagccgagaagcgtccgcccggcggggctcaagaaagcttggggacagctccatgttccttggggcggaatggcccaagaattggcctgggtaaccccctgcccagttctctgtcctcacttcgagccagtgcttaaataacttcccgccgcctgccctgcaaacttcccggcgcggcgccgttgaggccaggacacagcaaaggctagcaaaaccccgccgcggcgcgctcggccccggccctgagaggctgcgcgggtgggaggaccagtgtggtttctgctcccactcggctgcccagaccctcaagaccgatcccccaactcctgggagcgggtgcttccctctgggagccgagatcttgcggggccagcgagggcgcaaagtgcgcgcgctggcccgcgcgggggcggccgcgcgtctctccgcggggcctgtcgccaggccggccgcggcgcgtgagtgatgagggcagagaagggcgcccataaatcgcgggtgtcagggcgaaaaactctctttattgtctgcgtgatggatgggcccggggacgagacaccaaatacttcgtatcgcctttaaatgggaacacattttccgcggccataattcatgttttttaaatagaaagtttgaaatgttgcctatatttcaccagccctgacatatttatgaatcgctccctgcatgcaaatatcattacttaaagcgccggggagagcgcgggggaggggaggaggcgcggttcccggggcgtgggggtggtgaaccggggaaatatcggtggaggggggccatctccctaaagggcagagggtgaggtgcggtgaatagccgtatccggaaaccgagcgtgccccgggcttctttcccgccgccagaccccgcacagccgccctgggacgtttttcgaggcttgggacctaagacgggtccccggaccctgctgggaaaccagggggcgtttttcgtccctctctgaggccattatccaagctgaaaccaccttttataagaaaaaagtttaaagaaaaaaaatttaacaaacacaaataataataataacccaacatgtttcgcgttctttgccactgcatcgattttattgattttcattctgcaaacctgggaatgtgcgcgctcgggaggggaggctgtcaaaacccagtcatcgcggggactggatgggggacaattctccgacgccgcggcctggacccgcccccacccaaccggcgcaccacctcccaggcaccacggagcctgcgcaagctgcggggccgtaaaggaaccggcccccaatctccggggcttcagtcccgcccctctctccccccagtgccctgcagcgctcccagggtccgtgtctgccctccccaagcccccactgtcaatacaatccctgtt

SEQ ID NO: 282296 - DNA, 2778 bp, Homo sapiens
gctggcgcggcggccacgggcgcccagcgcgccttctcggcgcctggagccagacgcgagtaatcctgggtggcccgcagcggagccgtggccgggctagaggagccggctggactgcgggagtgccgggcggctcgcggtgtccgcctcgggctgctcccctgcgctgcgttctcgcggccccgcgccggcgctgcgctctgcgatgcgagccgctgcgtgtccagccggggctctggcgaggaaactcacttcaaaagcagctgcaccaagggggagattaaagcctttgccgccttccaatcaaatgggagcccgaggtgattggagggtcaaggggatgtgacgcgtcccgcgccgccgccgccgccgctgccaggactctcagtgccggttttaatgggcagctccctcttcgccgcccccctgtgtgtcccctccctcgatttcgctgggaggacgagatggacatttattctacgtttgccatccgccgcctccctcttttttcctcctcgtcgttcttcctttccccagctcgaaaataaactgaaaccttcttttgaaggggggtgcgcgtgaggaacagactgcggggggtgtccagaaggagcaccggtgggagtgtggacaccggccggactgtcaactccaggggcgaagggaacctgcacacccagtgttttttccttcgcagtaatcgagatcccgcgcggcgcagcgcagccaccaggaatcgacgggatttctctggctgtcgtttgcgctgcatttatccgaatacatccagctcgcaggcatcctgcaagaaacggctcccggctcgcgtgtacgccgacacctcggcccaacgcaggactcgaggtggtttctagtgcccgggtggctgcaagtctgccctccgagggaggctggacaagcggcgcccccaggtcgagcggcctctcgctgcctggcagtgcctggcagcccccacctctgccagtgcttcggaaacccgcctggccaggttcgcccgcggtgaaaaatgaaagcaaattccccaacagaggtagccggaactttcctcgacgaaggctccctcctgcgcctgtgtctggagaacccccagagcgctgcaagttagcaagagagattcgatggcggctctggaaggcgcacgaagggtggggcgggggagcaaagaggccactgggtgacccagcctggtccggggtgaaacgctagagaaggcgcctcgccttccttatttcaatgcaactcctcggccccagacggtaaaaatagtttccaagctgccgcggacgcccaggatgtgtttgcagagatcaaactggggaggaggcagctttgtaaaagttgcagaaagattagccgagaagcgtccgcccggcggggctcaagaaagcttggggacagctccatgttccttggggcggaatggcccaagaattggcctgggtaaccccctgcccagttctctgtcctcacttcgagccagtgcttaaataacttcccgccgcctgccctgcaaacttcccggcgcggcgccgttgaggccaggacacagcaaaggctagcaaaaccccgccgcggcgcgctcggccccggccctgagaggctgcgcgggtgggaggaccagtgtggtttctgctcccactcggctgcccagaccctcaagaccgatcccccaactcctgggagcgggtgcttccctctgggagccgagatcttgcggggccagcgagggcgcaaagtgcgcgcgctggcccgcgcgggggcggccgcgcgtctctccgcggggcctgtcgccaggccggccgcggcgcgtgagtgatgagggcagagaagggcgcccataaatcgcgggtgtcagggcgaaaaactctctttattgtctgcgtgatggatgggcccggggacgagacaccaaatacttcgtatcgcctttaaatgggaacacattttccgcggccataattcatgttttttaaatagaaagtttgaaatgttgcctatatttcaccagccctgacatatttatgaatcgctccctgcatgcaaatatcattacttaaagcgccggggagagcgcgggggaggggaggaggcgcggttcccggggcgtgggggtggtgaaccggggaaatatcggtggaggggggccatctccctaaagggcagagggtgaggtgcggtgaatagccgtatccggaaaccgagcgtgccccgggcttctttcccgccgccagaccccgcacagccgccctgggacgtttttcgaggcttgggacctaagacgggtccccggaccctgctgggaaaccagggggcgtttttcgtccctctctgaggccattatccaagctgaaaccaccttttataagaaaaaagtttaaagaaaaaaaatttaacaaacacaaataataataataacccaacatgtttcgcgttctttgccactgcatcgattttattgattttcattctgcaaacctgggaatgtgcgcgctcgggaggggaggctgtcaaaacccagtcatcgcggggactggatgggggacaattctccgacgccgcggcctggacccgcccccacccaaccggcgcaccacctcccaggcaccacggagcctgcgcaagctgcggggccgtaaaggaaccggcccccaatctccggggcttcagtcccgcccctctctccccccagtgccctgcagcgctcccagggtccgtgtctgccctccccaagcccccactgtcaatacaatccctgtt

SEQ ID NO: 282297 - DNA, 2231 bp, Homo sapiens
tgtgcgcctgccctctcggtgtcggagagacgcccttccacctctgggagcctcggtctgttggggtcgcggagttcgggcgcggctccgggtacccgagaccagcggcggcaacttctaacacgggagatttcccgccaccccaccccgccgccgcgagtcctcgcggggcgtgttgcgtgcggagaatcgacgggatttctctggctgtcgtttgcgctgcatttatccgaatacatccagctcgcaggcatcctgcaagaaacggctcccggctcgcgtgtacgccgacacctcggcccaacgcaggactcgaggtggtttctagtgcccgggtggctgcaagtctgccctccgagggaggctggacaagcggcgcccccaggtcgagcggcctctcgctgcctggcagtgcctggcagcccccacctctgccagtgcttcggaaacccgcctggccaggttcgcccgcggtgaaaaatgaaagcaaattccccaacagaggtagccggaactttcctcgacgaaggctccctcctgcgcctgtgtctggagaacccccagagcgctgcaagttagcaagagagattcgatggcggctctggaaggcgcacgaagggtggggcgggggagcaaagaggccactgggtgacccagcctggtccggggtgaaacgctagagaaggcgcctcgccttccttatttcaatgcaactcctcggccccagacggtaaaaatagtttccaagctgccgcggacgcccaggatgtgtttgcagagatcaaactggggaggaggcagctttgtaaaagttgcagaaagattagccgagaagcgtccgcccggcggggctcaagaaagcttggggacagctccatgttccttggggcggaatggcccaagaattggcctgggtaaccccctgcccagttctctgtcctcacttcgagccagtgcttaaataacttcccgccgcctgccctgcaaacttcccggcgcggcgccgttgaggccaggacacagcaaaggctagcaaaaccccgccgcggcgcgctcggccccggccctgagaggctgcgcgggtgggaggaccagtgtggtttctgctcccactcggctgcccagaccctcaagaccgatcccccaactcctgggagcgggtgcttccctctgggagccgagatcttgcggggccagcgagggcgcaaagtgcgcgcgctggcccgcgcgggggcggccgcgcgtctctccgcggggcctgtcgccaggccggccgcggcgcgtgagtgatgagggcagagaagggcgcccataaatcgcgggtgtcagggcgaaaaactctctttattgtctgcgtgatggatgggcccggggacgagacaccaaatacttcgtatcgcctttaaatgggaacacattttccgcggccataattcatgttttttaaatagaaagtttgaaatgttgcctatatttcaccagccctgacatatttatgaatcgctccctgcatgcaaatatcattacttaaagcgccggggagagcgcgggggaggggaggaggcgcggttcccggggcgtgggggtggtgaaccggggaaatatcggtggaggggggccatctccctaaagggcagagggtgaggtgcggtgaatagccgtatccggaaaccgagcgtgccccgggcttctttcccgccgccagaccccgcacagccgccctgggacgtttttcgaggcttgggacctaagacgggtccccggaccctgctgggaaaccagggggcgtttttcgtccctctctgaggccattatccaagctgaaaccaccttttataagaaaaaagtttaaagaaaaaaaatttaacaaacacaaataataataataacccaacatgtttcgcgttctttgccactgcatcgattttattgattttcattctgcaaacctgggaatgtgcgcgctcgggaggggaggctgtcaaaacccagtcatcgcggggactggatgggggacaattctccgacgccgcggcctggacccgcccccacccaaccggcgcaccacctcccaggcaccacggagcctgcgcaagctgcggggccgtaaaggaaccggcccccaatctccggggcttcagtcccgcccctctctccccccagtgccctgcagcgctcccagggtccgtgtctgccctccccaagcccccactgtcaatacaatccctgtt

SEQ ID NO: 282298 - DNA, 1445 bp, Homo sapiens
gcgtcactcgcgaagtggaatttgcccagacaagcaacatggctcggaaacgcgcggccggcggggagccgcggggacgcgaactgcgcagccagaaatccaaggccaagagcaaggcccggcgtgaggaggaggaggaggatgcctttgaagatgagaaacccccaaagaagagccttctctccaaagtttcacaaggaaagaggaaaagaggctgcagtcatcctgggggttcagcagatggtccagcaaaaaagaaagtggccaaggtgactgttaaatctgaaaacctcaaggttataaaggatgaagccctcagcgatggggatgacctcagggactttccaagtgacctcaagaaggcacaccatctgaagagaggggctaccatgaatgaagacagcaatgaagaagaggaagaaagtgaaaatgattgggaagaggttgaagaacttagtgagcctgtgctgggtgacgtgagagaaagtacagccttctctcgatctcttctgcctgtgaagccagtggagatagagattgaaacgccagagcaggcgaagacaagagaaagaagtgaaaagataaaactggagtttgagacatatcttcggagggcgatgaaacgtttcaataaaggggtccatgaggacacacacaaggttcaccttctctgcctgctagcaaatggcttctatcgaaataacatctgcagccagccagatctgcatgctattggcctgtccatcatcccagcccgctttaccagagtgctgcctcgagatgtggacacctactacctctcaaacctggtgaagtggttcattggaacatttacagttaatgcagaactttcagccagtgaacaagataacctgcagactacattggaaaggagatttgctatttactctgctcgagatgatgaggaattggtccatatattcttactgattctccgggctctgcagctcttgacccggctggtattgtctctacagccaattcctctgaagtcagcaacagcaaagggaaagaaaccttccaaggaaagattgactgcggatccaggaggctcctcagaaacttccagccaagttctagaaaaccacaccaaaccaaagaccagcaaaggaaccaaacaagaggaaacctttgctaagggcacctgcaggccaagtgccaaagggaagaggaacaagggaggcagaaagaaacggagcaagccctcctccagcgaggaagatgagggcccaggagacaagcaggagaaggcaaccagcgacgtccgcatggccgggagcggcgggtggcctccagggtgtcttataaacgaggagagtgggagtgatgaggctggcagcggctctgattttgagctctcgcagtggagaagcctctgatccctctgatgaggattccgaacctggccctccaaagcagaggaa

SEQ ID NO: 282299 - DNA, 173 bp, Homo sapiens
ctggggacatcttgatgtattggttctctagctggtgacttaaccctattagattacaggatttctatcatatcattagcaaaagaggggggagaaaaaaaagcaaaatttcttattctgtttaagggaaagaaaccttccaaggaaagattgactgcggatccaggaggctc

SEQ ID NO: 282300 - DNA, 2769 bp, Homo sapiens
cggccactgtaaacagcaagcagttgacgggaagactagctctgttgctactaagcagcttttacttttgtaaagtcagctctgttgttttaaatggtaaaaattaaactaatgaacttgcagactgtggcgcaactggtcttggtagcggaggcacccgaatgctgcccgggtgagatgaggaagccaaggcccagcagagctgagatgtgactgcagagccgtccaaccccagtcctgtgacctttctctggtgcctgatacctctcagcatttgagggccttttctcttcctgcttcatctctaaaggtccttctaggagagaggtgaaagaaacctggcaaagaaaacggtctcgacaatgagtaggccacccatcactactaactacagatgacttgccatttcatttacaaagatgtcttctgctgctgaaaatggagaggcagcacctggaaaacaaaatgaagaaaaaacctataaaaagactgcatcatctgctattaaaggtgctattcagctgggaataggatacacagtgggtaatctcacttccaagccagaacgagatgttcttatgcaagacttttatgtggtggaaagtgtgttcctacccagcgaagggagcaatctgaccccagcacatcactacccagactttagatttaagacatacgctccattagcattccgatatttcagagaactttttggtatcaagcctgatgattacttgtattccatctgcagtgaacctctaatagaactgtctaaccctggagccagtggatccttgttttttgtgaccagtgatgatgaatttatcatcaaaacagttcagcacaaagaagctgagtttcttcagaagctactgccaggctattacatgaatttaaaccagaatccaaggactcttttgccaaaattttacggactgtattgtatgcaatcaggaggcattaatatcaggattgtggtgatgaacaacgttttgccacgctccatgagaatgcactttacatatgacttgaaaggctcaacgtataagcgaagagcatcccgtaaagagagagagaaatccaaccccacatttaaggacttagatttcctgcaagacatgcacgaagggttgtattttgatacggaaacatacaacgcgcttatgaaaacacttcagagagactgccgggtgctagaaagcttcaagatcatggattatagccttctgttgggaattcatttcctggaccattccctcaaagagaaagaggaggagaccccacaaaatgtgcctgatgctaagcggactgggatgcagaaggttctctactcaacagccatggaatctatccagggtccagggaaatctggagatgggataatcacagagaacccagacacaatgggaggcattccagctaaaagccataggggagaaaaactacttttatttatgggcattattgacattctgcaatcatataggttaatgaagaagttagaacattcctggaaagctcttgtttatgatggggacactgtttctgttcatagaccaagcttttatgcagacagatttcttaagttcatgaattccagagttttcaagaaaattcaagctttgaaggcttcaccgtctaagaaacggtgcaattcaatcgccgccctaaaggccacttcacaggagattgtgtcctcaattagccaggaatggaaggatgagaagcgggatttgctgactgaaggacaaagttttagcagccttgatgaagaagccctgggatcccgacacaggccagacctggtccctagcactccatcactgtttgaagctgcttccttggcaaccacaatttcatcttcttccttatacgtcaatgagcactatccacacgacaggcctacactctattcaaacagcaaagggttaccttccagttcaacatttaccttggaagaggggaccatctacttgaccgctgagcccaacactctggaagtgcaggatgacaatgcttctgtgcttgacgtctatttataagtgaaaatggtgatcacctaagcacatggatgagacgtgagcacagttatggcagagaagtttctccgcaccagaattatccacagcaacttggctgagccccactacacacagagaaatcatcaacctgacttaagagttttcaagatgtcaacttcaggctgatcagcagatgggatgtgaaaaatactaccctattctatcatttgctgttgcttgctgaactgtgaagaactgcatgaactatatttaagctgctttctgtaccattgccaatcacctttttggagttggaagtgctattttcctatggacttttgcattatttcattgtgcatgcatccagtgattatacataagcaacatatgtaatctgcttatatatttttaaaaatccatccacacacatggtaaattaagtataaattcttttgcaaaattatagttcatgtcattgaaagtttaaattggtttcatttaaagatcaatatactaggtctgccttcactttatagaaaactagcttctataaagattttttcactgtttactagtgaaatgagaaaagcaaagctatttataaaaggccttatgtcgtgtacatacattgtctttgaaatatttgtgatctagtttattgcttgtaaaagagaaattatataatttatttagtaaatactactgtaaactatagttttgtgagagaaataaaatattttgttctcaa

SEQ ID NO: 282301 - DNA, 1184 bp, Homo sapiens
ctcccaacggacacccacccgctcgtcacccggatccccggggccgcagtgacactcggagatcactctgggttcacttaaataggagtactctccccttttccggggaacctgcagagtttggcagcggaaggaaaggtctcccaccaccctcccccggtacgaaacagcggtgaacttgttaggcgccctggtatctcaagaggggcttgcgagttggtgttctgctcatttctggcgctggtgccggattgaacagatgaggaaactgaggtttagacaagcagtgggagttttccatggatttacatctcatttagtggcatttgcaagactagaacttggatcttctgatgtccagtccattgctttgtgtattctgccatcatttcagttctgatagcaatgaggacacatcatggaaactgcaatacacaaaggactgttaagcatgcccccagtgacctgggttctagttctgggactacatttggccgtatgacctgggccatcatatcacttccaagtctcaagtgtctcacatataaaacaaaacgtttgtatgaaattatgttttttctttccaactttagcattttgtgatgtttaccaatgtgtttgtaatccaatgttatcattttctctagaggaaggagacctttgtaccccacatcacctaagagacctagctaattactctttcacctttagtttatcccttcccccctttactacatgccacttcatcaaaggaatgaaacttaacaagtgcgttttagcttaacatctacagtatattgtttagtttactgtttgacttgaaaatattctgaggggttaaagtactgtaaggtacatgtcagggcttacttgaatattctaattgtaagctcataactttttttttttagctttatggtttgcataaagtaagtgctcagtaaatagctgttgaattaatgaagggggtgaatgaagtcattcataaggaaaacatatgctgtaaaacatagaaagcatcttaccatgtaaattcccaacacataagataatttgcctacaggcatgtgcctcctgaagctggcgggtacagagcccattgttgctctcttttctgaaggcatcatatagggaagagcttttctttctccctagacagtagactcatgtcatctatgttatgc

SEQ ID NO: 282302 - DNA, 800 bp, Homo sapiens
agcggattccaagttctaaacagctgagtttggatctcagctcctttgagagttgtggaccagtcagacacaaaattatctttaaatatacagatagggatgaggaagccaaggcccagcagagctgagatgtgactgcagagccgtccaaccccagtcctgtgacctttctctggtgcctgatacctctcagcatttgagggccttttctcttcctgcttcatctctaaaggtccttctaggagagaggtgaaagaaacctggcaaagaaaacggtctcgacaatgagtaggccacccatcactactaactacagatgacttgccatttcatttacaaagatgtcttctgctgctgaaaatggagaggcagcacctggaaaacaaaatgaagaaaaaacctataaaaagacacaagtgaaaaaccaaatcctgtctcgtttacccaagattccgtgtacattcattcaagcatggaccaacacagagatgattacgttgctagcctgttattacttcagatcagtttcagactgcatcatctgctattaaaggtgctattcagctgggaataggatacacagtgggtaatctcacttccaagccagaacgagatgttcttatgcaagacttttatgtggtggaaagtgtgttcctacccagcgaagggagcaatctgaccccagcacatcactacccagactttagatttaagacatacgctccattagcattccgatatttcagagaactttttggtatcaagcctgatgattacttggtaagaacctgtcatttttc

SEQ ID NO: 282303 - DNA, 2691 bp, Homo sapiens
agcggattccaagttctaaacagctgagtttggatctcagctcctttgagagttgtggaccagtcagacacaaaattatctttaaatatacagatagggatgaggaagccaaggcccagcagagctgagatgtgactgcagagccgtccaaccccagtcctgtgacctttctctggtgcctgatacctctcagcatttgagggccttttctcttcctgcttcatctctaaaggtccttctaggagagaggtgaaagaaacctggcaaagaaaacggtctcgacaatgagtaggccacccatcactactaactacagatgacttgccatttcatttacaaagatgtcttctgctgctgaaaatggagaggcagcacctggaaaacaaaatgaagaaaaaacctataaaaagactgcatcatctgctattaaaggtgctattcagctgggaataggatacacagtgggtaatctcacttccaagccagaacgagatgttcttatgcaagacttttatgtggtggaaagtgtgttcctacccagcgaagggagcaatctgaccccagcacatcactacccagactttagatttaagacatacgctccattagcattccgatatttcagagaactttttggtatcaagcctgatgattacttgtattccatctgcagtgaacctctaatagaactgtctaaccctggagccagtggatccttgttttttgtgaccagtgatgatgaatttatcatcaaaacagttcagcacaaagaagctgagtttcttcagaagctactgccaggctattacatgaatttaaaccagaatccaaggactcttttgccaaaattttacggactgtattgtatgcaatcaggaggcattaatatcaggattgtggtgatgaacaacgttttgccacgctccatgagaatgcactttacatatgacttgaaaggctcaacgtataagcgaagagcatcccgtaaagagagagagaaatccaaccccacatttaaggacttagatttcctgcaagacatgcacgaagggttgtattttgatacggaaacatacaacgcgcttatgaaaacacttcagagagactgccgggtgctagaaagcttcaagatcatggattatagccttctgttgggaattcatttcctggaccattccctcaaagagaaagaggaggagaccccacaaaatgtgcctgatgctaagcggactgggatgcagaaggttctctactcaacagccatggaatctatccagggtccagggaaatctggagatgggataatcacagagaacccagacacaatgggaggcattccagctaaaagccataggggagaaaaactacttttatttatgggcattattgacattctgcaatcatataggttaatgaagaagttagaacattcctggaaagctcttgtttatgatggggacactgtttctgttcatagaccaagcttttatgcagacagatttcttaagttcatgaattccagagttttcaagaaaattcaagctttgaaggcttcaccgtctaagaaacggtgcaattcaatcgccgccctaaaggccacttcacaggagattgtgtcctcaattagccaggaatggaaggatgagaagcgggatttgctgactgaaggacaaagttttagcagccttgatgaagaagccctgggatcccgacacaggccagacctggtccctagcactccatcactgtttgaagctgcttccttggcaaccacaatttcatcttcttccttatacgtcaatgagcactatccacacgacaggcctacactctattcaaacagcaaagggttaccttccagttcaacatttaccttggaagaggggaccatctacttgaccgctgagcccaacactctggaagtgcaggatgacaatgcttctgtgcttgacgtctatttataagtgaaaatggtgatcacctaagcacatggatgagacgtgagcacagttatggcagagaagtttctccgcaccagaattatccacagcaacttggctgagccccactacacacagagaaatcatcaacctgacttaagagttttcaagatgtcaacttcaggctgatcagcagatgggatgtgaaaaatactaccctattctatcatttgctgttgcttgctgaactgtgaagaactgcatgaactatatttaagctgctttctgtaccattgccaatcacctttttggagttggaagtgctattttcctatggacttttgcattatttcattgtgcatgcatccagtgattatacataagcaacatatgtaatctgcttatatatttttaaaaatccatccacacacatggtaaattaagtataaattcttttgcaaaattatagttcatgtcattgaaagtttaaattggtttcatttaaagatcaatatactaggtctgccttcactttatagaaaactagcttctataaagattttttcactgtttactagtgaaatgagaaaagcaaagctatttataaaaggccttatgtcgtgtacatacattgtctttgaaatatttgtgatctagtttattgcttgtaaaagagaaattatataatttatttagtaaatactactgtaaactatagttttgtgagagaaataaaatattttgttctcaa

SEQ ID NO: 282304 - DNA, 2594 bp, Homo sapiens
ctcccaacggacacccacccgctcgtcacccggatccccggggccgcagtgacactcggagatcactctgggttcacttaaataggagtactctccccttttccggggaacctgcagagtttggcagcggaaggaaaggtctcccaccaccctcccccgaaacctggcaaagaaaacggtctcgacaatgagtaggccacccatcactactaactacagatgacttgccatttcatttacaaagatgtcttctgctgctgaaaatggagaggcagcacctggaaaacaaaatgaagaaaaaacctataaaaagactgcatcatctgctattaaaggtgctattcagctgggaataggatacacagtgggtaatctcacttccaagccagaacgagatgttcttatgcaagacttttatgtggtggaaagtgtgttcctacccagcgaagggagcaatctgaccccagcacatcactacccagactttagatttaagacatacgctccattagcattccgatatttcagagaactttttggtatcaagcctgatgattacttgtattccatctgcagtgaacctctaatagaactgtctaaccctggagccagtggatccttgttttttgtgaccagtgatgatgaatttatcatcaaaacagttcagcacaaagaagctgagtttcttcagaagctactgccaggctattacatgaatttaaaccagaatccaaggactcttttgccaaaattttacggactgtattgtatgcaatcaggaggcattaatatcaggattgtggtgatgaacaacgttttgccacgctccatgagaatgcactttacatatgacttgaaaggctcaacgtataagcgaagagcatcccgtaaagagagagagaaatccaaccccacatttaaggacttagatttcctgcaagacatgcacgaagggttgtattttgatacggaaacatacaacgcgcttatgaaaacacttcagagagactgccgggtgctagaaagcttcaagatcatggattatagccttctgttgggaattcatttcctggaccattccctcaaagagaaagaggaggagaccccacaaaatgtgcctgatgctaagcggactgggatgcagaaggttctctactcaacagccatggaatctatccagggtccagggaaatctggagatgggataatcacagagaacccagacacaatgggaggcattccagctaaaagccataggggagaaaaactacttttatttatgggcattattgacattctgcaatcatataggttaatgaagaagttagaacattcctggaaagctcttgtttatgatggggacactgtttctgttcatagaccaagcttttatgcagacagatttcttaagttcatgaattccagagttttcaagaaaattcaagctttgaaggcttcaccgtctaagaaacggtgcaattcaatcgccgccctaaaggccacttcacaggagattgtgtcctcaattagccaggaatggaaggatgagaagcgggatttgctgactgaaggacaaagttttagcagccttgatgaagaagccctgggatcccgacacaggccagacctggtccctagcactccatcactgtttgaagctgcttccttggcaaccacaatttcatcttcttccttatacgtcaatgagcactatccacacgacaggcctacactctattcaaacagcaaagggttaccttccagttcaacatttaccttggaagaggggaccatctacttgaccgctgagcccaacactctggaagtgcaggatgacaatgcttctgtgcttgacgtctatttataagtgaaaatggtgatcacctaagcacatggatgagacgtgagcacagttatggcagagaagtttctccgcaccagaattatccacagcaacttggctgagccccactacacacagagaaatcatcaacctgacttaagagttttcaagatgtcaacttcaggctgatcagcagatgggatgtgaaaaatactaccctattctatcatttgctgttgcttgctgaactgtgaagaactgcatgaactatatttaagctgctttctgtaccattgccaatcacctttttggagttggaagtgctattttcctatggacttttgcattatttcattgtgcatgcatccagtgattatacataagcaacatatgtaatctgcttatatatttttaaaaatccatccacacacatggtaaattaagtataaattcttttgcaaaattatagttcatgtcattgaaagtttaaattggtttcatttaaagatcaatatactaggtctgccttcactttatagaaaactagcttctataaagattttttcactgtttactagtgaaatgagaaaagcaaagctatttataaaaggccttatgtcgtgtacatacattgtctttgaaatatttgtgatctagtttattgcttgtaaaagagaaattatataatttatttagtaaatactactgtaaactatagttttgtgagagaaataaaatattttgttctcaa

SEQ ID NO: 282305 - DNA, 2651 bp, Homo sapiens
gctgaacccaagagactgatgtattgcccagactcctgcacgctgtctgccagccacagatgaggaagccaaggcccagcagagctgagatgtgactgcagagccgtccaaccccagtcctgtgacctttctctggtgcctgatacctctcagcatttgagggccttttctcttcctgcttcatctctaaaggtccttctaggagagaggtgaaagaaacctggcaaagaaaacggtctcgacaatgagtaggccacccatcactactaactacagatgacttgccatttcatttacaaagatgtcttctgctgctgaaaatggagaggcagcacctggaaaacaaaatgaagaaaaaacctataaaaagactgcatcatctgctattaaaggtgctattcagctgggaataggatacacagtgggtaatctcacttccaagccagaacgagatgttcttatgcaagacttttatgtggtggaaagtgtgttcctacccagcgaagggagcaatctgaccccagcacatcactacccagactttagatttaagacatacgctccattagcattccgatatttcagagaactttttggtatcaagcctgatgattacttgtattccatctgcagtgaacctctaatagaactgtctaaccctggagccagtggatccttgttttttgtgaccagtgatgatgaatttatcatcaaaacagttcagcacaaagaagctgagtttcttcagaagctactgccaggctattacatgaatttaaaccagaatccaaggactcttttgccaaaattttacggactgtattgtatgcaatcaggaggcattaatatcaggattgtggtgatgaacaacgttttgccacgctccatgagaatgcactttacatatgacttgaaaggctcaacgtataagcgaagagcatcccgtaaagagagagagaaatccaaccccacatttaaggacttagatttcctgcaagacatgcacgaagggttgtattttgatacggaaacatacaacgcgcttatgaaaacacttcagagagactgccgggtgctagaaagcttcaagatcatggattatagccttctgttgggaattcatttcctggaccattccctcaaagagaaagaggaggagaccccacaaaatgtgcctgatgctaagcggactgggatgcagaaggttctctactcaacagccatggaatctatccagggtccagggaaatctggagatgggataatcacagagaacccagacacaatgggaggcattccagctaaaagccataggggagaaaaactacttttatttatgggcattattgacattctgcaatcatataggttaatgaagaagttagaacattcctggaaagctcttgtttatgatggggacactgtttctgttcatagaccaagcttttatgcagacagatttcttaagttcatgaattccagagttttcaagaaaattcaagctttgaaggcttcaccgtctaagaaacggtgcaattcaatcgccgccctaaaggccacttcacaggagattgtgtcctcaattagccaggaatggaaggatgagaagcgggatttgctgactgaaggacaaagttttagcagccttgatgaagaagccctgggatcccgacacaggccagacctggtccctagcactccatcactgtttgaagctgcttccttggcaaccacaatttcatcttcttccttatacgtcaatgagcactatccacacgacaggcctacactctattcaaacagcaaagggttaccttccagttcaacatttaccttggaagaggggaccatctacttgaccgctgagcccaacactctggaagtgcaggatgacaatgcttctgtgcttgacgtctatttataagtgaaaatggtgatcacctaagcacatggatgagacgtgagcacagttatggcagagaagtttctccgcaccagaattatccacagcaacttggctgagccccactacacacagagaaatcatcaacctgacttaagagttttcaagatgtcaacttcaggctgatcagcagatgggatgtgaaaaatactaccctattctatcatttgctgttgcttgctgaactgtgaagaactgcatgaactatatttaagctgctttctgtaccattgccaatcacctttttggagttggaagtgctattttcctatggacttttgcattatttcattgtgcatgcatccagtgattatacataagcaacatatgtaatctgcttatatatttttaaaaatccatccacacacatggtaaattaagtataaattcttttgcaaaattatagttcatgtcattgaaagtttaaattggtttcatttaaagatcaatatactaggtctgccttcactttatagaaaactagcttctataaagattttttcactgtttactagtgaaatgagaaaagcaaagctatttataaaaggccttatgtcgtgtacatacattgtctttgaaatatttgtgatctagtttattgcttgtaaaagagaaattatataatttatttagtaaatactactgtaaactatagttttgtgagagaaataaaatattttgttctcaa

SEQ ID NO: 282306 - DNA, 2430 bp, Homo sapiens
ctcgcctgcactgctctcccttcgctgtggggaagcgacaacgtcccgataacttgcagactgtggcgcaactggtcttggtagcggaggcacccgaatgctgcccgggtgagaaacctggcaaagaaaacggtctcgacaatgagtaggccacccatcactactaactacagatgacttgccatttcatttacaaagatgtcttctgctgctgaaaatggagaggcagcacctggaaaacaaaatgaagaaaaaacctataaaaagactgcatcatctgctattaaaggtgctattcagctgggaataggatacacagtgggtaatctcacttccaagccagaacgagatgttcttatgcaagacttttatgtggtggaaagtgtgttcctacccagtattccatctgcagtgaacctctaatagaactgtctaaccctggagccagtggatccttgttttttgtgaccagtgatgatgaatttatcatcaaaacagttcagcacaaagaagctgagtttcttcagaagctactgccaggctattacatgaatttaaaccagaatccaaggactcttttgccaaaattttacggactgtattgtatgcaatcaggaggcattaatatcaggattgtggtgatgaacaacgttttgccacgctccatgagaatgcactttacatatgacttgaaaggctcaacgtataagcgaagagcatcccgtaaagagagagagaaatccaaccccacatttaaggacttagatttcctgcaagacatgcacgaagggttgtattttgatacggaaacatacaacgcgcttatgaaaacacttcagagagactgccgggtgctagaaagcttcaagatcatggattatagccttctgttgggaattcatttcctggaccattccctcaaagagaaagaggaggagaccccacaaaatgtgcctgatgctaagcggactgggatgcagaaggttctctactcaacagccatggaatctatccagggtccagggaaatctggagatgggataatcacagagaacccagacacaatgggaggcattccagctaaaagccataggggagaaaaactacttttatttatgggcattattgacattctgcaatcatataggttaatgaagaagttagaacattcctggaaagctcttgtttatgatggggacactgtttctgttcatagaccaagcttttatgcagacagatttcttaagttcatgaattccagagttttcaagaaaattcaagctttgaaggcttcaccgtctaagaaacggtgcaattcaatcgccgccctaaaggccacttcacaggagattgtgtcctcaattagccaggaatggaaggatgagaagcgggatttgctgactgaaggacaaagttttagcagccttgatgaagaagccctgggatcccgacacaggccagacctggtccctagcactccatcactgtttgaagctgcttccttggcaaccacaatttcatcttcttccttatacgtcaatgagcactatccacacgacaggcctacactctattcaaacagcaaagggttaccttccagttcaacatttaccttggaagaggggaccatctacttgaccgctgagcccaacactctggaagtgcaggatgacaatgcttctgtgcttgacgtctatttataagtgaaaatggtgatcacctaagcacatggatgagacgtgagcacagttatggcagagaagtttctccgcaccagaattatccacagcaacttggctgagccccactacacacagagaaatcatcaacctgacttaagagttttcaagatgtcaacttcaggctgatcagcagatgggatgtgaaaaatactaccctattctatcatttgctgttgcttgctgaactgtgaagaactgcatgaactatatttaagctgctttctgtaccattgccaatcacctttttggagttggaagtgctattttcctatggacttttgcattatttcattgtgcatgcatccagtgattatacataagcaacatatgtaatctgcttatatatttttaaaaatccatccacacacatggtaaattaagtataaattcttttgcaaaattatagttcatgtcattgaaagtttaaattggtttcatttaaagatcaatatactaggtctgccttcactttatagaaaactagcttctataaagattttttcactgtttactagtgaaatgagaaaagcaaagctatttataaaaggccttatgtcgtgtacatacattgtctttgaaatatttgtgatctagtttattgcttgtaaaagagaaattatataatttatttagtaaatactactgtaaactatagttttgtgagagaaataaaatattttgttctcaa

SEQ ID NO: 282307 - DNA, 3085 bp, Homo sapiens
  misc_feature (2880)..(2880): n is a, c, g, or t
ctcgcctgcactgctctcccttcgctgtggggaagcgacaacgtcccgataacttgcagactgtggcgcaactggtcttggtagcggaggcacccgaatgctgcccgggtgagatgaggaagccaaggcccagcagagctgagatgtgactgcagagccgtccaaccccagtcctgtgacctttctctggtgcctgatacctctcagcatttgagggccttttctcttcctgcttcatctctaaaggtccttctaggagagaggtgaaagaaacctggcaaagaaaacggtctcgacaatgagtaggccacccatcactactaactacagatgacttgccatttcatttacaaagatgtcttctgctgctgaaaatggagaggcagcacctggaaaacaaaatgaagaaaaaacctataaaaagactgcatcatctgctattaaaggtgctattcagctgggaataggatacacagtgggtaatctcacttccaagccagaacgagatgttcttatgcaagacttttatgtggtggaaagtgtgttcctacccagcgaagggagcaatctgaccccagcacatcactacccagactttagatttaagacatacgctccattagcattccgatatttcagagaactttttggtatcaagcctgatgattacttgtattccatctgcagtgaacctctaatagaactgtctaaccctggagccagtggatccttgttttttgtgaccagtgatgatgaatttatcatcaaaacagttcagcacaaagaagctgagtttcttcagaagctactgccaggctattacatgaatttaaaccagaatccaaggactcttttgccaaaattttacggactgtattgtatgcaatcaggaggcattaatatcaggattgtggtgatgaacaacgttttgccacgctccatgagaatgcactttacatatgacttgaaaggctcaacgtataagcgaagagcatcccgtaaagagagagagaaatccaaccccacatttaaggacttagatttcctgcaagacatgcacgaagggttgtattttgatacggaaacatacaacgcgcttatgaaaacacttcagagagactgccgggtgctagaaagcttcaagatcatggattatagccttctgttgggaattcatttcctggaccattccctcaaagagaaagaggaggagaccccacaaaatgtgcctgatgctaagcggactgggatgcagaaggttctctactcaacagccatggaatctatccagggtccagggaaatctggagatgggataatcacagagaacccagacacaatgggaggcattccagctaaaagccataggggagaaaaactacttttatttatgggcattattgacattctgcaatcatataggttaatgaagaagttagaacattcctggaaagctcttgtttatgatggggacactgtttctgttcatagaccaagcttttatgcagacagatttcttaagttcatgaattccagagttttcaagaaaattcaagctttgaaggcttcaccgtctaagaaacggtgcaattcaatcgccgccctaaaggccacttcacaggagattgtgtcctcaattagccaggaatggaaggatgagaagcgggatttgctgactgaaggacaaagttttagcagccttgatgaagaagccctgggatcccgacacaggccagacctggtccctagcactccatcactgtttgaagctgcttccttggcaaccacaatttcatcttcttccttatacgtcaatgagcactatccacacgacaggcctacactctattcaaacagcaaagggttaccttccagttcaacatttaccttggaagaggggaccatctacttgaccgctgagcccaacactctggaagtgcaggatgacaatgcttctgtgcttgacgtctatttataagtgaaaatggtgatcacctaagcacatggatgagacgtgagcacagttatggcagagaagtttctccgcaccagaattatccacagcaacttggctgagccccactacacacagagaaatcatcaacctgacttaagagttttcaagatgtcaacttcaggctgatcagcagatgggatgtgaaaaatactaccctattctatcatttgctgttgcttgctgaactgtgaagaactgcatgaactatatttaagctgctttctgtaccattgccaatcacctttttggagttggaagtgctattttcctatggacttttgcattatttcattgtgcatgcatccagtgattatacataagcaacatatgtaatctgcttatatatttttaaaaatccatccacacacatggtaaattaagtataaattcttttgcaaaattatagttcatgtcattgaaagtttaaattggtttcatttaaagatcaatatactaggtctgccttcactttatagaaaactagcttctataaagattttttcactgtttactagtgaaatgagaaaagcaaagctatttataaaaggccttatgtcgtgtacatacattgtctttgaaatatttgtgatctagtttattgcttgtaaaagagaaattatataatttatttagtaaatactactgtaaactatagttttgtgagagaaataaaatattttgttctcaaaaaaaaaaaaaaaaaaaaaaaaaaaaaaattttggggcgcggccttgggcccctggaaaggtttttaaaaccatttgggtgggggggcggggggccctttgggttcgaggtgacagtgggccacaacagcggtgttctctaaggagaagaaccgcggggacaaggacacaagagngggtgtcggggttttctctcacgcaaaattatacaaacacgggccggggggggacaaaacaggaagctcgttcttctgaaaccaaacgtccgaaagaggggagtacgcggggaggacacatcgagacgggattcttcataaacgagagggagtcgccaagggagaagtgccgaatatcaaatttgagcccgagccgtcggtgtgt

SEQ ID NO: 282308 - DNA, 759 bp, Homo sapiens
ctcgcctgcactgctctcccttcgctgtggggaagcgacaacgtcccgataacttgcagactgtggcgcaactggtcttggtagcggaggcacccgaatgctgcccgggtgagatgaggaagccaaggcccagcagagctgagatgtgactgcagagccgtccaaccccagtcctgtgacctttctctggtgcctgatacctctcagcatttgagggccttttctcttcctgcttcatctctaaaggtccttctaggagagaggtgaaagaaacctggcaaagaaaacggtctcgacaatgagtaggccacccatcactactaactacagatgacttgccatttcatttacaaagatgtcttctgctgctgaaaatggagaggcagcacctggaaaacaaaatgaagaaaaaacctataaaaagactgcatcatctgctattaaaggtgctattcagctgggaataggatacacagtgggtaatctcacttccaagccagaacgagatgttcttatgcaagacttttatgtggtggaaagtgtgttcctacccagcgaagggagcaatctgaccccagcacatcactacccagactttagatttaagacatacgctccattagcattccgatatttcagagaactttttggtatcaagcctgatgattacttgatgaggaatctgaagctgggatcagcaaagggagatgcccaaggttacacacattggtgggggcagagcctagaccaaacagtggt

SEQ ID NO: 282309 - DNA, 1102 bp, Homo sapiens
cggccactgtaaacagcaagcagttgacgggaagactagctctgttgctactaagcagcttttacttttgtaaagtcagctctgttgttttaaatggtaaaaattaaactaatgaacttgcagactgtggcgcaactggtcttggtagcggaggcacccgaatgctgcccgggtgagatgaggaaactgaggtttagacaagcagtgggagttttccatggatttacatctcatttagtggcatttgcaagactagaacttggatcttctgatgtccagtccattgctttgtgtattctgccatcatttcagttctgatagcaatgaggacacatcatggaaactgcaatacacaaaggactgttaagcatgcccccagtgacctgggttctagttctgggactacatttggccgtatgacctgggccatcatatcacttccaagtctcaagtgtctcacatataaaacaaaacgtttgtatgaaattatgttttttctttccaactttagcattttgtgatgtttaccaatgtgtttgtaatccaatgttatcattttctctagaggaaggagacctttgtaccccacatcacctaagagacctagctaattactctttcacctttagtttatcccttcccccctttactacatgccacttcatcaaaggaatgaaacttaacaagtgcgttttagcttaacatctacagtatattgtttagtttactgtttgacttgaaaatattctgaggggttaaagtactgtaaggtacatgtcagggcttacttgaatattctaattgtaagctcataactttttttttttagctttatggtttgcataaagtaagtgctcagtaaatagctgttgaattaatgaagggggtgaatgaagtcattcataaggaaaacatatgctgtaaaacatagaaagcatcttaccatgtaaattcccaacacataagataatttgcctacaggcatgtgcctcctgaagctggcgggtacagagcccattgttgctctcttttctgaaggcatcatatagggaagagcttttctttctccctagacagtagactcatgtcatctatgttatgc

SEQ ID NO: 282310 - DNA, 412 bp, Homo sapiens
atcatcaaaacagttcagcacaaagaagctgagtttcttcagaagctactgccaggctattacatggtaaggaactgcacatcattaatgcttctacttgaagtttaattactttcctcaacagtttttttctgttgtttttttcagtgactcaggcatgtttctttctctttggtaagctttattctgcatttaaattatgctatgacattcattgaatagattttttaaagtaaactagaactgaatggcagagcatacttgttgaatcccacaatcctgagttcaaatcccagctcagccaataattaactgtgtgaccctgagtaagcagcataactggtcagccttagttccctcagtctttaaaggctgagaaatacgtggccaggcgtggtggctcacgcctgta

SEQ ID NO: 282311 - DNA, 420 bp, Homo sapiens
aaagaagtatatgctatgctgatcattgcagaagaatcccaaacataatgcaccccattttccagacacaagtgattgggagaaataacgaacttatgttgcgactcatggggagaggttacaaattgatgccaaaatctagtctcacacctgcttttttgctccccccagtaagtgaaaatggtgatcacctaagcacatggatgagacgtgagcacagttatggcagagaagtttctccgcaccagaattatccacagcaacttggctgagccccactacacacagagaaatcatcaacctgacttaagagttttcaagatgtcaacttcaggctgatcagcagatgggatgtgaaaaatactaccctattctatcatttgctgttgcttgctgaactgtgaagaactgcatgaacta

SEQ ID NO: 282312 - DNA, 2705 bp, Homo sapiens
ctcgcctgcactgctctcccttcgctgtggggaagcgacaacgtcccgataacttgcagactgtggcgcaactggtcttggtagcggaggcacccgaatgctgcccgggtgagatgaggaagccaaggcccagcagagctgagatgtgactgcagagccgtccaaccccagtcctgtgacctttctctggtgcctgatacctctcagcatttgagggccttttctcttcctgcttcatctctaaaggtccttctaggagagaggtgaaagaaacctggcaaagaaaacggtctcgacaatgagtaggccacccatcactactaactacagatgacttgccatttcatttacaaagatgtcttctgctgctgaaaatggagaggcagcacctggaaaacaaaatgaagaaaaaacctataaaaagactgcatcatctgctattaaaggtgctattcagctgggaataggatacacagtgggtaatctcacttccaagccagaacgagatgttcttatgcaagacttttatgtggtggaaagtgtgttcctacccagcgaagggagcaatctgaccccagcacatcactacccagactttagatttaagacatacgctccattagcattccgatatttcagagaactttttggtatcaagcctgatgattacttgtattccatctgcagtgaacctctaatagaactgtctaaccctggagccagtggatccttgttttttgtgaccagtgatgatgaatttatcatcaaaacagttcagcacaaagaagctgagtttcttcagaagctactgccaggctattacatgaatttaaaccagaatccaaggactcttttgccaaaattttacggactgtattgtatgcaatcaggaggcattaatatcaggattgtggtgatgaacaacgttttgccacgctccatgagaatgcactttacatatgacttgaaaggctcaacgtataagcgaagagcatcccgtaaagagagagagaaatccaaccccacatttaaggacttagatttcctgcaagacatgcacgaagggttgtattttgatacggaaacatacaacgcgcttatgaaaacacttcagagagactgccgggtgctagaaagcttcaagatcatggattatagccttctgttgggaattcatttcctggaccattccctcaaagagaaagaggaggagaccccacaaaatgtgcctgatgctaagcggactgggatgcagaaggttctctactcaacagccatggaatctatccagggtccagggaaatctggagatgggataatcacagagaacccagacacaatgggaggcattccagctaaaagccataggggagaaaaactacttttatttatgggcattattgacattctgcaatcatataggttaatgaagaagttagaacattcctggaaagctcttgtttatgatggggacactgtttctgttcatagaccaagcttttatgcagacagatttcttaagttcatgaattccagagttttcaagaaaattcaagctttgaaggcttcaccgtctaagaaacggtgcaattcaatcgccgccctaaaggccacttcacaggagattgtgtcctcaattagccaggaatggaaggatgagaagcgggatttgctgactgaaggacaaagttttagcagccttgatgaagaagccctgggatcccgacacaggccagacctggtccctagcactccatcactgtttgaagctgcttccttggcaaccacaatttcatcttcttccttatacgtcaatgagcactatccacacgacaggcctacactctattcaaacagcaaagggttaccttccagttcaacatttaccttggaagaggggaccatctacttgaccgctgagcccaacactctggaagtgcaggatgacaatgcttctgtgcttgacgtctatttataagtgaaaatggtgatcacctaagcacatggatgagacgtgagcacagttatggcagagaagtttctccgcaccagaattatccacagcaacttggctgagccccactacacacagagaaatcatcaacctgacttaagagttttcaagatgtcaacttcaggctgatcagcagatgggatgtgaaaaatactaccctattctatcatttgctgttgcttgctgaactgtgaagaactgcatgaactatatttaagctgctttctgtaccattgccaatcacctttttggagttggaagtgctattttcctatggacttttgcattatttcattgtgcatgcatccagtgattatacataagcaacatatgtaatctgcttatatatttttaaaaatccatccacacacatggtaaattaagtataaattcttttgcaaaattatagttcatgtcattgaaagtttaaattggtttcatttaaagatcaatatactaggtctgccttcactttatagaaaactagcttctataaagattttttcactgtttactagtgaaatgagaaaagcaaagctatttataaaaggccttatgtcgtgtacatacattgtctttgaaatatttgtgatctagtttattgcttgtaaaagagaaattatataatttatttagtaaatactactgtaaactatagttttgtgagagaaataaaatattttgttctcaa

SEQ ID NO: 282313 - DNA, 2548 bp, Homo sapiens
ctcgcctgcactgctctcccttcgctgtggggaagcgacaacgtcccgataacttgcagactgtggcgcaactggtcttggtagcggaggcacccgaatgctgcccgggtgagaaacctggcaaagaaaacggtctcgacaatgagtaggccacccatcactactaactacagatgacttgccatttcatttacaaagatgtcttctgctgctgaaaatggagaggcagcacctggaaaacaaaatgaagaaaaaacctataaaaagactgcatcatctgctattaaaggtgctattcagctgggaataggatacacagtgggtaatctcacttccaagccagaacgagatgttcttatgcaagacttttatgtggtggaaagtgtgttcctacccagcgaagggagcaatctgaccccagcacatcactacccagactttagatttaagacatacgctccattagcattccgatatttcagagaactttttggtatcaagcctgatgattacttgtattccatctgcagtgaacctctaatagaactgtctaaccctggagccagtggatccttgttttttgtgaccagtgatgatgaatttatcatcaaaacagttcagcacaaagaagctgagtttcttcagaagctactgccaggctattacatgaatttaaaccagaatccaaggactcttttgccaaaattttacggactgtattgtatgcaatcaggaggcattaatatcaggattgtggtgatgaacaacgttttgccacgctccatgagaatgcactttacatatgacttgaaaggctcaacgtataagcgaagagcatcccgtaaagagagagagaaatccaaccccacatttaaggacttagatttcctgcaagacatgcacgaagggttgtattttgatacggaaacatacaacgcgcttatgaaaacacttcagagagactgccgggtgctagaaagcttcaagatcatggattatagccttctgttgggaattcatttcctggaccattccctcaaagagaaagaggaggagaccccacaaaatgtgcctgatgctaagcggactgggatgcagaaggttctctactcaacagccatggaatctatccagggtccagggaaatctggagatgggataatcacagagaacccagacacaatgggaggcattccagctaaaagccataggggagaaaaactacttttatttatgggcattattgacattctgcaatcatataggttaatgaagaagttagaacattcctggaaagctcttgtttatgatggggacactgtttctgttcatagaccaagcttttatgcagacagatttcttaagttcatgaattccagagttttcaagaaaattcaagctttgaaggcttcaccgtctaagaaacggtgcaattcaatcgccgccctaaaggccacttcacaggagattgtgtcctcaattagccaggaatggaaggatgagaagcgggatttgctgactgaaggacaaagttttagcagccttgatgaagaagccctgggatcccgacacaggccagacctggtccctagcactccatcactgtttgaagctgcttccttggcaaccacaatttcatcttcttccttatacgtcaatgagcactatccacacgacaggcctacactctattcaaacagcaaagggttaccttccagttcaacatttaccttggaagaggggaccatctacttgaccgctgagcccaacactctggaagtgcaggatgacaatgcttctgtgcttgacgtctatttataagtgaaaatggtgatcacctaagcacatggatgagacgtgagcacagttatggcagagaagtttctccgcaccagaattatccacagcaacttggctgagccccactacacacagagaaatcatcaacctgacttaagagttttcaagatgtcaacttcaggctgatcagcagatgggatgtgaaaaatactaccctattctatcatttgctgttgcttgctgaactgtgaagaactgcatgaactatatttaagctgctttctgtaccattgccaatcacctttttggagttggaagtgctattttcctatggacttttgcattatttcattgtgcatgcatccagtgattatacataagcaacatatgtaatctgcttatatatttttaaaaatccatccacacacatggtaaattaagtataaattcttttgcaaaattatagttcatgtcattgaaagtttaaattggtttcatttaaagatcaatatactaggtctgccttcactttatagaaaactagcttctataaagattttttcactgtttactagtgaaatgagaaaagcaaagctatttataaaaggccttatgtcgtgtacatacattgtctttgaaatatttgtgatctagtttattgcttgtaaaagagaaattatataatttatttagtaaatactactgtaaactatagttttgtgagagaaataaaatattttgttctcaa

SEQ ID NO: 282314 - DNA, 2654 bp, Homo sapiens
cgaaagcccaccaatccattgtggaatgacctctacaaatagttttgcttctgcacaaccagatgaggaagccaaggcccagcagagctgagatgtgactgcagagccgtccaaccccagtcctgtgacctttctctggtgcctgatacctctcagcatttgagggccttttctcttcctgcttcatctctaaaggtccttctaggagagaggtgaaagaaacctggcaaagaaaacggtctcgacaatgagtaggccacccatcactactaactacagatgacttgccatttcatttacaaagatgtcttctgctgctgaaaatggagaggcagcacctggaaaacaaaatgaagaaaaaacctataaaaagactgcatcatctgctattaaaggtgctattcagctgggaataggatacacagtgggtaatctcacttccaagccagaacgagatgttcttatgcaagacttttatgtggtggaaagtgtgttcctacccagcgaagggagcaatctgaccccagcacatcactacccagactttagatttaagacatacgctccattagcattccgatatttcagagaactttttggtatcaagcctgatgattacttgtattccatctgcagtgaacctctaatagaactgtctaaccctggagccagtggatccttgttttttgtgaccagtgatgatgaatttatcatcaaaacagttcagcacaaagaagctgagtttcttcagaagctactgccaggctattacatgaatttaaaccagaatccaaggactcttttgccaaaattttacggactgtattgtatgcaatcaggaggcattaatatcaggattgtggtgatgaacaacgttttgccacgctccatgagaatgcactttacatatgacttgaaaggctcaacgtataagcgaagagcatcccgtaaagagagagagaaatccaaccccacatttaaggacttagatttcctgcaagacatgcacgaagggttgtattttgatacggaaacatacaacgcgcttatgaaaacacttcagagagactgccgggtgctagaaagcttcaagatcatggattatagccttctgttgggaattcatttcctggaccattccctcaaagagaaagaggaggagaccccacaaaatgtgcctgatgctaagcggactgggatgcagaaggttctctactcaacagccatggaatctatccagggtccagggaaatctggagatgggataatcacagagaacccagacacaatgggaggcattccagctaaaagccataggggagaaaaactacttttatttatgggcattattgacattctgcaatcatataggttaatgaagaagttagaacattcctggaaagctcttgtttatgatggggacactgtttctgttcatagaccaagcttttatgcagacagatttcttaagttcatgaattccagagttttcaagaaaattcaagctttgaaggcttcaccgtctaagaaacggtgcaattcaatcgccgccctaaaggccacttcacaggagattgtgtcctcaattagccaggaatggaaggatgagaagcgggatttgctgactgaaggacaaagttttagcagccttgatgaagaagccctgggatcccgacacaggccagacctggtccctagcactccatcactgtttgaagctgcttccttggcaaccacaatttcatcttcttccttatacgtcaatgagcactatccacacgacaggcctacactctattcaaacagcaaagggttaccttccagttcaacatttaccttggaagaggggaccatctacttgaccgctgagcccaacactctggaagtgcaggatgacaatgcttctgtgcttgacgtctatttataagtgaaaatggtgatcacctaagcacatggatgagacgtgagcacagttatggcagagaagtttctccgcaccagaattatccacagcaacttggctgagccccactacacacagagaaatcatcaacctgacttaagagttttcaagatgtcaacttcaggctgatcagcagatgggatgtgaaaaatactaccctattctatcatttgctgttgcttgctgaactgtgaagaactgcatgaactatatttaagctgctttctgtaccattgccaatcacctttttggagttggaagtgctattttcctatggacttttgcattatttcattgtgcatgcatccagtgattatacataagcaacatatgtaatctgcttatatatttttaaaaatccatccacacacatggtaaattaagtataaattcttttgcaaaattatagttcatgtcattgaaagtttaaattggtttcatttaaagatcaatatactaggtctgccttcactttatagaaaactagcttctataaagattttttcactgtttactagtgaaatgagaaaagcaaagctatttataaaaggccttatgtcgtgtacatacattgtctttgaaatatttgtgatctagtttattgcttgtaaaagagaaattatataatttatttagtaaatactactgtaaactatagttttgtgagagaaataaaatattttgttctcaa

SEQ ID NO: 282315 - DNA, 2587 bp, Homo sapiens
ctcgcctgcactgctctcccttcgctgtggggaagcgacaacgtcccgataacttgcagactgtggcgcaactggtcttggtagcggaggcacccgaatgctgcccgggtgagatgaggaagccaaggcccagcagagctgagatgtgactgcagagccgtccaaccccagtcctgtgacctttctctggtgcctgatacctctcagcatttgagggccttttctcttcctgcttcatctctaaaggtccttctaggagagaggtgaaagaaacctggcaaagaaaacggtctcgacaatgagtaggccacccatcactactaactacagatgacttgccatttcatttacaaagatgtcttctgctgctgaaaatggagaggcagcacctggaaaacaaaatgaagaaaaaacctataaaaagactgcatcatctgctattaaaggtgctattcagctgggaataggatacacagtgggtaatctcacttccaagccagaacgagatgttcttatgcaagacttttatgtggtggaaagtgtgttcctacccagcgaagggagcaatctgaccccagcacatcactacccagactttagatttaagacatacgctccattagcattccgatatttcagagaactttttggtatcaagcctgatgattacttgtattccatctgcagtgaacctctaatagaactgtctaaccctggagccagtggatccttgttttttgtgaccagtgatgatgaatttatcatcaaaacagttcagcacaaagaagctgagtttcttcagaagctactgccaggctattacatgaatttaaaccagaatccaaggactcttttgccaaaattttacggactgtattgtatgcaatcaggaggcattaatatcaggattgtggtgatgaacaacgttttgccacgctccatgagaatgcactttacatatgacttgaaaggctcaacgtataagcgaagagcatcccgtaaagagagagagaaatccaaccccacatttaaggacttagatttcctgcaagacatgcacgaagggttgtattttgatacggaaacatacaacgcgcttatgaaaacacttcagagagactgccgggtgctagaaagcttcaagatcatggattatagccttctgttgggaattcatttcctggaccattccctcaaagagaaagaggaggagaccccacaaaatgtgcctgatgctaagcggactgggatgcagaaggttctctactcaacagccatggaatctatccagggtccagggaaatctggagatgggataatcacagagaacccagacacaatgggaggcattccagctaaaagccataggggagaaaaactacttttatttatgggcattattgacattctgcaatcatataggttaatgaagaagttagaacattcctggaaagctcttgtttatgatggggacactgtttctgttcatagaccaagcttttatgcagacagatttcttaagttcatgaattccagagttttcaagaaaattcaagctttgaaggcttcaccgtctaagaaacggtgcaattcaatcgccgccctaaaggccacttcacaggagattgtgtcctcaattagccaggaatggaaggatgagaagcgggatttgctgactgaaggacaaagttttagcagccttgatgaagaagccctgggatcccgacacaggccagacctggtccctagcactccatcactgtttgaagctgcttccttggcaaccacaatttcatcttcttccttatacgtcaatgagcactatccacacgacaggcctacactctattcaaacagtaagtgaaaatggtgatcacctaagcacatggatgagacgtgagcacagttatggcagagaagtttctccgcaccagaattatccacagcaacttggctgagccccactacacacagagaaatcatcaacctgacttaagagttttcaagatgtcaacttcaggctgatcagcagatgggatgtgaaaaatactaccctattctatcatttgctgttgcttgctgaactgtgaagaactgcatgaactatatttaagctgctttctgtaccattgccaatcacctttttggagttggaagtgctattttcctatggacttttgcattatttcattgtgcatgcatccagtgattatacataagcaacatatgtaatctgcttatatatttttaaaaatccatccacacacatggtaaattaagtataaattcttttgcaaaattatagttcatgtcattgaaagtttaaattggtttcatttaaagatcaatatactaggtctgccttcactttatagaaaactagcttctataaagattttttcactgtttactagtgaaatgagaaaagcaaagctatttataaaaggccttatgtcgtgtacatacattgtctttgaaatatttgtgatctagtttattgcttgtaaaagagaaattatataatttatttagtaaatactactgtaaactatagttttgtgagagaaataaaatattttgttctcaa

SEQ ID NO: 282316 - DNA, 2113 bp, Homo sapiens
ctcgcctgcactgctctcccttcgctgtggggaagcgacaacgtcccgataacttgcagactgtggcgcaactggtcttggtagcggaggcacccgaatgctgcccgggtgagatgaggaagccaaggcccagcagagctgagatgtgactgcagagccgtccaaccccagtcctgtgacctttctctggtgcctgatacctctcagcatttgagggccttttctcttcctgcttcatctctaaaggtccttctaggagagaggtgaaagaaacctggcaaagaaaacggtctcgacaatgagtaggccacccatcactactaactacagatgacttgccatttcatttacaaagatgtcttctgctgctgaaaatggagaggcagcacctggaaaacaaaatgaagaaaaaacctataaaaagactgcatcatctgctattaaaggtgctattcagctgggaataggatacacagtgggtaatctcacttccaagccagaacgagatgttcttatgcaagacttttatgtggtggaaagtgtgttcctacccagcgaagggagcaatctgaccccagcacatcactacccagactttagatttaagacatacgctccattagcattccgatatttcagagaactttttggtatcaagcctgatgattacttgtattccatctgcagtgaacctctaatagaactgtctaaccctggagccagtggatccttgttttttgtgaccagtgatgatgaatttatcatcaaaacagttcagcacaaagaagctgagtttcttcagaagctactgccaggctattacatgaatttaaaccagaatccaaggactcttttgccaaaattttacggactgtattgtatgcaatcaggaggcattaatatcaggattgtggtgatgaacaacgttttgccacgctccatgagaatgcactttacatatgacttgaaaggctcaacgtataagcgaagagcatcccgtaaagagagagagaaatccaaccccacatttaaggacttagatttcctgcaagacatgcacgaagggttgtattttgatacggaaacatacaacgcgcttatgaaaacacttcagagagactgccgggtgctagaaagcttcaagatcatggattatagccttctgttgggaattcatttcctggaccattccctcaaagagaaagaggaggagaccccacaaaatgtgcctgatgctaagcggactgggatgcagaaggttctctactcaacagccatggaatctatccagggtccagggaaatctggagatgggataatcacagagaacccagacacaatgggaggcattccagctaaaagccataggggagaaaaactacttttatttatgggcattattgacattctgcaatcatataggttaatgaagaagttagaacattcctggaaagctcttgtttatgatggggacactgtttctgttcatagaccaagcttttatgcagacagatttcttaagttcatgaattccagagttttcaagaaaattcaagctttgaaggcttcaccgtctaagaaacggtgcaattcaatcgccgccctaaaggccacttcacaggagattgtgtcctcaattagccaggaatggaaggatgagaagcgggatttgctgactgaaggacaaagttttagcagccttgatgaagaagccctgggatcccgacacaggccagacctggtccctagcactccatcactgtttgaagctgcttccttggcaaccacaatttcatcttcttccttatacgtcaatgagcactatccacacgacaggcctacactctattcaaacaggtaatacttagtgcagtcaaataacccatcaggctgttaccacatcaacatcaggcctgaaccagtatctctgaatgaggacacgtctctaacaaccaggatgtgcctgtcatctgcctcataggtcggagagagaacatgcttgatttttactgtggcaaaagaacattggagggaaaaccctcatgatttttctttacagttgatcattatgtcatgtagaaattatatacttggctcaatggaagaagacaaa

SEQ ID NO: 282317 - DNA, 292 bp, Homo sapiens
cggccgcactcgggtgagtccctctcgcctcatccccgcgccccccgcccccgcctcgggggccattgcgagcgggggcctttattagagactttgccccgccggggcctgcagggacaggggcctgggagccgcggcccgccgcgcgcggtgtggggccttggggggcgcccgtgccgcctccccctacccccacccccaccgcctcgccgggtctcgagccccgccggccttggcagtggccgaaacgaggcgatgggggtggggcggcacggacgcggtcgcgggggac

SEQ ID NO: 282318 - DNA, 1894 bp, Homo sapiens
gggaatggaaagtctgagtaacaagacatctccttgcagctgttggaaaccacagacttgtagagactggctctgccttcttcaacatgttcctgtacaaacagtgcacacacatgaacattcattgcatgctcataaataagcctgggaagaactcaccggtccagatgcacacagtatcattgccaagcacaggagaatatagaaatacatgagaatcaggaagtagtatttatttgaatgatggacaattgctaggtaatttggttttatggggtattctggaaatgattatggagaagatggttcagagtatgaaggatcttgtatccaaagttaaggaatttggattttacaggaaggttatgccaatctactgaacgttctaaatatagaagtgattcatatcacttctaaattttggaaagataactctcgttctacaaaaggtgaattagagggagctgggaaggaaggaagggggcgctagccaggagcctaatacacaaatccacttgattgctaatgagggcatgagcagaggcaatgatagctggaacccagaagggtgagatttgtgagatggcggtaaggtagaacacataggattgcaaaaccaattagatttaggggttgagagaggaagcagtcaaaggtttccagattggacaactgtgtgtggcaaagcactaacaaatttcccaccctcagtttttactcaaataactagcaaataccaatatctcataagactactgcaaagttgaatgataaacagttttagtaatgtctttaatatacattgcctctgtcttttggggagtagtatggaggattattctaatttcagtggcaaggttcttgtattttaacattatttaccatcttgcatatgtatagttcatttttcctgtgaaataaaaattatttaatttatgtgaacaagtagaaacatgaacataaatctcacatatggagagggctttctctgtttctgcaaaggatgtgaattgatatcatatatagattcctgtatctgtctgaaatacacagcaatcacagataacaaaattataaacatatctctgtggtttaaattaatgttatttatctcattgactgataagagttgattacaacctgcttgtctgtggcccacctgtcacacagactcagctaaaatgcttgcgaaagatgactatttaaatcttgatattttattcagctggaatatctaatgcagtgttattcaaacatagtctgcagagcaatactgatatgaatggtttgttactagtctgttacaggataaatacagaaatcaagagtaagcatttagaaacttttatagcaataatttgacattgctcaatatgtaagcatgtggacaccattttgttgaacaggatataaatcagtcttgtttttgtctaacttgtgtgatgagtttgagttgtgtactagtcatatgccataggactgtattatcatgtgcgatgttttaaggttattttgaaaactgttatccaaaagtgcataaaatctggaatcattttctttcattgaaagattatttatatttaatcttacagtataagttatttgaactggctacggataaaagactgaagatacattaaaaaaatgtagcactatcagcttcattttggatagcagttaaaaaatatacactgaacttgctgagactggtttaaaaatctcttcctcatttcaatcaacatacctctgtgagcctcctttctctactttgactgctgttaagcaatgtttagaaatagtttagatacacattatcccctgcaaagagcattgccatccattcaaaccagattaggtaaattgacaaccaggaagcaagattaattgtcatatt

SEQ ID NO: 282319 - DNA, 355 bp, Homo sapiens
tttaaaaggagacttgtgaacagcaaagagtagaaagggttctcttacaactgaagcccatggaagacaaatgtgtactgcttggcggataattgcagctttctttcattccctacatgagttcaaatggcagcaaacaaactaggagaacgcagaccttctgacttgtgggtacccctactcatcacctgaagacccttggaaatcaaagccctgacccattaaagacggatggagacagcaacatacgatcatcactattatcttgctttgccccagtccaggttaaccatctgtggtatttttagttgctaagtccatatattcaacataaatcaattatatatccactaaa

SEQ ID NO: 282320 - DNA, 831 bp, Homo sapiens
aaaatactttgagactaaagttagtgaattgcaagctgatagattttgataatctgcagtggaatttgtctttttatctcttaattttaaagacacattaaaaaatcagctgattactattgttttgtaacctttaaagtttaaaaaatatgagccaattaatgatactgccaagtaatatggaaattagacttaattatgcagatataactttctctcttcagaaagatagatgtcacagtgaatttaaaaccagattatttctcttaagtcagctttaggtctttagtagaaatgtgcaatttgtttcaaactacattgccaagcattttctcattcctttttttttttccaggcaagaactgcctccctttgacagatggctaaatttcatggactctcttttaaaattatgtttaactttaccccttctcctaattttagcctaaatccatttaaccttctatctgcaagacttgctctctcccctaatcctttttcccttttcttcccaaaagggtattctttaccccttggcactctttttaccttctctctcattcctcgtgaatgactcctaaatgtttcttcctcattctttctgccctggtagcatgtctgtctttgaggattccatgtagataaaaaatacctccaaggattcccagaccacagtttgggtaacactggttaattaacattttaatttaacataaagcttccaaaattttcccatgccaaatttctatcttctaccattcctattttctcatttgtcctcatgcagggactatcctcacatgtattatttttaatgcagcaaaagaagaa

SEQ ID NO: 282321 - DNA, 375 bp, Homo sapiens
  misc_feature (1)..(2): n is a, c, g, or t
nnaagatcctgtatgaccaggcggtggctcacgctgtaatcccagcactttgagaggccgaggtgggcagatcacctgaggttgggaggagaattgcttgaacccagtaggcagaggttgcggggagccaagatctcgccatgtgcactccatcctggggaacaagagcgaaactccgtctcaaaaaaaaaaaaaagatccctgtggctctgtgcgtggagtagagtgggaagacgagagggatgacaaatgtccaggcaagggagggtgggggcttgggaaaaggtggaggtagcccactaccctccccgactcctgctcctcacctgttttttggccctgctcagctccaggtcaagtgcttgggccagctcc

SEQ ID NO: 282322 - DNA, 1759 bp, Homo sapiens
agacgcaggtgcgttcccgtcgaggctcgcgcagcgggcgtttttggggatcgcctggcgggggtgttcgggagccgcgggctgaagcacgggggcgtgcaggcgcccaggcctcgtgtagtgagggccgagccccgcgccggcttcgctgtagtccgcagcccccggcggctttgtgggcgcagccacgctcctcagccgcccgcccacctgggcctgggccccggttgtttccctgcggtggctgtggtcgttcccgttccagggtctcgagcgcaccgcccctgtgagctcgggctgttcttcctcctccgcgtggctcactccagcctcggatgtttcctcgctgcacagacctgctcgggaagactcgagaaggccaccccaggactccagctctccccggaagggcttcccctcggattgcgtcttggcccctggaaccctccctctgtatcctctgctgttcctctcttggcctccatttgggttgtggcctggatactctggctcgctgcttcccttctcttaaggatcacagccctgcactgcctgtcgtccggtgcctggaaaccattgtattttttggtctgattttgtagttgtttgagaacttaagtctggtccctcacactccatgcccagaagcagaaatgagtaaagtttgttttatcttttcttaatatgacaattattgtgttggttcaacttatgttgtactttaattagaagaaatttggccgaaaatacaaggaaaatatacaaatgcaagtaattttttttaaacttccctgaaagcagggtctaaagaaattaccaaccaacttagactggatctagaagaaaaggaagggtctttgcagtcttaggactcttccgttccgcgacgtaggtgttaggataacagccataaatggttgtaagactttgggctcagataagtagacttaagttcaaattttgacttattttacaagtgtgtgatttttggcaagctcatcttcctaaaccatgagctccttatttgtaaaggggacattagccactctccagcaacagccctggtacttcttcagtcctgggatgggacgtatgattagcctaagcgaaccagaaaatccaggcccgtgaccagtgacttgatcagggctggcgatatatctaggtaggccaaccaggtggactcagtatttttgtgggtgctactggaaaatttatttaattctaactgaatgtagaaacagcaacagacatgaaatggcagttgtattgctgtcttatcatgaggtgagggcctgaagctatggtagccaccctgtgaaccttggaaggagggttctacaggaactggcagagctgagactgggacgcaacccatgtcctggtgacgtatttgagtcctgaggctggccctcctgttagtcttttctcttactggcttcagccagatggggtctggttttctgttacttgcaacaggaaaaattggaatgatatctatgcatgctattaccgccttatggctgtggtgagattaaaacatgatactgtgggtgaactgcttagtacagtgcctgctattctttatgttggttttaaggtatttttcttgaactttaaagttctaagaaaaattaccgttttaaaattcctaccctctgttcacatgtttaaattttcatgatagtttttctgtctgcatgttttctattcaaaataaattggtcattcttcagttagccacgaagaatattgtgaa

SEQ ID NO: 282323 - DNA, 2190 bp, Homo sapiens
agacgcaggtgcgttcccgtcgaggctcgcgcagcgggcgtttttggggatcgcctggcgggggtgttcgggagccgcgggctgaagcacgggggcgtgcaggcgcccaggcctcgtgtagtgagggccgagccccgcgccggcttcgctgtagtccgcagcccccggcggctttgtgggcgcagccacgctcctcagccgcccgcccacctgggcctgggccccggttgtttccctgcggtggctgtggtcgttcccgttccagggtctcgagcgcaccgccccttcgctgcgctgttagtcgagggcagttttctgggggatcccccgatccccccgcgccgctcaggcgtcttggctcgcggaagcgcaggcgccgactgcctggcgtcgtccgtgactcctggcccttctctgtggatccctttgcttctcgttgcgggttgtgtttcctgcttcgtgggcctggccgtttgcgtttggatgcaggcccgggtgagccctgcgtggcccgctggccttttcctgctccctaggtgactgagccgcgtgtgtgacacatcggagtgaattgaggcaacgcgttcctttccaggcttgcagcgggcggtgtcgttcacgctcctgagcagagccttccggtgctttactcgacgccacaaatagtgcagggttcctcccaggggctgtcgcgagctagaactcttccccgcccctgtgagctcgggctgttcttcctcctccgcgtggctcactccagcctcggatgtttcctcgctgcacagacctgctcgggaagactcgagaaggccaccccaggactccagctctccccggaagggcttcccctcggattgcgtcttggcccctggaaccctccctctgtatcctctgctgttcctctcttggcctccatttgggttgtggcctggatactctggctcgctgcttcccttctcttaaggatcacagccctgcactgcctgtcgtccggtgcctggaaaccattgtattttttggtctgattttgtagttgtttgagaacttaagtctggtccctcacactccatgcccagaagcagaaatgagtaaagtttgttttatcttttcttaatatgacaattattgtgttggttcaacttatgttgtactttaattagaagaaatttggccgaaaatacaaggaaaatatacaaatgcaagtaattttttttaaacttccctgaaagcagggtctaaagaaattaccaaccaacttagactggatctagaagaaaaggaagggtctttgcagtcttaggactcttccgttccgcgacgtaggtgttaggataacagccataaatggttgtaagactttgggctcagataagtagacttaagttcaaattttgacttattttacaagtgtgtgatttttggcaagctcatcttcctaaaccatgagctccttatttgtaaaggggacattagccactctccagcaacagccctggtacttcttcagtcctgggatgggacgtatgattagcctaagcgaaccagaaaatccaggcccgtgaccagtgacttgatcagggctggcgatatatctaggtaggccaaccaggtggactcagtatttttgtgggtgctactggaaaatttatttaattctaactgaatgtagaaacagcaacagacatgaaatggcagttgtattgctgtcttatcatgaggtgagggcctgaagctatggtagccaccctgtgaaccttggaaggagggttctacaggaactggcagagctgagactgggacgcaacccatgtcctggtgacgtatttgagtcctgaggctggccctcctgttagtcttttctcttactggcttcagccagatggggtctggttttctgttacttgcaacaggaaaaattggaatgatatctatgcatgctattaccgccttatggctgtggtgagattaaaacatgatactgtgggtgaactgcttagtacagtgcctgctattctttatgttggttttaaggtatttttcttgaactttaaagttctaagaaaaattaccgttttaaaattcctaccctctgttcacatgtttaaattttcatgatagtttttctgtctgcatgttttctattcaaaataaattggtcattcttcagttagccacgaagaatattgtgaa

SEQ ID NO: 282324 - DNA, 280 bp, Homo sapiens
atacaatttttccctctctcactccctttcaaaaggcagttgaaagcagacatcagaatgtgggaagagcttgtttcccctttttgaaaacacgttcttgctcatcgactcatcctctccttgggtccccagagatgggcagggcaggtgttatgactaatctcattatacggatgagaagaaacctggggcccggcagggaaagaaacttcctgcagtcccagggcaggtcagcggcagggctgggacccaaccccaggtctcctgtacccaggcagga

SEQ ID NO: 282325 - DNA, 1062 bp, Homo sapiens
aggtgcttcctggttcaccccaccctcagcagagacagaccccagatctgggcccaggactttgtgcagggaggggaaatactggactctgaaatgggcacgtacagagacgaagagaccccaacatgcttcaggctttgagtggagaggacacagcctctgctgggacagggaacagagggatgtggagtccctgaagatgcttttggacaatggtctgaggttgggacagtggcaggagataccattcacccaggatctccaggacaagagatcagcctggcagttacatgtgtttttttttcaaactggttgccaggttggcatgaacgatgacatcagagattccgaccttcctgattggagggaccggactccgtggtgcctggagatcagttggacaacagtatcttctcagagctgttctccactcctgacttctcctaggcttgagaattgataacatactcttctggatcctagcagtgtccagaagaaggccatggacagaacggagactaggttccgtaagaggggacagattacgggaaagatcacgaccagccgtcaaccgcaccgccagaatgagcagagtccccagcggagcacctcggggtaccccctccaggaggtggtggatgatgaagtgttgggaccatcagcccctggggtagatcccagccccccgcataggtccttttgctggaaaaggaagatggagtggtgggacaaatctgaggagtcggaggaggagccacggaaggtgctcgcccctgagcctgaggagatctgggtggcggagatgctgtgtggcctcaagatgaagctgaagcgacggcgagtgtcgctcgtgctccctgagcaccacgaggccttcaacaggctgcttggtaggaggacaccccagagagcacctccaatcctgttctttccaaaaacaggaaacttccaataaccacacttttccaatgggaaaaataggccccagtgggtgagctctccatgtgggaggaatgtgaagtgatcactcatgagggacacttaggagatgataaaggatta

SEQ ID NO: 282326 - DNA, 281 bp, Homo sapiens
aaggagcggcacatggagctcagcagaggagacagacagaaggaaagatggcttggagaagccagcagtctgcgaggctggggaggatggagagtggtttggggttttgggtcgggctctagtgtgatcaactgcagaagcattacaccgtggcctggtttctttactcagcccctggggtagatcccagccccccgcataggtccttttgctggaaaaggaagatggagtggtgggacaaatctgaggagtcggaggaggagccacggaaggtgctcgcc

SEQ ID NO: 282327 - DNA, 2674 bp, Homo sapiens
  misc_feature (1186)..(1186): n is a, c, g, or t
atacaatttttccctctctcactccctttcaaaaggcagttgaaagcagacatcagaatgtgggaagagcttgtttcccctttttgaaaacacgttcttgctcatcgactcatcctctccttgggtccccagagatgggcagggcaggtgttatgactaatctcattatacggatgagaagaaacctggggcccggcagggaaagaaacttcctgcagtcccagggcaggtcagcggcagggtggaaaaggaagagggagtggtcagatgaatctgaggaggagccggagaaggagctcgcccctgagcctgaggagacctgggtagtggagacgctgtgtgggctcaagatgaagctgaagcaacagcgagtgtcacccatcctccttgagcaccacaaggacttcaacagtcagcttgcccctggggtagatcccagccccccgcataggtccttttgctggaaaaggaagatggagtggtgggacaaatctgaggagtcggaggaggagccacggaaggtgctcgcccctgagcctgaggagatctgggtggcggagatgctgtgtggcctcaagatgaagctgaagcgacggcgagtgtcgctcgtgctccctgagcaccacgaggccttcaacaggctgcttgaggatcctgtcattaaaagattcctggcctgggacaaagatctgagggtgtcggacaagtatctccttgctatggtcatagcgtatttcagccgagccggcttcccctcctggcaataccaacgccttcatttcttcctggctctctacctggccaatgacatggaggaggacgacgaggactccaaacaaaacatcttccacttcctgtatgggaagaaccgctctcgcatacccttgctccgtaagcgtcggttccagttataccgttccatgaacccgagggccaggaagaaccgctctcacatacccttggtccgtaagcgtcggttccagttacgccgttgcatgaacccgagggccaggaagaaccgctctcagatagtcctgttccagaaacgtcggttccacttcttctgttccatgagctgcagggcttgggtttccccagaggagttggaggagatccaggcttatgacccagagcactgggtgtgggcgcgagatcgcgctcgcctttcctagagctccagggaccntggaggcctgaggtcatcggcctgagagaagaacaccggacccaggggagatgtggattttcagcaggaactttattccaatgctaatggcagacaccaggaaggaggagaggaaccatttgtgcagatcatctagaagaacctggaccattcttgatggagctgaatacagtgatcacgttgtcctcctaggagcaggggtggggggagggggatggggtccttctaggagtccttggagaaaagtaagaaaccaggagtgtttccagttccaccctttcctggggcaccaccaccctttttatattgctgaattccaacctccctggggcggaacctggaggtcctgtttcttacggacttggttgccacagtccaggagcatttgaaggcacaatgcaggggctcagattggcacagaattcttttgtgaaatatcagtgccacagattgtaacagatagcttcatgcacactctgcattttattggtttgtttggaaaatgttggccattgaattattcatagatttatttcaaatagtttggaaattgttgtacttttgaaaacatgctgttcctgtagttttttgatgagagttatagttgttatatatacataaagataattttcttttcatttttgagacaattctttttatcctaaatattttatcatctttaaatttgtttctgtattattatatgtgctcctgaagcgagcactctttttatctatgatacttccataataatctcttctatttatagctattggtagttcccctaaattctgacgatagaaatttttatttgctgtttaggtttgtgactgaattgtgagaattcagttgtgatttttaacatgtgtcagatatatatactaacacgtctaatatatactattttattggtttattttgaaaaacatgggtatagaattatttaaatattattttatttatttaaatatttattaaatatatttatttatttaaatgttattattactttaaatattattttaaatattttggaaatactggtatttttgaatagatgctgtttctataaagctgtgtgatggtattataactgttatatacacatacatataattttgttttcctttttaagagaggattcttttcatcctaaatcttttacctttcaatctttgtatctattattacacgtgctgctgaagggagcatggtttttatctatgatacttagttaacatatatattacatttatagctatgtagtagttcccctaaattcttgtaaaaataaatttttatttgatatttcatctatgtttgaaatgtgagaattcagatgtaattttttaccttgatttggcatgtttgtatgttactttaaagaggatgtgtgttctaaaggaggacatgagctgtgtgttttcaagagaacaatagagtgtgtctcttggggaaacgtaataaaaatgaacttttctcaccttc

SEQ ID NO: 282328 - DNA, 1597 bp, Homo sapiens
cggcaccctggcgcccggctggcggctggtgaagggcttcctgaaccagccagtggacgtggagttgtaccagggcctgtgggacatgtgtcgcgagcagagcagccgcgagcgcgagtgcggccagacggaccagtggggctacttcgaggcccagcccgtgctggtggcgcgggcactcatggtcacctcgctggccgccacggtcctggggcttctgctggcgtcgctgggcgtgcgctgctggcaggacgagcccaacttcgtgctggcagggctctcgggcgtcgtgctcttcgtcgctggcctcctcggcctcatcccggtgtcctggtacaaccacttcttgggggaccgcgacgtgctgcccgccccggccagcccggtcacggtgcaggtcagctacagcctggtcctgggctacctgggcagctgcctcctgctgctgggcggcttctcgctggcgctcagcttcgcgccctggtgcgacgagcgttgtcgccgccgccgcaagggaccctccgccgggcctcgccgcagcagcgtcagcaccatccaagtggagtggcccgagcccgacctggcgcccgccatcaagtactacagcgacggccagcaccgaccgccgcctgcccagcaccgcaagcccaagaccaagcccaaggtcggcttccccatgccgcggccgcggcccaaggcctacaccaactcggtggacgtcctcgacggggaggggtgggagtcccaggacgctccctcgtgcagcacccacccctgcgacagctcgctgccctgcgactccgacctctagacgcttgtagagcctggggggcgccgggtggcaaaggactcacccccgcacaggcccgcctggcttcgagttggaacccggacacttgcccctcactggtgtggatggaaatctgcctttcgtgggaccaaacaggactccttggacgattagttcaggttgggtttggttttcttcttaaagagtttagttttcctctccagagggatcagggtcctcttagggagtgacgggcttttcatatatttttgctgaagaatatatggaaagggtggcatttgcgtcacgtggaccagggacagtgctgaaatcagcagtgctcagaaacaatttaacatgttgaaacgacaatattcctgctgtataactccttgccatgcaaactctcaagaggccaatatattcctggccatgtttgaatgagcctcttaaaataaacttagagccatgcaaatgccagcagcttaatggatttcatggaatgaaataccgtgattaactcatagctacatatcattgcataaatgggatttatcttttttctcacttatttttgcggtgaaagtcgagggcatgcaagagtttctcttccagaagccaagaggagaacaaaggtcctaatgctgtactattccaccctttggacgcctcatccaggacgcagaggactctaggtttaacattttgtacaaaatggaacctgttaatcatattaaagcacatatgtatatatcttttatttataaataaaattttaaaacaatagtttcagtatagccacaaaag

SEQ ID NO: 282329 - DNA, 1651 bp, Homo sapiens
cggcaccctggcgcccggctggcggctggtgaagggcttcctgaaccagccagtggacgtggagttgtaccagggcctgtgggacatgtgtcgcgagcagagcagccgcgagcgcgagtgcggccagacggaccagtggggctacttcgaggcccagcccgtgctggtggcgcgggcactcatggtcacctcgctggccgccacggtcctggggcttctgctggcgtcgctgggcgtgcgctgctggcaggacgagcccaacttcgtgctggcagggctctcgggcgtcgtgctcttcgtcgctggcctcctcggcctcatcccggtgtcctggtacaaccacttcttgggggaccgcgacgtgctgcccgccccggccagcccggtcacggtgcaggtcagctacagcctggtcctgggctacctgggcagctgcctcctgctgctgggcggcttctcgctggcgctcagcttcgcgccctggtgcgacgagcgttgtcgccgccgccgcaagggaccctccgccgggcctcgccgcagcagcgtcagcaccatccaagtggagtggcccgagcccgacctggcgcccgccatcaagtactacagcgacggccagcaccgaccgccgcctgcccagcaccgcaagcccaagaccaagcccaaggtcggcttccccatgccgcggccgcggcccaaggcctacaccaactcggtggacgtcctcgacggggaggggtgggagtcccaggacgctccctcgtgcagcacccacccctgcgacagctcgctgccctgcgactccgacctctagacgcttgtagagcctggggggcgccgggtggcaaaggactcacccccgcacaggcccgcctggcttcgagttggaacccggacacttgcccctcactggtgtggatggaaatctgcctttcgtgggaccaaacaggactccttggacgattagttcaggttgggtttggttttcttcttaaagagtttagttttcctctccagagggatcagggtcctcttagggagtgacgggcttttcatatatttttgctgaagaatatatggaaagggtggcatttgcgtcacgtggaccagggacagtgctgaaatcagcagtgctcagaaacaatttaacatgttgaaacgacaatattctaaaatactgatgaatcttgcatcaatataattattgggttttttttctttttcctgctgtataactccttgccatgcaaactctcaagaggccaatatattcctggccatgtttgaatgagcctcttaaaataaacttagagccatgcaaatgccagcagcttaatggatttcatggaatgaaataccgtgattaactcatagctacatatcattgcataaatgggatttatcttttttctcacttatttttgcggtgaaagtcgagggcatgcaagagtttctcttccagaagccaagaggagaacaaaggtcctaatgctgtactattccaccctttggacgcctcatccaggacgcagaggactctaggtttaacattttgtacaaaatggaacctgttaatcatattaaagcacatatgtatatatcttttatttataaataaaattttaaaacaatagtttcagtatagccacaaaag

SEQ ID NO: 282330 - DNA, 433 bp, Homo sapiens
agactcgctggctccgccggcgtgccatccgcgccgccagtgggagggtatagctgggtgggaggagatggaaaagtaagtggagcgccctgaagggaaggaaagggatctggagccccatttatttccttcatgaatgtccagaggagatccttgaaatgaagactgccactggatatattgagctgcacacccaaatgccaggattcttcgttgggagtcccaccagttaaagagcagtaagacatgccattgcctacagaaagccgtctacacaggcctaaatcacagggaggcgatgttccaaattttccttaccacttcactgatttttagttttttatcacttcctctaccacaaagaactactcaaagtggctattgatggttagtgtgatcacagatcttagtaatgaattgcatttggaatatg

SEQ ID NO: 282331 - DNA, 3365 bp, Homo sapiens
  misc_feature (60)..(60): n is a, c, g, or t
gaaggagcgggcatgaggcgctgcccgtgccgtgggagcctgaacgaggcggaggccggnggcgctgcccgcggcggcccgcatgggactggaggcgccgcgaggagggcggcggcggcagccgggacagcagcgacctgggcccggcgcaggggccccggcggggcggccggaggggggcgggccctgggcccggacagaggggtccagcctccacagcgagcctgagagggccggcctcgggcctgcgccggggacagagagtccgcaggcagaattctggacagacggacagactgagcccgcggcagctggccttggagtagagaccgagaggcccaagcaaaagacggagccagacaggtccagcctccggacgcatctagaatggagctggtcagagctggagacgacttgtctttggacggagaccgggacagatggcctttggactgatccgcacaggtccgacctccagtttcagcccgaggaggccagcccctggacacagccaggggttcatgggccctggacagagctggaaacgcatgggtcacagactcagccagagagggtcaagtcctgggctgataacctctggacccaccagaacagttccagcctccagactcacccagaaggagcctgtccctcaaaagagccaagtgctgatggctcctggaaagaattgtatactgatggctccaggacacaacaggatattgaaggtccctggacagagccatatactgatggctcccagaaaaaacaggatactgaagcagccaggaaacagcctggcactggtggtttccaaatacaacaggatactgatggctcctggacacaacctagcactgacggttcccagacagcacctgggacagactgcctcttgggagagcctgaggatggcccattagaggaaccagagcctggagaattgctgactcacctgtactctcacctgaagtgtagccccctgtgccctgtgccccgcctcatcattacccctgagacccctgagcctgaggcccagccagtgggacccccctcccgggttgaggggggcagcggcggcttctcctctgcctcttctttcgacgagtctgaggatgacgtggtggccgggggcggaggtgccagcgatcccgaggacaggtctgggagcaaaccctggaagaagctgaagacagttctgaagtattcaccctttgtggtctccttccgaaaacactacccttgggtccagctttctggacatgctgggaacttccaggcaggagaggatggtcggattctgaaacgtttctgtcagtgtgagcagcgcagcctggagcagctgatgaaagacccgctgcgacctttcgtgcctgcctactatggcatggtgctgcaggatggccagaccttcaaccagatggaagacctcctggctgactttgagggcccctccattatggactgcaagatgggcagcaggacctatctggaagaggagctagtgaaggcacgggaacgtccccgtccccggaaggacatgtatgagaagatggtggctgtggaccctggggcccctacccctgaggagcatgcccagggtgcagtcaccaagccccgctacatgcagtggagggaaaccatgagctccacctctaccctgggcttccggatcgagggcatcaagaaggcagatgggacctgtaacaccaacttcaagaagacgcaggcactggagcaggtgacaaaagtgctggaggacttcgtggatggagaccacgtcatcctgcaaaagtacgtggcatgcctagaagaacttcgtgaagctctggagatctcccccttcttcaagacccacgaggtggtaggcagctccctcctcttcgtgcacgaccacaccggcctggccaaggtctggatgatagacttcggcaagacggtggccttgcccgaccaccagacgctcagccacaggctgccctgggctgagggcaaccgtgaggacggctacctctggggcctggacaacatgatctgcctcctgcaggggctggcacagagctgagctgctcagccaccatcaggttaattggatggcgccagtctggctggaggagccctgagatgccatgggaggcctgaggttggccacgggggagctggcctccagggacgggagagattgtgtcatgtgccacacgagaccaacgtggaaaagtctgaagggccttgggagaccaggtagcacctggccccatcatgatgcaggggttttggggacctggaaggaaggtgatgaggcagtgagtcagaaaaaccagaacggggtccccggatctgccgggaaggcttctgaggggctgccctgagagcattcagttcacatgtcacagggtatggtgtgacagggtgcctgtggacacatgaatcacttctaacctgcctccctgtcagcctccaggctgccagctggctgaggccagggactgggtcaggctcatctgtggcgcctcagagggtcagcatcattggtgaacagatgcaggcgctgctggaccatctggggagagtgacagtccatgtcttcaccagggagccatttgagtgctgagcgacaagaggctcagagggcatgaccccatgggactggatgcggcctgagggctgataccgctgggcggtatcctgccctgctgtggccctgtgggatcctccgtgttcctcggcggactctgctgacctcctgcagacccaaaccacagccacatcccagcttctgtgccagcactgtgacagtacctcgctcctctgtgcaccagatccggcctcaggacttacacctcctgcctgacccccaggcttctctctcctttctcccagcaaactgcagtggcagaaaggaggttcagaggctgggaaagtgggcctccccttgcaactcagagctgctgcactcaggagggccccatccaatcccgggcccctgcagggaaaagcgctgggtgtgtgtcagaggcgcagggtgggtggggctgccagccaggaccctggcctgcagcctgatccaaaccaaagactgtagaaccctggggtgtggctaacggcccctccagcacccatagccaggtcttcctggcccttgaggctgggctggcggacaggcacctacctcttccttaagctgaagctcccacactgtcttccagggctgaggagatgctctccttttctactgaccatcttgatacttatttatacgagaggcagttgctggacggggtagtactgggaagcaggaggcagaatggctctgctgagcctcctacccatgacaacaccccaataaacagaacattcagagccaa

SEQ ID NO: 282332 - DNA, 739 bp, Homo sapiens
tttctgtgtgtgggaggtagggatcaggttcatttttttccatatggattgttgacccagcactgtttattgaaaagacttccctttccccactgaattgcagtgcctagtcataactgcacaactctacgtgtgtgtctttgtggactctgttgtattctgtgcattgatttgcccattcttgtgccacactgtggctttatgtcttaatatcaggaagggtaagccctccagtttgttctacataatttcctttgtcacatcctctgtgtgctcaggacctatctggaagaggagctagtgaaggcacgggaacgtccccgtccccggaaggacatgtatgagaagatggtggctgtggaccctggggcccctacccctgaggagcatgcccagggtgcagtcaccaagccccgctacatgcagtggagggaaaccatgagctccacctctaccctgggcttccggatcgagggcatcaaggtgaggaccaggaaccgcctggcctgtcccgggaaggcctatagccagatcccaggcagggcttcttggggaaagccacgagagagtgcaggagacggcgtgggatgaaaggctggggctggggaagcccagcctctttcttacctccatacccatcagagcccaggttctgtttatccgtctgcctgagcatctcctgagtccatcttttcctcctctccttctccatggtcatgtcctagtccagccccatctt

SEQ ID NO: 282333 - DNA, 2912 bp, Homo sapiens
  misc_feature (48)..(48): n is a, c, g, or t
agcaccaacaacacccaaacgcaatacggcaggtcaggcccctgttantcggatgagggcatgggttcatgggccctggacagagctggaaacgcatgggtcacagactcagccagagagggtcaagtcctgggctgataacctctggacccaccagaacagttccagcctccagactcacccagaaggagcctgtccctcaaaagagccaagtgctgatggctcctggaaagaattgtatactgatggctccaggacacaacaggatattgaaggtccctggacagagccatatactgatggctcccagaaaaaacaggatactgaagcagccaggaaacagcctggcactggtggtttccaaatacaacaggatactgatggctcctggacacaacctagcactgacggttcccagacagcacctgggacagactgcctcttgggagagcctgaggatggcccattagaggaaccagagcctggagaattgctgactcacctgtactctcacctgaagtgtagccccctgtgccctgtgccccgcctcatcattacccctgagacccctgagcctgaggcccagccagtgggacccccctcccgggttgaggggggcagcggcggcttctcctctgcctcttctttcgacgagtctgaggatgacgtggtggccgggggcggaggtgccagcgatcccgaggacaggtctgggagcaaaccctggaagaagctgaagacagttctgaagtattcaccctttgtggtctccttccgaaaacactacccttgggtccagctttctggacatgctgggaacttccaggcaggagaggatggtcggattctgaaacgtttctgtcagtgtgagcagcgcagcctggagcagctgatgaaagacccgctgcgacctttcgtgcctgcctactatggcatggtgctgcaggatggccagaccttcaaccagatggaagacctcctggctgactttgagggcccctccattatggactgcaagatgggcagcaggacctatctggaagaggagctagtgaaggcacgggaacgtccccgtccccggaaggacatgtatgagaagatggtggctgtggaccctggggcccctacccctgaggagcatgcccagggtgcagtcaccaagccccgctacatgcagtggagggaaaccatgagctccacctctaccctgggcttccggatcgagggcatcaagaaggcagatgggacctgtaacaccaacttcaagaagacgcaggcactggagcaggtgacaaaagtgctggaggacttcgtggatggagaccacgtcatcctgcaaaagtacgtggcatgcctagaagaacttcgtgaagctctggagatctcccccttcttcaagacccacgaggtggtaggcagctccctcctcttcgtgcacgaccacaccggcctggccaaggtctggatgatagacttcggcaagacggtggccttgcccgaccaccagacgctcagccacaggctgccctgggctgagggcaaccgtgaggacggctacctctggggcctggacaacatgatctgcctcctgcaggggctggcacagagctgagctgctcagccaccatcaggttaattggatggcgccagtctggctggaggagccctgagatgccatgggaggcctgaggttggccacgggggagctggcctccagggacgggagagattgtgtcatgtgccacacgagaccaacgtggaaaagtctgaagggccttgggagaccaggtagcacctggccccatcatgatgcaggggttttggggacctggaaggaaggtgatgaggcagtgagtcagaaaaaccagaacggggtccccggatctgccgggaaggcttctgaggggctgccctgagagcattcagttcacatgtcacagggtatggtgtgacagggtgcctgtggacacatgaatcacttctaacctgcctccctgtcagcctccaggctgccagctggctgaggccagggactgggtcaggctcatctgtggcgcctcagagggtcagcatcattggtgaacagatgcaggcgctgctggaccatctggggagagtgacagtccatgtcttcaccagggagccatttgagtgctgagcgacaagaggctcagagggcatgaccccatgggactggatgcggcctgagggctgataccgctgggcggtatcctgccctgctgtggccctgtgggatcctccgtgttcctcggcggactctgctgacctcctgcagacccaaaccacagccacatcccagcttctgtgccagcactgtgacagtacctcgctcctctgtgcaccagatccggcctcaggacttacacctcctgcctgacccccaggcttctctctcctttctcccagcaaactgcagtggcagaaaggaggttcagaggctgggaaagtgggcctccccttgcaactcagagctgctgcactcaggagggccccatccaatcccgggcccctgcagggaaaagcgctgggtgtgtgtcagaggcgcagggtgggtggggctgccagccaggaccctggcctgcagcctgatccaaaccaaagactgtagaaccctggggtgtggctaacggcccctccagcacccatagccaggtcttcctggcccttgaggctgggctggcggacaggcacctacctcttccttaagctgaagctcccacactgtcttccagggctgaggagatgctctccttttctactgaccatcttgatacttatttatacgagaggcagttgctggacggggtagtactgggaagcaggaggcagaatggctctgctgagcctcctacccatgacaacaccccaataaacagaacattcagagccaa

SEQ ID NO: 282334 - DNA, 3854 bp, Homo sapiens
  misc_feature (60)..(60): n is a, c, g, or t
gaaggagcgggcatgaggcgctgcccgtgccgtgggagcctgaacgaggcggaggccggnggcgctgcccgcggcggcccgcatgggactggaggcgccgcgaggagggcggcggcggcagccgggacagcagcgacctgggcccggcgcaggggccccggcggggcggccggaggggggcgggccctgggcccggacagaggggtccagcctccacagcgagcctgagagggccggcctcgggcctgcgccggggacagagagtccgcaggcagaattctggacagacggacagactgagcccgcggcagctggccttggagtagagaccgagaggcccaagcaaaagacggagccagacaggtccagcctccggacgcatctagaatggagctggtcagagctggagacgacttgtctttggacggagaccgggacagatggcctttggactgatccgcacaggtccgacctccagtttcagcccgaggaggccagcccctggacacagccaggggttcatgggccctggacagagctggaaacgcatgggtcacagactcagccagagagggtcaagtcctgggctgataacctctggacccaccagaacagttccagcctccagactcacccagaaggagcctgtccctcaaaagagccaagtgctgatggctcctggaaagaattgtatactgatggctccaggacacaacaggatattgaaggtccctggacagagccatatactgatggctcccagaaaaaacaggatactgaagcagccaggaaacagcctggcactggtggtttccaaatacaacaggatactgatggctcctggacacaacctagcactgacggttcccagacagcacctgggacagactgcctcttgggagagcctgaggatggcccattagaggaaccagagcctggagaattgctgactcacctgtactctcacctgaagtgtagccccctgtgccctgtgccccgcctcatcattacccctgagacccctgagcctgaggcccagccagtgggacccccctcccgggttgaggggggcagcggcggcttctcctctgcctcttctttcgacgagtctgaggatgacgtggtggccgggggcggaggtgccagcgatcccgaggacaggtctgggagcaaaccctggaagaagctgaagacagttctgaagtattcaccctttgtggtctccttccgaaaacactacccttgggtccagctttctggacatgctgggaacttccaggcaggagaggatggtcggattctgaaacgtttctgtcagtgtgagcagcgcagcctggagcagctgatgaaagacccgctgcgacctttcgtgcctgcctactatggcatggtgctgcaggatggccagaccttcaaccagatggaagacctcctggctgactttgagggcccctccattatggactgcaagatgggcagcaggacctatctggaagaggagctagtgaaggcacgggaacgtccccgtccccggaaggacatgtatgagaagatggtggctgtggaccctggggcccctacccctgaggagcatgcccagggtgcagtcaccaagccccgctacatgcagtggagggaaaccatgagctccacctctaccctgggcttccggatcgagggcatcaagaaggcagatgggacctgtaacaccaacttcaagaagacgcaggcactggagcaggtgacaaaagtgctggaggacttcgtggatggagaccacgtcatcctgcaaaagtacgtggcatgcctagaagaacttcgtgaagctctggagatctcccccttcttcaagacccacgaggtggtaggcagctccctcctcttcgtgcacgaccacaccggcctggccaaggtctggatgatagacttcggcaagacggtggccttgcccgaccaccagacgctcagccacaggctgccctgggctgagggcaaccgtgaggacggctacctctggggcctggacaacatgatctgcctcctgcaggggctggcacagagctgagctgctcagccaccatcaggttaattggatggcgccagtctggctggaggagccctgagatgccatgggaggcctgaggttggccacgggggagctggcctccagggacgggagagattgtgtcatgtgccacacgagaccaacgtggaaaagtctgaagggccttgggagaccaggtagcacctggccccatcatgatgcaggggttttggggacctggaaggaaggtgatgaggcagtgagtcagaaaaaccagaacggggtccccggatctgccgggaaggcttctgaggggctgccctgagagcattcagttcacatgtcacagggtatggtgtgacagggtgcctgtggacacatgaatcacttctaacctgcctccctgtcagcctccaggctgccagctggctgaggccagggactgggtcaggctcatctgtggcgcctcagagggtcagcatcattggtgaacagatgcaggcgctgctggaccatctggggagagtgacagtccatgtcttcaccagggagccatttgagtgctgagcgacaagaggctcagagggcatgaccccatgggactggatgcggcctgagggctgataccgctgggcggtatcctgccctgctgtggccctgtgggatcctccgtgttcctcggcggactctgctgacctcctgcagacccaaaccacagccacatcccagcttctgtgccagcactgtgacagtacctcgctcctctgtgcaccagatccggcctcaggacttacacctcctgcctgacccccaggcttctctctcctttctcccagcaaactgcagtggcagaaaggaggttcagaggctgggaaagtgggcctccccttgcaactcagagctgctgcactcaggagggccccatccaatcccgggcccctgcagggaaaagcgctgggtgtgtgtcagaggcgcagggtgggtggggctgccagccaggaccctggcctgcagcctgatccaaaccaaagactgtagaaccctggggtgtggctaacggcccctccagcacccatagccaggtcttcctggcccttgaggctgggctggcggacaggcacctacctcttccttaagctgaagctcccacactgtcttccagggctgaggagatgctctccttttctactgaccatcttgatacttatttatacgagaggcagttgctggacggggtagtactgggaagcaggaggcagaatggctctgctgagcctcctacccatgacaacaccccaataaacagaacattcagagccaaaaaaaaaacaaaactcacaaaaacaatgacaaaaaaaaaaacaaaataacaaaacaaaaaaaaaaaacaaaacaaaaaacaacagagcggaggagcaaccaaaatagcccacaagagggcgcgaaaaaaacacgagcacacaccaaaatgtactaaaaagaagtcgacacaacacaaggagaccaagacaacacagaaacaagcagagcgcgcgcgaggaatacacacaagcggcggaagacggagagaaccaaaaaacgagagaagcggaccacctcatgtgagagaggaacgaacacaacaaccccgcggggagcagacaaaaaaaggcggaacaacacacagagaacaaaacgaaaagcacacgccgcgagcgagcaaaaaccaaacataacgatgactagcaggaacgaacacaacacgcgcacgaccgactgggggacgagagaaagggggaagacggcggaagcacgaagaaaaaaaaaacag

SEQ ID NO: 282335 - DNA, 2161 bp, Homo sapiens
tttctgtgtgtgggaggtagggatcaggttcatttttttccatatggattgttgacccagcactgtttattgaaaagacttccctttccccactgaattgcagtgcctagtcataactgcacaactctacgtgtgtgtctttgtggactctgttgtattctgtgcattgatttgcccattcttgtgccacactgtggctttatgtcttaatatcaggaagggtaagccctccagtttgttctacataatttcctttgtcacatcctctgtgtgctcaggacctatctggaagaggagctagtgaaggcacgggaacgtccccgtccccggaaggacatgtatgagaagatggtggctgtggaccctggggcccctacccctgaggagcatgcccagggtgcagtcaccaagccccgctacatgcagtggagggaaaccatgagctccacctctaccctgggcttccggatcgagggcatcaagaaggcagatgggacctgtaacaccaacttcaagaagacgcaggcactggagcaggtgacaaaagtgctggaggacttcgtggatggagaccacgtcatcctgcaaaagtacgtggcatgcctagaagaacttcgtgaagctctggagatctcccccttcttcaagacccacgaggtggtaggcagctccctcctcttcgtgcacgaccacaccggcctggccaaggtctggatgatagacttcggcaagacggtggccttgcccgaccaccagacgctcagccacaggctgccctgggctgagggcaaccgtgaggacggctacctctggggcctggacaacatgatctgcctcctgcaggggctggcacagagctgagctgctcagccaccatcaggttaattggatggcgccagtctggctggaggagccctgagatgccatgggaggcctgaggttggccacgggggagctggcctccagggacgggagagattgtgtcatgtgccacacgagaccaacgtggaaaagtctgaagggccttgggagaccaggtagcacctggccccatcatgatgcaggggttttggggacctggaaggaaggtgatgaggcagtgagtcagaaaaaccagaacggggtccccggatctgccgggaaggcttctgaggggctgccctgagagcattcagttcacatgtcacagggtatggtgtgacagggtgcctgtggacacatgaatcacttctaacctgcctccctgtcagcctccaggctgccagctggctgaggccagggactgggtcaggctcatctgtggcgcctcagagggtcagcatcattggtgaacagatgcaggcgctgctggaccatctggggagagtgacagtccatgtcttcaccagggagccatttgagtgctgagcgacaagaggctcagagggcatgaccccatgggactggatgcggcctgagggctgataccgctgggcggtatcctgccctgctgtggccctgtgggatcctccgtgttcctcggcggactctgctgacctcctgcagacccaaaccacagccacatcccagcttctgtgccagcactgtgacagtacctcgctcctctgtgcaccagatccggcctcaggacttacacctcctgcctgacccccaggcttctctctcctttctcccagcaaactgcagtggcagaaaggaggttcagaggctgggaaagtgggcctccccttgcaactcagagctgctgcactcaggagggccccatccaatcccgggcccctgcagggaaaagcgctgggtgtgtgtcagaggcgcagggtgggtggggctgccagccaggaccctggcctgcagcctgatccaaaccaaagactgtagaaccctggggtgtggctaacggcccctccagcacccatagccaggtcttcctggcccttgaggctgggctggcggacaggcacctacctcttccttaagctgaagctcccacactgtcttccagggctgaggagatgctctccttttctactgaccatcttgatacttatttatacgagaggcagttgctggacggggtagtactgggaagcaggaggcagaatggctctgctgagcctcctacccatgacaacaccccaataaacagaacattcagagccaa

SEQ ID NO: 282336 - DNA, 1943 bp, Homo sapiens
  misc_feature (60)..(60): n is a, c, g, or t
gaaggagcgggcatgaggcgctgcccgtgccgtgggagcctgaacgaggcggaggccggnggcgctgcccgcggcggcccgcatgggactggaggcgccgcgaggagggcggcggcggcagccgggacagcagcgacctgggcccggcgcaggggccccggcggggcggccggaggggggcgggccctgggcccggacagaggggtccagcctccacagcgagcctgagagggccggcctcgggcctgcgccggggacagagagtccgcaggcagaattctggacagacggacagactgagcccgcggcagctggccttggagtagagaccgagaggcccaagcaaaagacggagccagacaggtccagcctccggacgcatctagaatggagctggtcagagctggagacgacttgtctttggacggagaccgggacagatggcctttggactgatccgcacaggtccgacctccagtttcagcccgaggaggccagcccctggacacagccaggggttcatgggccctggacagagctggaaacgcatgggtcacagactcagccagagagggtcaagtcctgggctgataacctctggacccaccagaacagttccagcctccagactcacccagaaggagcctgtccctcaaaagagccaagtgctgatggctcctggaaagaattgtatactgatggctccaggacacaacaggatattgaaggtccctggacagagccatatactgatggctcccagaaaaaacaggatactgaagcagccaggaaacagcctggcactggtggtttccaaatacaacaggatactgatggctcctggacacaacctagcactgacggttcccagacagcacctgggacagactgcctcttgggagagcctgaggatggcccattagaggaaccagagcctggagaattgctgactcacctgtactctcacctgaagtgtagccccctgtgccctgtgccccgcctcatcattacccctgagacccctgagcctgaggcccagccagtgggacccccctcccgggttgaggggggcagcggcggcttctcctctgcctcttctttcgacgagtctgaggatgacgtggtggccgggggcggaggtgccagcgatcccgaggacaggtctgggagcaaaccctggaagaagctgaagacagttctgaagtattcaccctttgtggtctccttccgaaaacactacccttgggtccagctttctggacatgctgggaacttccaggcaggagaggatggtcggattctgaaacgtttctgtcagtgtgagcagcgcagcctggagcagctgatgaaagacccgctgcgacctttcgtgcctgcctactatggcatggtgctgcaggatggccagaccttcaaccagatggaagacctcctggctgactttgagggcccctccattatggactgcaagatgggcagcaggacctatctggaagaggagctagtgaaggcacgggaacgtccccgtccccggaaggacatgtatgagaagatggtggctgtggaccctggggcccctacccctgaggagcatgcccagggtgcagtcaccaagccccgctacatgcagtggagggaaaccatgagctccacctctaccctgggcttccggatcgagggcatcaaggtgaggaccaggaaccgcctggcctgtcccgggaaggcctatagccagatcccaggcagggcttcttggggaaagccacgagagagtgcaggagacggcgtgggatgaaaggctggggctggggaagcccagcctctttcttacctccatacccatcagagcccaggttctgtttatccgtctgcctgagcatctcctgagtccatcttttcctcctctccttctccatggtcatgtcctagtccagccccatctt

SEQ ID NO: 282337 - DNA, 1198 bp, Homo sapiens
  misc_feature (60)..(60): n is a, c, g, or t
gaaggagcgggcatgaggcgctgcccgtgccgtgggagcctgaacgaggcggaggccggnggcgctgcccgcggcggcccgcatgggactggaggcgccgcgaggagggcggcggcggcagccgggacagcagcgacctgggcccggcgcaggggccccggcggggcggccggaggggggcgggccctgggcccggacagaggggtccagcctccacagcgagcctgagagggccggcctcgggcctgcgccggggacagagagtccgcaggcagaattctggacagacggacagactgagcccgcggcagctggccttggagtagagaccgagaggcccaagcaaaagacggagccagacaggtccagcctccggacgcatctagaatggagctggtcagagctggagacgacttgtctttggacggagaccgggacagatggcctttggactgatccgcacaggtccgacctccagtttcagcccgaggaggccagcccctggacacagccaggggttcatgggccctggacagagctggaaacgcatgggtcacagactcagccagagagggtcaagtcctgggctgataacctctggacccaccagaacagttccagcctccagactcacccagaaggagcctgtccctcaaaagagccaagtgctgatggctcctggaaagaattgtatactgatggctccaggacacaacaggatattgaaggtccctggacagagccatatactgatggctcccagaaaaaacaggatactgaagcagccaggaaacagcctggcactggtggtttccaaatacaacaggatactgatggctcctggacacaacctagcactgacggttcccagacagcacctgggacagactgcctcttgggagagcctgaggatggcccattagaggaaccagagcctggagaattgctgactcacctgtactctcacctgaagtgtagccccctgtgccctgtgccccgcctcatcattacccctgagacccctgagcctgaggcccagccagtgggacccccctcccgggttgaggggggcagcggcggcttctcctctgcctcttctttcgacgagtctgaggatgacgtggtggccgggggcggaggtgccagcgatcccgaggacaggtctggggtgagtgggacccatcctgcccttgagcca

SEQ ID NO: 282338 - DNA, 677 bp, Homo sapiens
ctcatggggaaccactttgtcagtttcttgtatttcttcctgttagtgccagtaaatggagttgtagatccgaaatgttcctcagtacgcatactgattggtactttgctattttcacttaatagtaacaccctgcagagttttccacatcattccatagaaagcttcctctttctgtttttttttcccccacagctatgtaacactgtttttgtgactgtgcctggtcccctatagacagacacctgggttgtttccattttttgccattagcaggcctcaaagaatcactttgtatataagacattttgcaagtatgcagattgagctgtagatttccagaagcaggactcctgggtcaaagcttaaaggcatgggaaatttgcgagagatgaccaaacttccactctcggtgttatgccactgcccatcccaccagcaatgtatgagaatgcctgttgcagatccgaccatgccattctcctgttcgaaacccttctgtggctccctagtaccttgaagtgaagttccatagcctgtagggccctctaggatctagcctcttctctctcattcttctcttttcttttttttttgagaaagagtctcgctctgtcacccaggctagatgccaagaccagcctgggaagcacagcaagaccccgtctctatttgga

SEQ ID NO: 282339 - DNA, 485 bp, Homo sapiens
ggctcggtccaagatgggtagatggacctatctggaagaggagctagtgaaggcacgggaacgtccccgtccccggaaggacatgtatgagaagatggtggctgtggaccctggggcccctacccctgaggagcatgcccagggtgcagtcaccaagccccgctacatgcagtggagggaaaccatgagctccacctctaccctgggcttccggatcgagggcatcaaggtgaggaccaggaaccgcctggcctgtcccgggaaggcctatagccagatcccaggcagggcttcttggggaaagccacgagagagtgcaggagacggcgtgggatgaaaggctggggctggggaagcccagcctctttcttacctccatacccatcagagcccaggttctgtttatccgtctgcctgagcatctcctgagtccatcttttcctcctctccttctccatggtcatgtcctagtccagccccatctt

SEQ ID NO: 282340 - DNA, 3029 bp, Homo sapiens
  misc_feature (60)..(60): n is a, c, g, or t
gaaggagcgggcatgaggcgctgcccgtgccgtgggagcctgaacgaggcggaggccggnggcgctgcccgcggcggcccgcatgggactggaggcgccgcgaggagggcggcggcggcagccgggacagcagcgacctgggcccggcgcaggggccccggcggggcggccggaggggggcgggccctgggcccggacagaggggtccagcctccacagcgagcctgagagggccggcctcgggcctgcgccggggacagagagtccgcaggcagaattctggacagacggacagactgagcccgcggcagctggccttggagtagagaccgagaggcccaagcaaaagacggagccagacaggtccagcctccggacgcatctagaatggagctggtcagagctggagacgacttgtctttggacggagaccgggacagatggcctttggactgatccgcacaggtccgacctccagtttcagcccgaggaggccagcccctggacacagccaggggttcatgggccctggacagagctggaaacgcatgggtcacagactcagccagagagggtcaagtcctgggctgataacctctggacccaccagaacagttccagcctccagactcacccagaaggagcctgtccctcaaaagagccaagtgctgatggctcctggaaagaattgtatactgatggctccaggacacaacaggatattgaaggtccctggacagagccatatactgatggctcccagaaaaaacaggatactgaagcagccaggaaacagcctggcactggtggtttccaaatacaacaggatactgatggctcctggacacaacctagcactgacggttcccagacagcacctgggacagactgcctcttgggagagcctgaggatggcccattagaggaaccagagcctggagaattgctgactcacctgtactctcacctgaagtgtagccccctgtgccctgtgccccgcctcatcattacccctgagacccctgagcctgaggcccagccagtgggacccccctcccgggttgaggggggcagcggcggcttctcctctgcctcttctttcgacgagtctgaggatgacgtggtggccgggggcggaggtgccagcgatcccgaggacaggtctgggagcaaaccctggaagaagctgaagacagttctgaagtattcaccctttgtggtctccttccgaaaacactacccttgggtccagctttctggacatgctgggaacttccaggcaggagaggatggtcggattctgaaacgtttctgtcagtgtgagcagcgcagcctggagcagctgatgaaagacccgctgcgacctttcgtgcctgcctactatggcatggtgctgcaggatggccagaccttcaaccagatggaagacctcctggctgactttgagggcccctccattatggactgcaagatgggcagcaggacctatctggaagaggagctagtgaaggcacgggaacgtccccgtccccggaaggacatgtatgagaagatggtggctgtggaccctggggcccctacccctgaggagcatgcccagggtgcagtcaccaagccccgctacatgcagtggagggaaaccatgagctccacctctaccctgggcttccggatcgagggcatcaagaaggcagatgggacctgtaacaccaacttcaagaagacgcaggcactggagcaggtgacaaaagtgctggaggacttcgtggatggagaccacgtcatcctgcaaaagtacgtggcatgcctagaagaacttcgtgaagctctggagatctcccccttcttcaagacccacgaggtggtaggcagctccctcctcttcgtgcacgaccacaccggcctggccaaggtctggatgatagacttcggcaagacggtggccttgcccgaccaccagacgctcagccacaggctgccctgggctgagggcaaccgtgaggacggctacctctggggcctggacaacatgatctgcctcctgcaggggctggcacagagctgagctgctcagccaccatcaggttaattggatggcgccagtctggctggaggagccctgagatgccatgggaggcctgaggttggccacgggggagctggcctccagggacgggagagattgtgtcatgtgccacacgagaccaacgtggaaaagtctgaagggccttgggagaccaggtagcacctggccccatcatgatgcaggggttttggggacctggaaggaaggtgatgaggcagtgagtcagaaaaaccagaacggggtccccggatctgccgggaaggcttctgaggggctgccctgagagcattcagttcacatgtcacagggtatggtgtgacagggtgcctgtggacacatgaatcacttctaacctgcctccctgtcagcctccaggctgccagctggctgaggccagggactgggtcaggctcatctgtggcgcctcagagggtcagcatcattggtgaacagatgcaggcgctgctggaccatctggggagagtgacagtccatgtcttcaccagggagccatttgagtgctgagcgacaagaggctcagagggcatgaccccatgggactggatgcggcctgagggctgataccgctgggcggtatcctgccctgctgtggccctgtgggatcctccgtgttcctcggcggactctgctgacctcctgcagacccaaaccacagccacatcccagcttctgtgccagcactgtgacagtacctcgctcctgctgggctggcggacaggcacctacctcttccttaagctgaagctcccacactgtcttccagggctgaggagatgctctccttttctactgaccatcttgatacttatttatacgagaggcagttgctggacggggtagtactgggaagcaggaggcagaatggctctgctgagcctcctacccatgacaacaccccaataaacagaacattcagagccaa

SEQ ID NO: 282341 - DNA, 2169 bp, Homo sapiens
  misc_feature (60)..(60): n is a, c, g, or t
gaaggagcgggcatgaggcgctgcccgtgccgtgggagcctgaacgaggcggaggccggnggcgctgcccgcggcggcccgcatgggactggaggcgccgcgaggagggcggcggcggcagccgggacagcagcgacctgggcccggcgcaggggccccggcggggcggccggaggggggcgggccctgggcccggacagaggggtccagcctccacagcgagcctgagagggccggcctcgggcctgcgccggggacagagagtccgcaggcagaattctggacagacggacagactgagcccgcggcagctggccttggagtagagaccgagaggcccaagcaaaagacggagccagacaggtccagcctccggacgcatctagaatggagctggtcagagctggagacgacttgtctttggacggagaccgggacagatggcctttggactgatccgcacaggtccgacctccagtttcagcccgaggaggccagcccctggacacagccaggggttcatgggccctggacagagctggaaacgcatgggtcacagactcagccagagagggtcaagtcctgggctgataacctctggacccaccagaacagttccagcctccagactcacccagaaggagcctgtccctcaaaagagccaagtgctgatggctcctggaaagaattgtatactgatggctccaggacacaacaggatattgaaggtccctggacagagccatatactgatggctcccagaaaaaacaggatactgaagcagccaggaaacagcctggcactggtggtttccaaatacaacaggatactgatggctcctggacacaacctagcactgacggttcccagacagcacctgggacagactgcctcttgggagagcctgaggatggcccattagaggaaccagagcctggagaattgctgactcacctgtactctcacctgaagtgtagccccctgtgccctgtgccccgcctcatcattacccctgagacccctgagcctgaggcccagccagtgggacccccctcccgggttgaggggggcagcggcggcttctcctctgcctcttctttcgacgagtctgaggatgacgtggtggccgggggcggaggtgccagcgatcccgaggacaggtctgggagcaaaccctggaagaagctgaagacagttctgaagtattcaccctttgtggtctccttccgaaaacactacccttgggtccagctttctggacatgctgggaacttccaggcaggagaggatggtcggattctgaaacgtttctgtcagtgtgagcagcgcagcctggagcagctgatgaaagacccgctgcgacctttcgtgcctgcctactatggcatggtgctgcaggatggccagaccttcaaccagatggaagacctcctggctgactttgagggcccctccattatggactgcaagatgggcagcaggacctatctggaagaggagctagtgaaggcacgggaacgtccccgtccccggaaggacatgtatgagaagatggtggctgtggaccctggggcccctacccctgaggagcatgcccagggtgcagtcaccaagccccgctacatgcagtggagggaaaccatgagctccacctctaccctgggcttccggatcgagggcatcaagctatgtaacactgtttttgtgactgtgcctggtcccctatagacagacacctgggttgtttccattttttgccattagcaggcctcaaagaatcactttgtatataagacattttgcaagtatgcagattgagctgtagatttccagaagcaggactcctgggtcaaagcttaaaggcatgggaaatttgcgagagatgaccaaacttccactctcggtgttatgccactgcccatcccaccagcaatgtatgagaatgcctgttgcagatccgaccatgccattctcctgttcgaaacccttctgtggctccctagtaccttgaagtgaagttccatagcctgtagggccctctaggatctagcctcttctctctcattcttctcttttcttttttttttgagaaagagtctcgctctgtcacccaggctagatgccaagaccagcctgggaagcacagcaagaccccgtctctatttgga

SEQ ID NO: 282342 - DNA, 216 bp, Homo sapiens
gcaggtcccctttcgttccctctcatggcagcacctctagcccctgccttccctggccttggccctgaccccaccctgctctgctccctacagagcaaaccctggaagaagctgaagacagttctgaagtattcaccctttgtggtctccttccgaaaacactacccttgggtccagctttctggacatgctggtaagtggggtggtggtggacag

SEQ ID NO: 282343 - DNA, 416 bp, Homo sapiens
  misc_feature (377)..(377): n is a, c, g, or t
  misc_feature (388)..(388): n is a, c, g, or t
  misc_feature (397)..(397): n is a, c, g, or t
gactataatcctgcttgaagtttgcttagattcctgggaagtctccctattccaaccctttttgagaaatgcccacagctcataacctacctgaggttatttgggtctcaggaaacacacagcacgtgccaatgttccaagaatgaagctctggttcccagcttctgctgctccaacttctatagcagcaaggagaaaagagtaacagacatactgatcacatctaattagaagattttccttaggcaacctgtgttgtgagtgttcttgagctgtatctacataagtcatgggcctttctcatcatctgggcactgtgggactcaggggatacagcaggacacagctatcttttctgggactcaaggaaaacctgnaaaggaagtanaaacaggtnaggcatatttttacgtggg

SEQ ID NO: 282344 - DNA, 830 bp, Homo sapiens
catttcacttcagaggtttattttattgctttcttggaaatacaattaattaaaaagacaatttaagataatttatgcaaatgaaatattgattgaagaaataattacagttggtgggaaaattgccatgttgacattagatattcatatatcattataattttaaaaattattatttttcagtgatagaaactgaacttaaactaagattggaaaaacacaataaagctaggcaaaattttaagtcatcaaataaatgagtaattgaatgaattagttaataaaatcaaatatattctcctggaaggcttataagacatttatttattcatttatcagatgaggacctaatttattactgaggacctaatctacgggaggtgcaaagaagaatgaaatattgtgtctgcctgtgatgcacattgcttaatatgaatactaagaaaaatagtcatctgtttctgttcctgtccccctcactgcaaggtgatttctttggggttctagtactgttttacacatatcacttcctagagtcagtatggtcaataaatacattcaatctcaacagcaggccaaaaatacatctggaggaaaaagtagatgtgtcatatgagaactacaaataaaattcaatgattattcacaggagaaagattgcatagggtgagagtagggagaagaaatgtgcttggctagaggattagcaggtatttaagaagcaatcccagcttttactcgagttcttttcaggcccgttgtcagaaagatttttgtcctatgaacccttaaagccttgaagccctgctaatgtgcttcgattcttgatt

SEQ ID NO: 282345 - DNA, 758 bp, Homo sapiens
gcagtggtcccagggtccaacttgtgctatttggaaatcaagacatgtccagagagggttttcaggaaaaggcttccagtgatgccacatccaaagcttaattgctccactgaaacactggcaacaaaaatcgtcttctcttctccctttgtgaaaaaggctttcacttaatgtggagaaaggtattatataccagggaaatggaactttgtataaatgattttcccccaagaggaactaaagcatttggaaggtatctgaattcagatgaggacctaatttattactgaggacctaatctacgggaggtgcaaagaagaatgaaatattgtgtctgcctgtgatgcacattgcttaatatgaatactaagaaaaatagtcatctgtttctgttcctgtccccctcactgcaagggcacttcaggactgcagcaaagggcatttgatggagtctataacagaaaagaaagtcctcctctggaatttctgactatatttcattggccacaactggattccatggccacccctaactactggggaggctgagaattcaaatgctgaaaattgcaatctccatagtgaaagacacgaagaaagaaattgattgaaatgggttacttaattcaattagcaacactttttctcagcaaaggagctgagaaagaaaatgttttggttcagtcctgggtaggggtgcttgacagtgcttaatatcaccagcactgaaggtaataaatattatctctcttttctat

SEQ ID NO: 282346 - DNA, 745 bp, Homo sapiens
gcagtggtcccagggtccaacttgtgctatttggaaatcaagacatgtccagagagggttttcaggaaaaggcttccagtgatgccacatccaaagcttaattgctccactgaaacactggcaacaaaaatcgtcttctcttctccctttgtgaaaaaggctttcacttaatgtggagaaaggtattatataccagggaaatggaactttgtataaatgattttcccccaagaggaactaaagcatttggaaggtatctgaattcagatgaggacctaatttattactgaggacctaatctacgggaggtgcaaagaagaatgaaatattgtgtctgcctgtgatgcacattgcttaatatgaatactaagaaaaatagtcatctgtttctgttcctgtccccctcactgcaaggtgatttctttggggttctagtactgttttacacatatcacttcctagagtcagtatggtcaataaatacattcaatctcaacagcaggccaaaaatacatctggaggaaaaagtagatgtgtcatatgagaactacaaataaaattcaatgattattcacaggagaaagattgcatagggtgagagtagggagaagaaatgtgcttggctagaggattagcaggtatttaagaagccgggtatttgggtggtctagcaaggccctgatgggaggggcttatggcgctgggaaaccctaaaccgcttgcgggctagcatattttcttgggg

SEQ ID NO: 282347 - DNA, 230 bp, Homo sapiens
  misc_feature (5)..(5): n is a, c, g, or t
gcccnacgcgtccgctcgttaatgtcaataaacaaactaaggccacacaacgcaaatagtcttaaatctaaatttgtgtgaataatccttttaacacagtgcttttttgtagctgtctaagtgtgttaaattgttaagctatttctttgtaaaataggacaatggaatgcatagtttttttttttcctgtaaagtatttttttaataaaaaaagtctgatttgtccttta

SEQ ID NO: 282348 - DNA, 6712 bp, Homo sapiens
  misc_feature (4704)..(4704): n is a, c, g, or t
  misc_feature (4717)..(4717): n is a, c, g, or t
acgctccctttccactcctccactcagagccggggacgcggcgggggcgcggcggaactacagctcccatgacgctttgcgcggcatagggtgctttacaatagaagctcggttggagaggcctgcggagaaaagctgggaacggccgcttccggcatgttcatctctggacgaagaacggccgacaagtggagggcggaggagagactccaatgcccagcgggcagtgcgcgggcggcgcttgcgcgatgcgcggacgggggggcggtcgggccatttaaatgtgtgtttgtgggtgaaatggctgcgcaggtcggagcggtgcgcgtagtacgggcggtggcggcgcaggaggagccggacaaagaggggaaggagaaacctcatgctggggtctccccgcggggagttaaacggcagcgccgatctagcagtggggggtctcaggagaagcgggggcggccgagccaggagccccctctcgctccccctcaccggcggcgtcgcagccgccaacatcctgggccgctgccgccaacgaatgcagccccaactgtcccaggccctgttgagcctcttctcctgccgcctccgccgccaccttcgctggcacccgccgggcccgctgtcgctgcccctctcccggccccaagcacctcggccctcttcaccttctcgcctctgacggtgagcgcggccgggcccaagcataagggccacaaggagcggcacaagcaccatcaccaccgcggccccgatggtgatcccagctcctgcggaaccgatctcaagcacaaggacaagcaggaaaacggcgagaggactggaggggtgcctctgatcaaagcccccaagagagaaacaccagatgaaaatggtaaaacccagagagccgatgattttgtcttgaagaaaataaagaagaaaaagaaaaagaaacaccgagaagacatgcgaggaagacgccttaaaatgtacaataaggaagtacaaaccgtctgtgctggcctgacccgcatcagtaaagaaattctcacccaaggacaaataaatagcacttcaggacttaataaggagtccttcaggtatctgaaagatgaacagctgtgccgattaaatttgggtatgcaagaatatcgggtaccccagggagtacaaacaccttttatgactcaccaggaacattctattcgtagaaatttcttaaaaacaggtactaaatttagcaactttattcatgaggaacaccagtccaatggtggtgctcttgtccttcatgcttacatggatgaactctcatttttgtctccaatggagatggagagattttctgaggagtttcttgctttgacattcagtgaaaatgagaaaaatgctgcttactatgctttagcaatagtgcatggagcggctgcttatctcccagacttcttggactactttgcttttaatttccccaacactccagtgaaaatggaaattctgggcaagaaagatattgaaacaaccaccatttcaaattttcacactcaggtcaacaggacatactgctgtggcacctaccgagcaggtcctatgcggcagataagtctcgttggagcagtagatgaagaagttggtgattatttcccagagttccttgatatgttagaagaatcaccatttctgaaaatgactttgccctggggtacactttctagcctccgactccagtgtaggtcccagagtgatgatgggcctataatgtgggtaaggccaggagaacagatgatccctacagcagatatgccaaagtcacccttcaaaagacgacgatcaatgaatgaaataaaaaatctccagtacctacctcggaccagtgaaccccgcgaagttctctttgaagataggactagagctcatgctgatcatgtcggtcaggggtttgactggcagagtacggctgctgttggagttttgaaagctgtacaatttggtgaatggagtgaccaacctcgcataaccaaagatgtgatttgttttcatgctgaggattttactgatgttgtacaaagacttcagttagatcttcatgaacctccagtttcccagtgcgtacagtgggtagatgaagctaaactaaaccaaatgaggcgggaaggcattcgttatgctagaattcagctttgcgacaatgatatctacttcatccctagaaatgtcattcatcagttcaaaacagtttcggcggtgtgcagcttagcctggcatataaggcttaaacagtaccaccctgttgtggaagccactcaaaacacagaaagcaattctaacatggactgtggtttaactggaaagcgagaattagaagttgactcccaatgtgtgaggataaaaactgaatctgaagaagcatgcacagagattcagctgttaacaactgcttcatcatctttcccacctgcatcagaacttaatctacagcaagatcagaagactcagcctattccagttttaaaagtggaaagtagactggactctgaccagcaacacaatctgcaagaacattcaaccacttctgtgtgatatgtacatattcaaacacattttttaacttttttaaattttgatgtgaagttatagttttataactggcttaagttaagttttattggagaaatcttgcctataattctataaagagaaatgacattccacaaatgtcaagcatatcttttttacacagattatgcaaagttaagagttgtatcttatcccgttagtacagtatgtaatagtgggtctgctgctactttctgttttaaggtgtgaggtaacaattcaatctcttcttcaaatcaaaatgagaattctctggaataacagattcttgtttggtaaattattcacttcccttaattttatcttgccttgtctcttgccatatttgctgtttttatggataaataagatttatggtttagtacttgtgtctttatggcacaggttcaatttctacagtgaaaatggcataggttgcaggaaagaatttctgcatctggtacatgggcaagtaagttatttagttctaaccacaaataacaagtagtttccaaggaaatttcagtggctctctggtttcttaacaaaagagaaagcacagcactttctgatccaaactgtcttttttttgtatctgttatttaaagcccagtggatatttcaattaaaaaaaaaatctaaagatgaatagtccttggtcattcattatccatggctcattaatctcttctagaatatatgctaactgttgaagatattttgggtaaaagagataatgttgacatgatactctattgttctgcttcctggcatcctcacattttgtggggataattttgcttcctaaactgatcacaactattaaacttagagaataataatagtctttctgatgaggctgccatattttgagcatcaatcttatgataaactattcttgtcacttggcatcaacctcttcatgataaatatctactactgagacacttcaattcacagttttaactggtgaatacctgggtttatttactattactctgtgttgctattttctaagaaagaatacagcactagacttcatcctagagtttcaggtaggctaatgcttagtgcctgagtatttaaattttcttttcaaacaggcacagttcacattgctagtatggtcctaactttctgttattttagaatgttaacatgattcacattatactttctcttagttaataatacagtaggccttttgtttattaatggaagagtactccccacacctaagaccagattcttatatctccctggttacagtgcaatttggagattttttttttttcctggatggtaagatttgaaatatttacattaacataggcaaaaaaaaaaaaaatacaagatgctgctttattatgtctgtcaccatgaaaacttagctgcatcttttgaaatatcaaatatgaattttctctaaaatattctgaaataggttaaatcttatataaatattactttgtgcaatattgttgtgtagttaaatgcatattagcaaagtatagaggtcactgtgtaaaccgatagaaaagtaaccatcagcaaatactgcagtgattagttagaatctgtattattccttatatatatgtatatgtatgtattctctgttacaaaggatgaagacaaatagggatacatttcaatgtaaaccatttatgaattggaagtgatgttggctttagttatctttgtaaataaggtaattagaatggtatgaaaggtaatgtgattattgcaggggtgtttttaaatcttgggtataaattctagggtaaattccagtttatccagactagtttttaacgggacctgcctttgagggtgttttttgttattttgttggggaggggtttaatcacaaagtgtgtgggtttgggttatttcttgtttttatttttctgtccagaagagctttaccaggctgtgcaaagtaaaattcttctcaggcaacatttgcttttaaaaataatcatgaagagaaggctgttaaagcaaaaattttttttttttaattttttcttgtcttccaagatccgatttccccatctcccacttgccatccagcagatgccatctgtcatccaagctggtcattgctaataaacaaggagnctgtctcctgacngccagcactgtgtattatcactcaggaaccagcggatctgcaaagacctacaatcaaaagcaaatccccattttccttttataaaacattctaccctcacctccaatataaacacattaaaagagtacaataaaaatgtttaaaatcatgtactaataaattcattgtatgttagaattgcaatagaatgaagagaaacatttagctagtaacgtgatctgaaaactgaatgtcctatgtgagtattagattttaatagcatgctttaaagactgatgagtataaaagcagaagttttgcgttttttactgctttcaaagctgtatcctagtttagtgatacaaatgattgcaatttttctaaatcattaaattatttggtttggtggagtgaggcatggagcaatctggcgtcttctgatttgttaaagtagtgatggcagtgaagttgtaactgaaatttaagctgatcttcctttttggtatattatccgttgtgccagctcttgagattacttgcacaatgtggctataagttttaatattttgtggagcagagggatggtttttaaatgtgcttatggaaaggacccaataaatgaatattcctaacttagtaaagtagaataatttcatggtattcattaaaaagcataaaagtcttcctcttgccccagaagtaattctctataccaagatatgctaggagtaggatgatgattcaaagtggtaacccaaattcataaagcaataataataaaaacctatatagtatgttctctcctccaaagttttaactctaaaaattggttcctaggtttaattgtacctttaatttgcttattcagtacttagaatttgtttaactggtacttttattattttttagtgaaagacttttgaaaagtgccctttccccttaagagacagttggaataccagttgactaatattacaagctcttgtagggggaaaaaggagcttattaaagttgtttactaaactttaggaaaagatgtcttgcatcagtcttactaggcataaaagtcacacttaatgactggaaaaaacttgcttattgcctttccctatataaatattaattgtctagaatgaaagctaatataggaacaagactcccaaatccatgaaaacgcttagtgaatatattcttaatcattaataaattagcccattatattttcatctgtatttgccataaaaaatttatttgcatttatgcctttaggataattttgtatctttctaatctgttttatcattgctacaggtttttaaaaaagaacctttcactagctagcacatgccagaggttcacatctgttttgtttttcaaacaggtcgtagctgtatttattggccatgcaagtagaggaaatgcacagtacaaatgtttttctttagcacgtaagggacctatccttgtcttgaaagtttgttgctttaaaagcaagtatctctccataaatattatggccttccattttcttcatacattttttaggatccacttgtgcatgtagttgagaccactgtctcttaaaatatagcacttttcaattctctctaaagaaatacttatgtactactatcacatgttgtaaattttcatgtaatagtgttttctgtgagtaaactccattttgattggcagctaagactttttttcctgtggcttttatttatctaagaggtctttgcatatagatgaaatgtatatttgcctggcggactatttgcgttgtgtggccttagtttgtttattgacattaacgagtgttttaaaaaggtttttaatgaatagtcttaaatctaaatttgtgtgaataatccttttaacacagtgcttttttgtagctgtctaagtgtgttaaattgttaagctatttctttgtaaaataggacaatggaatgcatagtttttttttttcctgtaaagtatttttttaataaaaaaagtctgatttgtccttta

SEQ ID NO: 282349 - DNA, 6654 bp, Homo sapiens
  misc_feature (4646)..(4646): n is a, c, g, or t
  misc_feature (4659)..(4659): n is a, c, g, or t
acgctccctttccactcctccactcagagccggggacgcggcgggggcgcggcggaactacagctcccatgacgctttgcgcggcatagggtgctttacaatagaagctcggttggagaggcctgcggagaaaagctgggaacggccgcttccggcatgttcatctctggacgaagaacggccgacaagtggagggcggaggagagactccaatgcccagcgggcagtgcgcgggcggcgcttgcgcgatgcgcggacgggggggcggtcgggccatttaaatgtgtgtttgtgggtgaaatggctgcgcaggtcggagcggtgcgcgtagtacgggcggtggcggcgcaggaggagccggacaaagaggggaaggagaaacctcatgctggggtctccccgcggggagttaaacggcagcgccgatctagcagtggggggtctcaggagaagcgggggcggccgagccaggagccccctctcgctccccctcaccggcggcgtcgcagccgccaacatcctgggccgctgccgccaacgaatgcagccccaactgtcccaggccctgttgagcctcttctcctgccgcctccgccgccaccttcgctggcacccgccgggcccgctgtcgctgcccctctcccggccccaagcacctcggccctcttcaccttctcgcctctgacggtgagcgcggccgggcccaagcataagggccacaaggagcggcacaagcaccatcaccaccgcggccccgatggtgatcccagctcctgcggaaccgatctcaagcacaaggacaagcaggaaaacggcgagaggactggaggggtgcctctgatcaaagcccccaagagagaaacaccagatgaaaatggtaaaacccagagagccgatgattttgtcttgaagaaaataaagaagaaaaagaaaaagaaacaccgagaagacatgcgaggaagacgccttaaaatgtacaataaggaagtacaaaccgtctgtgctggcctgacccgcatcagtaaagaaattctcacccaaggacaaataaatagcacttcaggacttaataaggagtccttcaggtatctgaaagatgaacagctgtgccgattaaatttgggtatgcaagaatatcgggtaccccagggagtacaaacaccttttatgactcaccaggaacattctattcgtagaaatttcttaaaaacaggtactaaatttagcaactttattcatgaggaacaccagtccaatggtggtgctcttgtccttcatgcttacatggatgaactctcatttttgtctccaatggagatggagagattttctgaggagtttcttgctttgacattcagtgaaaatgagaaaaatgctgcttactatgctttagcaatagtgcatggagcggctgcttatctcccagacttcttggactactttgcttttaatttccccaacactccagtgaaaatggaaattctgggcaagaaagatattgaaacaaccaccatttcaaattttcacactcaggtcaacaggacatactgctgtggcacctaccgagcaggtcctatgcggcagataagtctcgttggagcagtagatgaagaagttggtgattatttcccagagttccttgatatgttagaagaatcaccatttctgaaaatgactttgccctggggtacactttctagcctccgactccagtgtaggtcccagagtgatgatgggcctataatgtgggtaaggccaggagaacagatgatccctacagcagatatgccaaagtcacccttcaaaagacgacgatcaatgaatgaaataaaaaatctccagtacctacctcggaccagtgaaccccgcgaagttctctttgaagataggactagagctcatgctgatcatgtcggtcaggggtttgactggcagagtacggctgctgttggagttttgaaagctgtacaatttggtgaatggagtgaccaacctcgcataaccaaagatgtgatttgttttcatgctgaggattttactgatgttgtacaaagacttcagttagatcttcatgaacctccagtttcccagtgcgtacagtgggtagatgaagctaaactaaaccaaatgaggcgggaaggcattcgttatgctagaattcagctttgcgacaatgatatctacttcatccctagaaatgtcattcatcagttcaaaacagtttcggcggtgtgcagcttagcctggcatataaggcttaaacagtaccaccctgttgtggaagccactcaaaacacagaaagcaattctaacatggactgtggtttaactggaaagcgagaattagaagttgactcccaatgtgtgaggataaaaactgaatctgaagaagcatgcacagagattcagctgttaacaactgcttcatcatctttcccacctgcatcagaacttaatctacagcaagatcagaagactcagcctattccagttttaaaagtggaaagtagactggactctgaccagcaacacaatctgcaagaacattcaaccacttctgtgtgatatgtacatattcaaacacattttttaacttttttaaattttgatgtgaagttatagttttataactggcttaagttaagttttattggagaaatcttgcctataattctataaagagaaatgacattccacaaatgtcaagcatatcttttttacacagattatgcaaagttaagagttgtatcttatcccgttagtacagtatgtaatagtgggtctgctgctactttctgttttaaggtgtgaggtaacaattcaatctcttcttcaaatcaaaatgagaattctctggaataacagattcttgtttggtaaattattcacttcccttaattttatcttgccttgtctcttgccatatttgctgtttttatggataaataagatttatggtttagtacttgtgtctttatggcacaggttcaatttctacagtgaaaatggcataggttgcaggaaagaatttctgcatctggtacatgggcaagtaagttatttagttctaaccacaaataacaagtagtttccaaggaaatttcagtggctctctggtttcttaacaaaagagaaagcacagcactttctgatccaaactgtcttttttttgtatctgttatttaaagcccagtggatatttcaattaaaaaaaaaatctaaagatgaatagtccttggtcattcattatccatggctcattaatctcttctagaatatatgctaactgttgaagatattttgggtaaaagagataatgttgacatgatactctattgttctgcttcctggcatcctcacattttgtggggataattttgcttcctaaactgatcacaactattaaacttagagaataataatagtctttctgatgaggctgccatattttgagcatcaatcttatgataaactattcttgtcacttggcatcaacctcttcatgataaatatctactactgagacacttcaattcacagttttaactggtgaatacctgggtttatttactattactctgtgttgctattttctaagaaagaatacagcactagacttcatcctagagtttcaggtaggctaatgcttagtgcctgagtatttaaattttcttttcaaacaggcacagttcacattgctagtatggtcctaactttctgttattttagaatgttaacatgattcacattatactttctcttagttaataatacagtaggccttttgtttattaatggaagagtactccccacacctaagaccagattcttatatctccctggttacagtgcaatttggagattttttttttttcctggatggtaagatttgaaatatttacattaacataggcaaaaaattttgaaatatcaaatatgaattttctctaaaatattctgaaataggttaaatcttatataaatattactttgtgcaatattgttgtgtagttaaatgcatattagcaaagtatagaggtcactgtgtaaaccgatagaaaagtaaccatcagcaaatactgcagtgattagttagaatctgtattattccttatatatatgtatatgtatgtattctctgttacaaaggatgaagacaaatagggatacatttcaatgtaaaccatttatgaattggaagtgatgttggctttagttatctttgtaaataaggtaattagaatggtatgaaaggtaatgtgattattgcaggggtgtttttaaatcttgggtataaattctagggtaaattccagtttatccagactagtttttaacgggacctgcctttgagggtgttttttgttattttgttggggaggggtttaatcacaaagtgtgtgggtttgggttatttcttgtttttatttttctgtccagaagagctttaccaggctgtgcaaagtaaaattcttctcaggcaacatttgcttttaaaaataatcatgaagagaaggctgttaaagcaaaaattttttttttttaattttttcttgtcttccaagatccgatttccccatctcccacttgccatccagcagatgccatctgtcatccaagctggtcattgctaataaacaaggagnctgtctcctgacngccagcactgtgtattatcactcaggaaccagcggatctgcaaagacctacaatcaaaagcaaatccccattttccttttataaaacattctaccctcacctccaatataaacacattaaaagagtacaataaaaatgtttaaaatcatgtactaataaattcattgtatgttagaattgcaatagaatgaagagaaacatttagctagtaacgtgatctgaaaactgaatgtcctatgtgagtattagattttaatagcatgctttaaagactgatgagtataaaagcagaagttttgcgttttttactgctttcaaagctgtatcctagtttagtgatacaaatgattgcaatttttctaaatcattaaattatttggtttggtggagtgaggcatggagcaatctggcgtcttctgatttgttaaagtagtgatggcagtgaagttgtaactgaaatttaagctgatcttcctttttggtatattatccgttgtgccagctcttgagattacttgcacaatgtggctataagttttaatattttgtggagcagagggatggtttttaaatgtgcttatggaaaggacccaataaatgaatattcctaacttagtaaagtagaataatttcatggtattcattaaaaagcataaaagtcttcctcttgccccagaagtaattctctataccaagatatgctaggagtaggatgatgattcaaagtggtaacccaaattcataaagcaataataataaaaacctatatagtatgttctctcctccaaagttttaactctaaaaattggttcctaggtttaattgtacctttaatttgcttattcagtacttagaatttgtttaactggtacttttattattttttagtgaaagacttttgaaaagtgccctttccccttaagagacagttggaataccagttgactaatattacaagctcttgtagggggaaaaaggagcttattaaagttgtttactaaactttaggaaaagatgtcttgcatcagtcttactaggcataaaagtcacacttaatgactggaaaaaacttgcttattgcctttccctatataaatattaattgtctagaatgaaagctaatataggaacaagactcccaaatccatgaaaacgcttagtgaatatattcttaatcattaataaattagcccattatattttcatctgtatttgccataaaaaatttatttgcatttatgcctttaggataattttgtatctttctaatctgttttatcattgctacaggtttttaaaaaagaacctttcactagctagcacatgccagaggttcacatctgttttgtttttcaaacaggtcgtagctgtatttattggccatgcaagtagaggaaatgcacagtacaaatgtttttctttagcacgtaagggacctatccttgtcttgaaagtttgttgctttaaaagcaagtatctctccataaatattatggccttccattttcttcatacattttttaggatccacttgtgcatgtagttgagaccactgtctcttaaaatatagcacttttcaattctctctaaagaaatacttatgtactactatcacatgttgtaaattttcatgtaatagtgttttctgtgagtaaactccattttgattggcagctaagactttttttcctgtggcttttatttatctaagaggtctttgcatatagatgaaatgtatatttgcctggcggactatttgcgttgtgtggccttagtttgtttattgacattaacgagtgttttaaaaaggtttttaatgaatagtcttaaatctaaatttgtgtgaataatccttttaacacagtgcttttttgtagctgtctaagtgtgttaaattgttaagctatttctttgtaaaataggacaatggaatgcatagtttttttttttcctgtaaagtatttttttaataaaaaaagtctgatttgtccttta

SEQ ID NO: 282350 - DNA, 6659 bp, Homo sapiens
  misc_feature (4651)..(4651): n is a, c, g, or t
  misc_feature (4664)..(4664): n is a, c, g, or t
acgctccctttccactcctccactcagagccggggacgcggcgggggcgcggcggaactacagctcccatgacgctttgcgcggcatagggtgctttacaatagaagctcggttggagaggcctgcggagaaaagctgggaacggccgcttccggcatgttcatctctggacgaagaacggccgacaagtggagggcggaggagagactccaatgcccagcgggcagtgcgcgggcggcgcttgcgcgatgcgcggacgggggggcggtcgggccatttaaatgtgtgtttgtgggtgaaatggctgcgcaggtcggagcggtgcgcgtagtacgggcggtggcggcgcaggaggagccggacaaagaggggaaggagaaacctcatgctggggtctccccgcggggagttaaacggcagcgccgatctagcagtggggggtctcaggagaagcgggggcggccgagccaggagccccctctcgctccccctcaccggcggcgtcgcagccgccaacatcctgggccgctgccgccaacgaatgcagccccaactgtcccaggccctgttgagcctcttctcctgccgcctccgccgccaccttcgctggcacccgccgggcccgctgtcgctgcccctctcccggccccaagcacctcggccctcttcaccttctcgcctctgacggtgagcgcggccgggcccaagcataagggccacaaggagcggcacaagcaccatcaccaccgcggccccgatggtgatcccagctcctgcggaaccgatctcaagcacaaggacaagcaggaaaacggcgagaggactggaggggtgcctctgatcaaagcccccaagagagaaacaccagatgaaaatggtaaaacccagagagccgatgattttgtcttgaagaaaataaagaagaaaaagaaaaagaaacaccgagaagacatgcgaggaagacgccttaaaatgtacaataaggaagtacaaaccgtctgtgctggcctgacccgcatcagtaaagaaattctcacccaaggacaaataaatagcacttcaggacttaataaggagtccttcaggtatctgaaagatgaacagctgtgccgattaaatttgggtatgcaagaatatcgggtaccccagggagtacaaacaccttttatgactcaccaggaacattctattcgtagaaatttcttaaaaacaggtactaaatttagcaactttattcatgaggaacaccagtccaatggtggtgctcttgtccttcatgcttacatggatgaactctcatttttgtctccaatggagatggagagattttctgaggagtttcttgctttgacattcagtgaaaatgagaaaaatgctgcttactatgctttagcaatagtgcatggagcggctgcttatctcccagacttcttggactactttgcttttaatttccccaacactccagtgaaaatggaaattctgggcaagaaagatattgaaacaaccaccatttcaaattttcacactcaggtcaacaggacatactgctgtggcacctaccgagcaggtcctatgcggcagataagtctcgttggagcagtagatgaagaagttggtgattatttcccagagttccttgatatgttagaagaatcaccatttctgaaaatgactttgccctggggtacactttctagcctccgactccagtgtaggtcccagagtgatgatgggcctataatgtgggtaaggccaggagaacagatgatccctacagcagatatgccaaagtcacccttcaaaagacgacgatcaatgaatgaaataaaaaatctccagtacctacctcggaccagtgaaccccgcgaagttctctttgaagataggactagagctcatgctgatcatgtcggtcaggggtttgactggcagagtacggctgctgttggagttttgaaagctgtacaatttggtgaatggagtgaccaacctcgcataaccaaagatgtgatttgttttcatgctgaggattttactgatgttgtacaaagacttcagttagatcttcatgaacctccagtttcccagtgcgtacagtgggtagatgaagctaaactaaaccaaatgaggcgggaaggcattcgttatgctagaattcagctttgcgacaatgatatctacttcatccctagaaatgtcattcatcagttcaaaacagtttcggcggtgtgcagcttagcctggcatataaggcttaaacagtaccaccctgttgtggaagccactcaaaacacagaaagcaattctaacatggactgtggtttaactggaaagcgagaattagaagttgactcccaatgtgtgaggataaaaactgaatctgaagaagcatgcacagagattcagctgttaacaactgcttcatcatctttcccacctgcatcagaacttaatctacagcaagatcagaagactcagcctattccagttttaaaacacttctgtgtgatatgtacatattcaaacacattttttaacttttttaaattttgatgtgaagttatagttttataactggcttaagttaagttttattggagaaatcttgcctataattctataaagagaaatgacattccacaaatgtcaagcatatcttttttacacagattatgcaaagttaagagttgtatcttatcccgttagtacagtatgtaatagtgggtctgctgctactttctgttttaaggtgtgaggtaacaattcaatctcttcttcaaatcaaaatgagaattctctggaataacagattcttgtttggtaaattattcacttcccttaattttatcttgccttgtctcttgccatatttgctgtttttatggataaataagatttatggtttagtacttgtgtctttatggcacaggttcaatttctacagtgaaaatggcataggttgcaggaaagaatttctgcatctggtacatgggcaagtaagttatttagttctaaccacaaataacaagtagtttccaaggaaatttcagtggctctctggtttcttaacaaaagagaaagcacagcactttctgatccaaactgtcttttttttgtatctgttatttaaagcccagtggatatttcaattaaaaaaaaaatctaaagatgaatagtccttggtcattcattatccatggctcattaatctcttctagaatatatgctaactgttgaagatattttgggtaaaagagataatgttgacatgatactctattgttctgcttcctggcatcctcacattttgtggggataattttgcttcctaaactgatcacaactattaaacttagagaataataatagtctttctgatgaggctgccatattttgagcatcaatcttatgataaactattcttgtcacttggcatcaacctcttcatgataaatatctactactgagacacttcaattcacagttttaactggtgaatacctgggtttatttactattactctgtgttgctattttctaagaaagaatacagcactagacttcatcctagagtttcaggtaggctaatgcttagtgcctgagtatttaaattttcttttcaaacaggcacagttcacattgctagtatggtcctaactttctgttattttagaatgttaacatgattcacattatactttctcttagttaataatacagtaggccttttgtttattaatggaagagtactccccacacctaagaccagattcttatatctccctggttacagtgcaatttggagattttttttttttcctggatggtaagatttgaaatatttacattaacataggcaaaaaaaaaaaaaatacaagatgctgctttattatgtctgtcaccatgaaaacttagctgcatcttttgaaatatcaaatatgaattttctctaaaatattctgaaataggttaaatcttatataaatattactttgtgcaatattgttgtgtagttaaatgcatattagcaaagtatagaggtcactgtgtaaaccgatagaaaagtaaccatcagcaaatactgcagtgattagttagaatctgtattattccttatatatatgtatatgtatgtattctctgttacaaaggatgaagacaaatagggatacatttcaatgtaaaccatttatgaattggaagtgatgttggctttagttatctttgtaaataaggtaattagaatggtatgaaaggtaatgtgattattgcaggggtgtttttaaatcttgggtataaattctagggtaaattccagtttatccagactagtttttaacgggacctgcctttgagggtgttttttgttattttgttggggaggggtttaatcacaaagtgtgtgggtttgggttatttcttgtttttatttttctgtccagaagagctttaccaggctgtgcaaagtaaaattcttctcaggcaacatttgcttttaaaaataatcatgaagagaaggctgttaaagcaaaaattttttttttttaattttttcttgtcttccaagatccgatttccccatctcccacttgccatccagcagatgccatctgtcatccaagctggtcattgctaataaacaaggagnctgtctcctgacngccagcactgtgtattatcactcaggaaccagcggatctgcaaagacctacaatcaaaagcaaatccccattttccttttataaaacattctaccctcacctccaatataaacacattaaaagagtacaataaaaatgtttaaaatcatgtactaataaattcattgtatgttagaattgcaatagaatgaagagaaacatttagctagtaacgtgatctgaaaactgaatgtcctatgtgagtattagattttaatagcatgctttaaagactgatgagtataaaagcagaagttttgcgttttttactgctttcaaagctgtatcctagtttagtgatacaaatgattgcaatttttctaaatcattaaattatttggtttggtggagtgaggcatggagcaatctggcgtcttctgatttgttaaagtagtgatggcagtgaagttgtaactgaaatttaagctgatcttcctttttggtatattatccgttgtgccagctcttgagattacttgcacaatgtggctataagttttaatattttgtggagcagagggatggtttttaaatgtgcttatggaaaggacccaataaatgaatattcctaacttagtaaagtagaataatttcatggtattcattaaaaagcataaaagtcttcctcttgccccagaagtaattctctataccaagatatgctaggagtaggatgatgattcaaagtggtaacccaaattcataaagcaataataataaaaacctatatagtatgttctctcctccaaagttttaactctaaaaattggttcctaggtttaattgtacctttaatttgcttattcagtacttagaatttgtttaactggtacttttattattttttagtgaaagacttttgaaaagtgccctttccccttaagagacagttggaataccagttgactaatattacaagctcttgtagggggaaaaaggagcttattaaagttgtttactaaactttaggaaaagatgtcttgcatcagtcttactaggcataaaagtcacacttaatgactggaaaaaacttgcttattgcctttccctatataaatattaattgtctagaatgaaagctaatataggaacaagactcccaaatccatgaaaacgcttagtgaatatattcttaatcattaataaattagcccattatattttcatctgtatttgccataaaaaatttatttgcatttatgcctttaggataattttgtatctttctaatctgttttatcattgctacaggtttttaaaaaagaacctttcactagctagcacatgccagaggttcacatctgttttgtttttcaaacaggtcgtagctgtatttattggccatgcaagtagaggaaatgcacagtacaaatgtttttctttagcacgtaagggacctatccttgtcttgaaagtttgttgctttaaaagcaagtatctctccataaatattatggccttccattttcttcatacattttttaggatccacttgtgcatgtagttgagaccactgtctcttaaaatatagcacttttcaattctctctaaagaaatacttatgtactactatcacatgttgtaaattttcatgtaatagtgttttctgtgagtaaactccattttgattggcagctaagactttttttcctgtggcttttatttatctaagaggtctttgcatatagatgaaatgtatatttgcctggcggactatttgcgttgtgtggccttagtttgtttattgacattaacgagtgttttaaaaaggtttttaatgaatagtcttaaatctaaatttgtgtgaataatccttttaacacagtgcttttttgtagctgtctaagtgtgttaaattgttaagctatttctttgtaaaataggacaatggaatgcatagtttttttttttcctgtaaagtatttttttaataaaaaaagtctgatttgtccttta

SEQ ID NO: 282351 - DNA, 4657 bp, Homo sapiens
  misc_feature (2649)..(2649): n is a, c, g, or t
  misc_feature (2662)..(2662): n is a, c, g, or t
attcctcttttactctcacccccaggctctggagtgaccaacctcgcataaccaaagatgtgatttgttttcatgctgaggattttactgatgttgtacaaagacttcagttagatcttcatgaacctccagtttcccagaaatgtcattcatcagttcaaaacagtttcggcggtgtgcagcttagcctggcatataaggcttaaacagtaccaccctgttgtggaagccactcaaaacacagaaagcaattctaacatggactgtggtttaactggaaagcgagaattagaagttgactcccaatgtgtgaggataaaaactgaatctgaagaagcatgcacagagattcagctgttaacaactgcttcatcatctttcccacctgcatcagaacttaatctacagcaagatcagaagactcagcctattccagttttaaaagtggaaagtagactggactctgaccagcaacacaatctgcaagaacattcaaccacttctgtgtgatatgtacatattcaaacacattttttaacttttttaaattttgatgtgaagttatagttttataactggcttaagttaagttttattggagaaatcttgcctataattctataaagagaaatgacattccacaaatgtcaagcatatcttttttacacagattatgcaaagttaagagttgtatcttatcccgttagtacagtatgtaatagtgggtctgctgctactttctgttttaaggtgtgaggtaacaattcaatctcttcttcaaatcaaaatgagaattctctggaataacagattcttgtttggtaaattattcacttcccttaattttatcttgccttgtctcttgccatatttgctgtttttatggataaataagatttatggtttagtacttgtgtctttatggcacaggttcaatttctacagtgaaaatggcataggttgcaggaaagaatttctgcatctggtacatgggcaagtaagttatttagttctaaccacaaataacaagtagtttccaaggaaatttcagtggctctctggtttcttaacaaaagagaaagcacagcactttctgatccaaactgtcttttttttgtatctgttatttaaagcccagtggatatttcaattaaaaaaaaaatctaaagatgaatagtccttggtcattcattatccatggctcattaatctcttctagaatatatgctaactgttgaagatattttgggtaaaagagataatgttgacatgatactctattgttctgcttcctggcatcctcacattttgtggggataattttgcttcctaaactgatcacaactattaaacttagagaataataatagtctttctgatgaggctgccatattttgagcatcaatcttatgataaactattcttgtcacttggcatcaacctcttcatgataaatatctactactgagacacttcaattcacagttttaactggtgaatacctgggtttatttactattactctgtgttgctattttctaagaaagaatacagcactagacttcatcctagagtttcaggtaggctaatgcttagtgcctgagtatttaaattttcttttcaaacaggcacagttcacattgctagtatggtcctaactttctgttattttagaatgttaacatgattcacattatactttctcttagttaataatacagtaggccttttgtttattaatggaagagtactccccacacctaagaccagattcttatatctccctggttacagtgcaatttggagattttttttttttcctggatggtaagatttgaaatatttacattaacataggcaaaaaaaaaaaaaatacaagatgctgctttattatgtctgtcaccatgaaaacttagctgcatcttttgaaatatcaaatatgaattttctctaaaatattctgaaataggttaaatcttatataaatattactttgtgcaatattgttgtgtagttaaatgcatattagcaaagtatagaggtcactgtgtaaaccgatagaaaagtaaccatcagcaaatactgcagtgattagttagaatctgtattattccttatatatatgtatatgtatgtattctctgttacaaaggatgaagacaaatagggatacatttcaatgtaaaccatttatgaattggaagtgatgttggctttagttatctttgtaaataaggtaattagaatggtatgaaaggtaatgtgattattgcaggggtgtttttaaatcttgggtataaattctagggtaaattccagtttatccagactagtttttaacgggacctgcctttgagggtgttttttgttattttgttggggaggggtttaatcacaaagtgtgtgggtttgggttatttcttgtttttatttttctgtccagaagagctttaccaggctgtgcaaagtaaaattcttctcaggcaacatttgcttttaaaaataatcatgaagagaaggctgttaaagcaaaaattttttttttttaattttttcttgtcttccaagatccgatttccccatctcccacttgccatccagcagatgccatctgtcatccaagctggtcattgctaataaacaaggagnctgtctcctgacngccagcactgtgtattatcactcaggaaccagcggatctgcaaagacctacaatcaaaagcaaatccccattttccttttataaaacattctaccctcacctccaatataaacacattaaaagagtacaataaaaatgtttaaaatcatgtactaataaattcattgtatgttagaattgcaatagaatgaagagaaacatttagctagtaacgtgatctgaaaactgaatgtcctatgtgagtattagattttaatagcatgctttaaagactgatgagtataaaagcagaagttttgcgttttttactgctttcaaagctgtatcctagtttagtgatacaaatgattgcaatttttctaaatcattaaattatttggtttggtggagtgaggcatggagcaatctggcgtcttctgatttgttaaagtagtgatggcagtgaagttgtaactgaaatttaagctgatcttcctttttggtatattatccgttgtgccagctcttgagattacttgcacaatgtggctataagttttaatattttgtggagcagagggatggtttttaaatgtgcttatggaaaggacccaataaatgaatattcctaacttagtaaagtagaataatttcatggtattcattaaaaagcataaaagtcttcctcttgccccagaagtaattctctataccaagatatgctaggagtaggatgatgattcaaagtggtaacccaaattcataaagcaataataataaaaacctatatagtatgttctctcctccaaagttttaactctaaaaattggttcctaggtttaattgtacctttaatttgcttattcagtacttagaatttgtttaactggtacttttattattttttagtgaaagacttttgaaaagtgccctttccccttaagagacagttggaataccagttgactaatattacaagctcttgtagggggaaaaaggagcttattaaagttgtttactaaactttaggaaaagatgtcttgcatcagtcttactaggcataaaagtcacacttaatgactggaaaaaacttgcttattgcctttccctatataaatattaattgtctagaatgaaagctaatataggaacaagactcccaaatccatgaaaacgcttagtgaatatattcttaatcattaataaattagcccattatattttcatctgtatttgccataaaaaatttatttgcatttatgcctttaggataattttgtatctttctaatctgttttatcattgctacaggtttttaaaaaagaacctttcactagctagcacatgccagaggttcacatctgttttgtttttcaaacaggtcgtagctgtatttattggccatgcaagtagaggaaatgcacagtacaaatgtttttctttagcacgtaagggacctatccttgtcttgaaagtttgttgctttaaaagcaagtatctctccataaatattatggccttccattttcttcatacattttttaggatccacttgtgcatgtagttgagaccactgtctcttaaaatatagcacttttcaattctctctaaagaaatacttatgtactactatcacatgttgtaaattttcatgtaatagtgttttctgtgagtaaactccattttgattggcagctaagactttttttcctgtggcttttatttatctaagaggtctttgcatatagatgaaatgtatatttgcctggcggactatttgcgttgtgtggccttagtttgtttattgacattaacgagtgttttaaaaaggtttttaatgaatagtcttaaatctaaatttgtgtgaataatccttttaacacagtgcttttttgtagctgtctaagtgtgttaaattgttaagctatttctttgtaaaataggacaatggaatgcatagtttttttttttcctgtaaagtatttttttaataaaaaaagtctgatttgtccttta

SEQ ID NO: 282352 - DNA, 454 bp, Homo sapiens
tcatgctgatcatgtcggtcaggggtttgactggcagagtacggctgctgttggagttttgaaagctgtacaatttggtgaatggtgagttaattgaactcaactgcaaggttggttaatattgtataagacaatgtggactctatttaaaaggtttaggaccagttttttaaattgtggtaaaatacacataaagtttgccatcttaaccatttttaaatgtacatttggtagagttaagcatctttacattgttacgaaacagagctccagaaccttttcatcttgcgaggctgtaactctatactcactgaacaacaattcctcttttactctcacccccaggctctggtaaccatcattctactttgtttctatgaatttgactactttacatatttcatatagatggaatcatatagtgtttatctttttgtgactggcttatttctct

SEQ ID NO: 282353 - DNA, 524 bp, Homo sapiens
ttgttgatttacctgtatgtatcatagtaattcataggctgacagcaaaatatgcctagcttaaatttaaattttatgatgataactgaacaaaagaatctatgttgttacatagatttcagaatcatcatatttagctatcgtataatgtttcataccattgctatatcatgatttatttaaccattctctgttttttggatgtgtgaattatttctgatttttctccattatcagtaatatactgctttgaaaaatggataccttcaattttattcttttcttcaatccagaatattattatatttaagatctctgtctcatttgttttctaaacacgtaagttgtaatagcaaattcagagaaattgaggataggctatttaatgagatcaagtaccttaagaagcttgtatgttgacactagtcctagcaactaacttctttttaattattgtggccagaaacaccagatgaaaatggtaaaacccagagagccgatgattttgtcttgaagaaaataaa

SEQ ID NO: 282354 - DNA, 6085 bp, Homo sapiens
  misc_feature (4704)..(4704): n is a, c, g, or t
  misc_feature (4717)..(4717): n is a, c, g, or t
  misc_feature (6023)..(6023): n is a, c, g, or t
  misc_feature (6033)..(6033): n is a, c, g, or t
  misc_feature (6045)..(6046): n is a, c, g, or t
  misc_feature (6051)..(6051): n is a, c, g, or t
acgctccctttccactcctccactcagagccggggacgcggcgggggcgcggcggaactacagctcccatgacgctttgcgcggcatagggtgctttacaatagaagctcggttggagaggcctgcggagaaaagctgggaacggccgcttccggcatgttcatctctggacgaagaacggccgacaagtggagggcggaggagagactccaatgcccagcgggcagtgcgcgggcggcgcttgcgcgatgcgcggacgggggggcggtcgggccatttaaatgtgtgtttgtgggtgaaatggctgcgcaggtcggagcggtgcgcgtagtacgggcggtggcggcgcaggaggagccggacaaagaggggaaggagaaacctcatgctggggtctccccgcggggagttaaacggcagcgccgatctagcagtggggggtctcaggagaagcgggggcggccgagccaggagccccctctcgctccccctcaccggcggcgtcgcagccgccaacatcctgggccgctgccgccaacgaatgcagccccaactgtcccaggccctgttgagcctcttctcctgccgcctccgccgccaccttcgctggcacccgccgggcccgctgtcgctgcccctctcccggccccaagcacctcggccctcttcaccttctcgcctctgacggtgagcgcggccgggcccaagcataagggccacaaggagcggcacaagcaccatcaccaccgcggccccgatggtgatcccagctcctgcggaaccgatctcaagcacaaggacaagcaggaaaacggcgagaggactggaggggtgcctctgatcaaagcccccaagagagaaacaccagatgaaaatggtaaaacccagagagccgatgattttgtcttgaagaaaataaagaagaaaaagaaaaagaaacaccgagaagacatgcgaggaagacgccttaaaatgtacaataaggaagtacaaaccgtctgtgctggcctgacccgcatcagtaaagaaattctcacccaaggacaaataaatagcacttcaggacttaataaggagtccttcaggtatctgaaagatgaacagctgtgccgattaaatttgggtatgcaagaatatcgggtaccccagggagtacaaacaccttttatgactcaccaggaacattctattcgtagaaatttcttaaaaacaggtactaaatttagcaactttattcatgaggaacaccagtccaatggtggtgctcttgtccttcatgcttacatggatgaactctcatttttgtctccaatggagatggagagattttctgaggagtttcttgctttgacattcagtgaaaatgagaaaaatgctgcttactatgctttagcaatagtgcatggagcggctgcttatctcccagacttcttggactactttgcttttaatttccccaacactccagtgaaaatggaaattctgggcaagaaagatattgaaacaaccaccatttcaaattttcacactcaggtcaacaggacatactgctgtggcacctaccgagcaggtcctatgcggcagataagtctcgttggagcagtagatgaagaagttggtgattatttcccagagttccttgatatgttagaagaatcaccatttctgaaaatgactttgccctggggtacactttctagcctccgactccagtgtaggtcccagagtgatgatgggcctataatgtgggtaaggccaggagaacagatgatccctacagcagatatgccaaagtcacccttcaaaagacgacgatcaatgaatgaaataaaaaatctccagtacctacctcggaccagtgaaccccgcgaagttctctttgaagataggactagagctcatgctgatcatgtcggtcaggggtttgactggcagagtacggctgctgttggagttttgaaagctgtacaatttggtgaatggagtgaccaacctcgcataaccaaagatgtgatttgttttcatgctgaggattttactgatgttgtacaaagacttcagttagatcttcatgaacctccagtttcccagtgcgtacagtgggtagatgaagctaaactaaaccaaatgaggcgggaaggcattcgttatgctagaattcagctttgcgacaatgatatctacttcatccctagaaatgtcattcatcagttcaaaacagtttcggcggtgtgcagcttagcctggcatataaggcttaaacagtaccaccctgttgtggaagccactcaaaacacagaaagcaattctaacatggactgtggtttaactggaaagcgagaattagaagttgactcccaatgtgtgaggataaaaactgaatctgaagaagcatgcacagagattcagctgttaacaactgcttcatcatctttcccacctgcatcagaacttaatctacagcaagatcagaagactcagcctattccagttttaaaagtggaaagtagactggactctgaccagcaacacaatctgcaagaacattcaaccacttctgtgtgatatgtacatattcaaacacattttttaacttttttaaattttgatgtgaagttatagttttataactggcttaagttaagttttattggagaaatcttgcctataattctataaagagaaatgacattccacaaatgtcaagcatatcttttttacacagattatgcaaagttaagagttgtatcttatcccgttagtacagtatgtaatagtgggtctgctgctactttctgttttaaggtgtgaggtaacaattcaatctcttcttcaaatcaaaatgagaattctctggaataacagattcttgtttggtaaattattcacttcccttaattttatcttgccttgtctcttgccatatttgctgtttttatggataaataagatttatggtttagtacttgtgtctttatggcacaggttcaatttctacagtgaaaatggcataggttgcaggaaagaatttctgcatctggtacatgggcaagtaagttatttagttctaaccacaaataacaagtagtttccaaggaaatttcagtggctctctggtttcttaacaaaagagaaagcacagcactttctgatccaaactgtcttttttttgtatctgttatttaaagcccagtggatatttcaattaaaaaaaaaatctaaagatgaatagtccttggtcattcattatccatggctcattaatctcttctagaatatatgctaactgttgaagatattttgggtaaaagagataatgttgacatgatactctattgttctgcttcctggcatcctcacattttgtggggataattttgcttcctaaactgatcacaactattaaacttagagaataataatagtctttctgatgaggctgccatattttgagcatcaatcttatgataaactattcttgtcacttggcatcaacctcttcatgataaatatctactactgagacacttcaattcacagttttaactggtgaatacctgggtttatttactattactctgtgttgctattttctaagaaagaatacagcactagacttcatcctagagtttcaggtaggctaatgcttagtgcctgagtatttaaattttcttttcaaacaggcacagttcacattgctagtatggtcctaactttctgttattttagaatgttaacatgattcacattatactttctcttagttaataatacagtaggccttttgtttattaatggaagagtactccccacacctaagaccagattcttatatctccctggttacagtgcaatttggagattttttttttttcctggatggtaagatttgaaatatttacattaacataggcaaaaaaaaaaaaaatacaagatgctgctttattatgtctgtcaccatgaaaacttagctgcatcttttgaaatatcaaatatgaattttctctaaaatattctgaaataggttaaatcttatataaatattactttgtgcaatattgttgtgtagttaaatgcatattagcaaagtatagaggtcactgtgtaaaccgatagaaaagtaaccatcagcaaatactgcagtgattagttagaatctgtattattccttatatatatgtatatgtatgtattctctgttacaaaggatgaagacaaatagggatacatttcaatgtaaaccatttatgaattggaagtgatgttggctttagttatctttgtaaataaggtaattagaatggtatgaaaggtaatgtgattattgcaggggtgtttttaaatcttgggtataaattctagggtaaattccagtttatccagactagtttttaacgggacctgcctttgagggtgttttttgttattttgttggggaggggtttaatcacaaagtgtgtgggtttgggttatttcttgtttttatttttctgtccagaagagctttaccaggctgtgcaaagtaaaattcttctcaggcaacatttgcttttaaaaataatcatgaagagaaggctgttaaagcaaaaattttttttttttaattttttcttgtcttccaagatccgatttccccatctcccacttgccatccagcagatgccatctgtcatccaagctggtcattgctaataaacaaggagnctgtctcctgacngccagcactgtgtattatcactcaggaaccagcggatctgcaaagacctacaatcaaaagcaaatccccattttccttttataaaacattctaccctcacctccaatataaacacattaaaagagtacaataaaaatgtttaaaatcatgtactaataaattcattgtatgttagaattgcaatagaatgaagagaaacatttagctagtaacgtgatctgaaaactgaatgtcctatgtgagtattagattttaatagcatgctttaaagactgatgagtataaaagcagaagttttgcgttttttactgctttcaaagctgtatcctagtttagtgatacaaatgattgcaatttttctaaatcattaaattatttggtttggtggagtgaggcatggagcaatctggcgtcttctgatttgttaaagtagtgatggcagtgaagttgtaactgaaatttaagctgatcttcctttttggtatattatccgttgtgccagctcttgagattacttgcacaatgtggctataagttttaatattttgtggagcagagggatggtttttaaatgtgcttatggaaaggacccaataaatgaatattcctaacttagtaaagtagaataatttcatggtattcattaaaaagcataaaagtcttcctcttgccccagaagtaattctctataccaagatatgctaggagtaggatgatgattcaaagtggtaacccaaattcataaagcaataataataaaaacctatatagtatgttctctcctccaaagttttaactctaaaaattggttcctaggtttaattgtacctttaatttgcttattcagtacttagaatttgtttaactggtacttttattattttttagtgaaagacttttgaaaagtgccctttccccttaagagacagttggaataccagttgactaatattacaagctcttgtagggggaaaaaggagcttattaaagttgtttactaaactttaggaaaagatgtcttgcatcagtcttactaggcataaaagtcacacttaatgactggaaaaaacttgcttattgcctttccctatataaatattaattgtctagaatgaaagctaatataggaacaagactcccaaatccatgaaaacgcttagtgaatatattcttaatcattaataaattagcccattatattttcatctgtatttgccataaaaaatttatttgcatttatgcctttaggataattttgtatctttctaatctgttttatcattgctacaggtttttaatcaaacangtcgaactgnatttatttgccnnccagntgaggaaatgcacccttctggttttttttaacct

SEQ ID NO: 282355 - DNA, 1672 bp, Homo sapiens
acgctccctttccactcctccactcagagccggggacgcggcgggggcgcggcggaactacagctcccatgacgctttgcgcggcatagggtgctttacaatagaagctcggttggagaggcctgcggagaaaagctgggaacggccgcttccggcatgttcatctctggacgaagaacggccgacaagtggagggcggaggagagactccaatgcccagcgggcagtgcgcgggcggcgcttgcgcgatgcgcggacgggggggcggtcgggccatttaaatgtgtgtttgtgggtgaaatggctgcgcaggtcggagcggtgcgcgtagtacgggcggtggcggcgcaggaggagccggacaaagaggggaaggagaaacctcatgctggggtctccccgcggggagttaaacggcagcgccgatctagcagtggggggtctcaggagaagcgggggcggccgagccaggagccccctctcgctccccctcaccggcggcgtcgcagccgccaacatcctgggccgctgccgccaacgaatgcagccccaactgtcccaggccctgttgagcctcttctcctgccgcctccgccgccaccttcgctggcacccgccgggcccgctgtcgctgcccctctcccggccccaagcacctcggccctcttcaccttctcgcctctgacggtgagcgcggccgggcccaagcataagggccacaaggagcggcacaagcaccatcaccaccgcggccccgatggtgatcccagctcctgcggaaccgatctcaagcacaaggacaagcaggaaaacggcgagaggactggaggggtgcctctgatcaaagcccccaagagagaaacaccagatgaaaatggtaaaacccagagagccgatgattttgtcttgaagaaaataaagaagaaaaagaaaaagaaacaccgagaagacatgcgaggaagacgccttaaaatgtacaataaggaagtacaaaccgtctgtgctggcctgacccgcatcagtaaagaaattctcacccaaggacaaataaatagcacttcaggacttaataaggagtccttcaggtatctgaaagatgaacagctgtgccgattaaatttgggtatgcaagaatatcgggtaccccagggagtacaaacaccttttatgactcaccaggaacattctattcgtagaaatttcttaaaaacaggtactaaatttagcaactttattcatgaggaacaccagtccaatggtggtgctcttgtccttcatgcttacatggatgaactctcatttttgtctccaatggagatggagagattttctgaggagtttcttgctttgacattcagtgaaaatgagaaaaatgctgcttactatgctttagcaatagtgcatggagcggctgcttatctcccagacttcttggactactttgcttttaatttccccaacactccagtgaaaatggaaattctgggcaagaaagatattgaaacaaccaccatttcaaattttcacactcaggtcaaaagggacatacttggtggggcacctaccggaccgggccttatgcggaaaaaaaatttttttgggacctttatatgaaaaaattgggggattttttcccaaaaattctttgattttgttagaaaaaacccccttt

SEQ ID NO: 282356 - DNA, 818 bp, Homo sapiens
caggtttatccactgtgctggggactcccaagccagcactggctcatactgattcattttgatctctgctaataccagagtcctgcgtggcagagccattggcaccagaaattacaagagaacatggccaagcgagttgccattgtgggagctggggtcagcggcctggcctccatcaagtgctgtctggaagaaggactggagcccacctgctttgagaggagcgatgaccttggggggctgtggagattcaccgaacatgttgaagaaggcagagccagtctctacaagtctgtggtttccaacagctgcaaggagatgtcttgttactcagactttccattcccagaagattatccaaactatgtgccaaattctcaattcctggaatatctcaaaatgtatgcaaaccactttgaccttctgaaacacattcaattcaagaccaaagtctgcagtgtaacaaaatgctcagattctgctgtctctggccaatgggaggtggtcactatgcatgaagagaagcaagagtcagccatctttgatgctgtcatggtctgcactggctttcttactaatccttatttgccactggattcctttccaggtattaatgcctttaaaggccagtactttcatagccggcaatataagcatccagatatatttaaggacaagagagtccttgtgattggaatgggaaattctggcacagacattgctgtggaggccagccacctggcggaaaagggtgttctccaggcaccaacggaagggggaatggggtgatccagccgaattcttgaattcgggttacc

SEQ ID NO: 282357 - DNA, 408 bp, Homo sapiens
taaactcaagcaaatgagtgacaacattcagccaaactagttgtgagattctgctatatcaaataattagtgagatgaccagatgcttatcttttcagctgacggcattattaccaggagcatacaaccagtcagctcaggctgctaacatttttgccagaaggatcaatgagtagctggtactagacgtgaaaggagagccatagtaaagcatctttatccataagtcaacagctagacctaaacttaagttgcatttgaggtttttattttaatcctacaggtgtaaataagttaccaccaccaagtgtcatgatagaggaaattaatgcaaggaaagaaaacaagcccagttggtaagttaactacttaatgcaccctttttaaattataactgaaattggtaaa

SEQ ID NO: 282358 - DNA, 2507 bp, Homo sapiens
caggtttatccactgtgctggggactcccaagccagcactggctcatactgattcattttgatctctgctaataccagagtcctgcgtggcagagccattggcaccagaaattacaagagaacatggccaagcgagttgccattgtgggagctggggtcagcggcctggcctccatcaagtgctgtctggaagaaggactggagcccacctgctttgagaggagcgatgaccttggggggctgtggagattcaccgaacatgttgaagaaggcagagccagtctctacaagtctgtggtttccaacagctgcaaggagatgtcttgttactcagactttccattcccagaagattatccaaactatgtgccaaattctcaattcctggaatatctcaaaatgtatgcaaaccactttgaccttctgaaacacattcaattcaagaccaaagtctgcagtgtaacaaaatgctcagattctgctgtctctggccaatgggaggtggtcactatgcatgaagagaagcaagagtcagccatctttgatgctgtcatggtctgcactggctttcttactaatccttatttgccactggattcctttccaggtattaatgcctttaaaggccagtactttcatagccggcaatataagcatccagatatatttaaggacaagagagtccttgtgattggaatgggaaattctggcacagacattgctgtggaggccagccacctggcggaaaaggtgttcctcagcaccaccggagggggatgggtgatcagccgaatctttgactcgggctacccatgggacatggtgttcatgacacgctttcagaacatgttgagaaattccctcccaaccccaattgtgacttggttgatggagcgaaagataaacaactggctcaatcatgcaaattacggcttaataccagaagacaggactcagctgaaagagtttgtgctaaatgatgagctcccaggacgcatcatcactgggaaagtgttcatcaggccaagcataaaagaggtaaaggaaaactctgtcatatttaacaatacttcaaaggaagagcctattgacatcattgtctttgccactggatacacatttgctttccccttccttgatgagtctgtagtgaaagttgaagatggccaggcctcactgtacaagtatatcttccctgcacatctgcaaaagccaaccctggccattattggcctcatcaaacccttgggctccatgatacctacaggagaaacacaagctcggtgggctgttcgagtcctgaaaggtttggcttgtgctactgcaaggctttacaatcagattatatcacatacatagatgaactcctgacctatatcaatgcaaaacccaacctgttctctatgctcctaacggatccacatctggctctgaccgtcttctttggcccatgctcaccataccagttccgcttgactggcccaggaaaatgggaaggagccagaaatgccatcatgacccagtgggaccgaacattcaaggtcatcaaagctcgagttgtacaagagtctccatctccctttgaaagttttcttaaagtctttagctttctggctttgcttgtggctatttttctgattttcctataagtaaaagatctcctaaatggaagatgcacagagtagatttacaatgctccaattcctctcttacagcaatattgccttcacagttataaactgtattcaaatagtaaaggccaccctctcgcttccctggctggccccagggctaccactggtattcctgagcctctcccagctccacttctaatgctagagaatgataactaagacttctgtgcatttgaaggttgttggaaagttacaggttcattttagaaagaaagctgttcttgacagcactctgagccatcatacctctttcccatataaactattttcacagatctcaactaaaaccccttacttcacaaatgattgtgttgtgctgaaatggtgctcttatagtactggcttattaaaagtaaaaaataaacctaaaaattgattgttttaaaaaaaaatttgttctcttattaaagattgggaaaagggagaaaaagatgaggattctatgaataaagctcataaaaggatagggggttcaatgagttactttgagagtttcccaaaggactgtacctgcctgggactgttcattcctccagaacactctttataacaaagctgttactccagctggcctcccaaagacccaaatcagattccacagaaaaccaccacctccacgggctcttagaaccagcctccagcagccaaaggaaaaagcctacctgcttagatcctccttcacaaccctgctgtaagaggcaaatggagctgcctccttttaaagagtcaatgagaaccaaccaaattcaattggaattcattagataaagagcacagccaagaagcttttaatggagagaaagcagggagagg

SEQ ID NO: 282359 - DNA, 2312 bp, Homo sapiens
caggtttatccactgtgctggggactcccaagccagcactggctcatactgattcattttgatctctgctaataccagagtcctgcgtggcagagccattggcaccagaaattacaagagaacatggccaagcgagttgccattgtgggagctggggtcagcggcctggcctccatcaagtgctgtctggaagaaggactggagcccacctgctttgagaggagcgatgaccttggggggctgtggagattcaccgaacatgttgaagaaggcagagccagtctctacaagtctgtggtttccaacagctgcaaggagatgtcttgttactcagactttccattcccagaagattatccaaactatgtgccaaattctcaattcctggaatatctcaaaatgtatgcaaaccactttgaccttctgaaacacattcaattcaagaccaaagtctgcagtgtaacaaaatgctcagattctgctgtctctggccaatgggaggtggtcactatgcatgaagagaagcaagagtcagccatctttgatgctgtcatggtctgcactggctttcttactaatccttatttgccactggattcctttccaggtattaatgcctttaaaggccagtactttcatagccggcaatataagcatccagatatatttaaggacaagagagtccttgtgattggaatgggaaattctggcacagacattgctgtggaggccagccacctggcggaaaaggtgttcctcagcaccaccggagggggatgggtgatcagccgaatctttgactcgggctacccatgggacatggtgttcatgacacgctttcagaacatgttgagaaattccctcccaaccccaattgtgacttggttgatggagcgaaagataaacaactggctcaatcatgcaaattacggcttaataccagaagacaggactcagctgaaagagtttgtgctaaatgatgagctcccaggacgcatcatcactgggaaagtgttcatcaggccaagcataaaagaggtgtaaataagttaccaccaccaagtgtcatgatagaggaaattaatgcaaggaaagaaaacaagcccagttggtttggcttgtgctactgcaaggctttacaatcagattatatcacatacatagatgaactcctgacctatatcaatgcaaaacccaacctgttctctatgctcctaacggatccacatctggctctgaccgtcttctttggcccatgctcaccataccagttccgcttgactggcccaggaaaatgggaaggagccagaaatgccatcatgacccagtgggaccgaacattcaaggtcatcaaagctcgagttgtacaagagtctccatctccctttgaaagttttcttaaagtctttagctttctggctttgcttgtggctatttttctgattttcctataagtaaaagatctcctaaatggaagatgcacagagtagatttacaatgctccaattcctctcttacagcaatattgccttcacagttataaactgtattcaaatagtaaaggccaccctctcgcttccctggctggccccagggctaccactggtattcctgagcctctcccagctccacttctaatgctagagaatgataactaagacttctgtgcatttgaaggttgttggaaagttacaggttcattttagaaagaaagctgttcttgacagcactctgagccatcatacctctttcccatataaactattttcacagatctcaactaaaaccccttacttcacaaatgattgtgttgtgctgaaatggtgctcttatagtactggcttattaaaagtaaaaaataaacctaaaaattgattgttttaaaaaaaaatttgttctcttattaaagattgggaaaagggagaaaaagatgaggattctatgaataaagctcataaaaggatagggggttcaatgagttactttgagagtttcccaaaggactgtacctgcctgggactgttcattcctccagaacactctttataacaaagctgttactccagctggcctcccaaagacccaaatcagattccacagaaaaccaccacctccacgggctcttagaaccagcctccagcagccaaaggaaaaagcctacctgcttagatcctccttcacaaccctgctgtaagaggcaaatggagctgcctccttttaaagagtcaatgagaaccaaccaaattcaattggaattcattagataaagagcacagccaagaagcttttaatggagagaaagcagggagagg

SEQ ID NO: 282360 - DNA, 1390 bp, Homo sapiens
cttttgaagggactcatcttgatttaagaaacagaaggagaccgttagataggtagggaaataaaggggaaaatgcagaaaccatcccaaattctgcagcagtatttgtttgctttgggcacttgtacttgttctaagattatcagtttttttgtcttcaccttttcccccaatcttccttttataaaggtttggcttgtgctactgcaaggctttacaatcagattatatcacatacatagatgaactcctgacctatatcaatgcaaaacccaacctgttctctatgctcctaacggatccacatctggctctgaccgtcttctttggcccatgctcaccataccagttccgcttgactggcccaggaaaatgggaaggagccagaaatgccatcatgacccagtgggaccgaacattcaaggtcatcaaagctcgagttgtacaagagtctccatctccctttgaaagttttcttaaagtctttagctttctggctttgcttgtggctatttttctgattttcctataagtaaaagatctcctaaatggaagatgcacagagtagatttacaatgctccaattcctctcttacagcaatattgccttcacagttataaactgtattcaaatagtaaaggccaccctctcgcttccctggctggccccagggctaccactggtattcctgagcctctcccagctccacttctaatgctagagaatgataactaagacttctgtgcatttgaaggttgttggaaagttacaggttcattttagaaagaaagctgttcttgacagcactctgagccatcatacctctttcccatataaactattttcacagatctcaactaaaaccccttacttcacaaatgattgtgttgtgctgaaatggtgctcttatagtactggcttattaaaagtaaaaaataaacctaaaaattgattgttttaaaaaaaaatttgttctcttattaaagattgggaaaagggagaaaaagatgaggattctatgaataaagctcataaaaggatagggggttcaatgagttactttgagagtttcccaaaggactgtacctgcctgggactgttcattcctccagaacactctttataacaaagctgttactccagctggcctcccaaagacccaaatcagattccacagaaaaccaccacctccacgggctcttagaaccagcctccagcagccaaaggaaaaagcctacctgcttagatcctccttcacaaccctgctgtaagaggcaaatggagctgcctccttttaaagagtcaatgagaaccaaccaaattcaattggaattcattagataaagagcacagccaagaagcttttaatggagagaaagcagggagagg

SEQ ID NO: 282361 - DNA, 2135 bp, Homo sapiens
caggtttatccactgtgctggggactcccaagccagcactggctcatactgattcattttgatctctgctaataccagagtcctgcgtggcagagccattggcaccagaaattacaagagaacatggccaagcgagttgccattgtgggagctggggtcagcggcctggcctccatcaagtgctgtctggaagaaggactggagcccacctgctttgagaggagcgatgaccttggggggctgtggagattcaccgaacatgttgaagaaggcagagccagtctctacaagtctgtggtttccaacagctgcaaggagatgtcttgttactcagactttccattcccagaagattatccaaactatgtgccaaattctcaattcctggaatatctcaaaatgtatgcaaaccactttgaccttctgaaacacattcaattcaagaccaaagtctgcagtgtaacaaaatgctcagattctgctgtctctggccaatgggaggtggtcactatgcatgaagagaagcaagagtcagccatctttgatgctgtcatggtctgcactggctttcttactaatccttatttgccactggattcctttccaggtattaatgcctttaaaggccagtactttcatagccggcaatataagcatccagatatatttaaggacaagagagtccttgtgattggaatgggaaattctggcacagacattgctgtggaggccagccacctggcggaaaaggtgttcctcagcaccaccggagggggatgggtgatcagccgaatctttgactcgggctacccatgggacatggtgttcatgacacgctttcagaacatgttgagaaattccctcccaaccccaattgtgacttggttgatggagcgaaagataaacaactggctcaatcatgcaaattacggcttaataccagaagacaggactcagctgaaagagtttgtgctaaatgatgagctcccaggacgcatcatcactgggaaagtgttcatcaggccaagcataaaagaggtaaaggaaaactctgtcatatttaacaatacttcaaaggaagagcctattgacatcattgtctttgccactggatacacatttgctttccccttccttgatgagtctgtagtgaaagttgaagatggccaggcctcactgtacaagtatatcttccctgcacatctgcaaaagccaaccctggccattattggcctcatcaaacccttgggctccatgatacctacaggagaaacacaagctcggtgggctgttcgagtcctgaaaggtgtaaataagttaccaccaccaagtgtcatgatagaggaaattaatgcaaggaaagaaaacaagcccagttggtttggcttgtgctactgcaaggctttacaatcagattatatcacatacatagatgaactcctgacctatatcaatgcaaaacccaacctgttctctatgctcctaacggatccacatctggctctgaccgtcttctttggcccatgctcaccataccagttccgcttgactggcccaggaaaatgggaaggagccagaaatgccatcatgacccagtgggaccgaacattcaaggtcatcaaagctcgagttgtacaagagtctccatctccctttgaaagttttcttaaagtctttagctttctggctttgcttgtggctatttttctgattttcctataagtaaaagatctcctaaatggaagatgcacagagtagatttacaatgctccaattcctctcttacagcaatattgccttcacagttataaactgtattcaaatagtaaaggccaccctctcgcttccctggctggccccagggctaccactggtattcctgagcctctcccagctccacttctaatgctagagaatgataactaagacttctgtgcatttgaaggttgttggaaagttacaggttcattttagaaagaaagctgttcttgacagcactctgagccatcatacctctttcccatataaactattttcacagatctcaactaaaaccccttacttcacaaatgattgtgttgtgctgaaatggtgctcttatagtactggcttattaaaagtaaaaaataaaccta

SEQ ID NO: 282362 - DNA, 1564 bp, Homo sapiens
caggtttatccactgtgctggggactcccaagccagcactggctcatactgattcattttgatctctgctaataccagagtcctgcgtggcagagccattggcaccagaaattacaagagaacatggccaagcgagttgccattgtgggagctggggtcagcggcctggcctccatcaagtgctgtctggaagaaggactggagcccacctgctttgagaggagcgatgaccttggggggctgtggagattcaccgaacatgttgaagaaggcagagccagtctctacaagtctgtggtttccaacagctgcaaggagatgtcttgttactcagactttccattcccagaagattatccaaactatgtgccaaattctcaattcctggaatatctcaaaatgtatgcaaaccactttgaccttctgaaacacattcaattcaagaccaaagtctgcagtgtaacaaaatgctcagattctgctgtctctggccaatgggaggtggtcactatgcatgaagagaagcaagagtcagccatctttgatgctgtcatggtctgcactggctttcttactaatccttatttgccactggattcctttccaggtattaatgcctttaaaggccagtactttcatagccggcaatataagcatccagatatatttaaggacaagagagtccttgtgattggaatgggaaattctggcacagacattgctgtggaggccagccacctggcggaaaaggtgttcctcagcaccaccggagggggatgggtgatcagccgaatctttgactcgggctacccatgggacatggtgttcatgacacgctttcagaacatgttgagaaattccctcccaaccccaattgtgacttggttgatggagcgaaagataaacaactggctcaatcatgcaaattacggcttaataccagaagacaggactcagctgaaagagtttgtgctaaatgatgagctcccaggacgcatcatcactgggaaagtgttcatcaggccaagcataaaagaggtaaaggaaaactctgtcatatttaacaatacttcaaaggaagagcctattgacatcattgtctttgccactggatacacatttgctttccccttccttgatgagtctgtagtgaaagttgaagatggccaggcctcactgtacaagtatatcttccctgcacatctgcaaaagccaaccctggccattattggcctcatcaaacccttgggctccatgatacctacaggagaaacacaagctcggtgggctgttcgagtcctgaaaggtaagtataagaaatagcagggcatgtgtttttggtgtgccatgtgattctggatactggaaatgttgagactattattcctcctgcttctatttaaaataacagaatctttaaaagcaggatgcattctattgtttgctgaattatactgtcataatgatttgttccattactgcataaatggtatatcagggtcaaaaatatatatatttttttgatataccaaaaatataacagttgacataggctgtatctatg

SEQ ID NO: 282363 - DNA, 1124 bp, Homo sapiens
caggtttatccactgtgctggggactcccaagccagcactggctcatactgattcattttgatctctgctaataccagagtcctgcgtggcagagccattggcaccagaaattacaagagaacatggccaagcgagttgccattgtgggagctggggtcagcggcctggcctccatcaagtgctgtctggaagaaggactggagcccacctgctttgagaggagcgatgaccttggggggctgtggagattcaccgaacatgttgaagaaggcagagccagtctctacaagtctgtggtttccaacagctgcaaggagatgtcttgttactcagactttccattcccagaagattatccaaactatgtgccaaattctcaattcctggaatatctcaaaatgtatgcaaaccactttgaccttctgaaacacattcaattcaagaccaaagtctgcagtgtaacaaaatgctcagattctgctgtctctggccaatgggaggtggtcactatgcatgaagagaaagctgttcttgacagcactctgagccatcatacctctttcccatataaactattttcacagatctcaactaaaaccccttacttcacaaatgattgtgttgtgctgaaatggtgctcttatagtactggcttattaaaagtaaaaaataaacctaaaaattgattgttttaaaaaaaaatttgttctcttattaaagattgggaaaagggagaaaaagatgaggattctatgaataaagctcataaaaggatagggggttcaatgagttactttgagagtttcccaaaggactgtacctgcctgggactgttcattcctccagaacactctttataacaaagctgttactccagctggcctcccaaagacccaaatcagattccacagaaaaccaccacctccacgggctcttagaaccagcctccagcagccaaaggaaaaagcctacctgcttagatcctccttcacaaccctgctgtaagaggcaaatggagctgcctccttttaaagagtcaatgagaaccaaccaaattcaattggaattcattagataaagagcacagccaagaagcttttaatggagagaaagcagggagagg

SEQ ID NO: 282364 - DNA, 2580 bp, Homo sapiens
caggtttatccactgtgctggggactcccaagccagcactggctcatactgattcattttgatctctgctaataccagagtcctgcgtggcagagccattggcaccagaaattacaagagaacatggccaagcgagttgccattgtgggagctggggtcagcggcctggcctccatcaagtgctgtctggaagaaggactggagcccacctgctttgagaggagcgatgaccttggggggctgtggagattcaccgaacatgttgaagaaggcagagccagtctctacaagtctgtggtttccaacagctgcaaggagatgtcttgttactcagactttccattcccagaagattatccaaactatgtgccaaattctcaattcctggaatatctcaaaatgtatgcaaaccactttgaccttctgaaacacattcaattcaagaccaaagtctgcagtgtaacaaaatgctcagattctgctgtctctggccaatgggaggtggtcactatgcatgaagagaagcaagagtcagccatctttgatgctgtcatggtctgcactggctttcttactaatccttatttgccactggattcctttccaggtattaatgcctttaaaggccagtactttcatagccggcaatataagcatccagatatatttaaggacaagagagtccttgtgattggaatgggaaattctggcacagacattgctgtggaggccagccacctggcggaaaaggtgttcctcagcaccaccggagggggatgggtgatcagccgaatctttgactcgggctacccatgggacatggtgttcatgacacgctttcagaacatgttgagaaattccctcccaaccccaattgtgacttggttgatggagcgaaagataaacaactggctcaatcatgcaaattacggcttaataccagaagacaggactcagctgaaagagtttgtgctaaatgatgagctcccaggacgcatcatcactgggaaagtgttcatcaggccaagcataaaagaggtaaaggaaaactctgtcatatttaacaatacttcaaaggaagagcctattgacatcattgtctttgccactggatacacatttgctttccccttccttgatgagtctgtagtgaaagttgaagatggccaggcctcactgtacaagtatatcttccctgcacatctgcaaaagccaaccctggccattattggcctcatcaaacccttgggctccatgatacctacaggagaaacacaagctcggtgggctgttcgagtcctgaaaggtgtaaataagttaccaccaccaagtgtcatgatagaggaaattaatgcaaggaaagaaaacaagcccagttggtttggcttgtgctactgcaaggctttacaatcagattatatcacatacatagatgaactcctgacctatatcaatgcaaaacccaacctgttctctatgctcctaacggatccacatctggctctgaccgtcttctttggcccatgctcaccataccagttccgcttgactggcccaggaaaatgggaaggagccagaaatgccatcatgacccagtgggaccgaacattcaaggtcatcaaagctcgagttgtacaagagtctccatctccctttgaaagttttcttaaagtctttagctttctggctttgcttgtggctatttttctgattttcctataagtaaaagatctcctaaatggaagatgcacagagtagatttacaatgctccaattcctctcttacagcaatattgccttcacagttataaactgtattcaaatagtaaaggccaccctctcgcttccctggctggccccagggctaccactggtattcctgagcctctcccagctccacttctaatgctagagaatgataactaagacttctgtgcatttgaaggttgttggaaagttacaggttcattttagaaagaaagctgttcttgacagcactctgagccatcatacctctttcccatataaactattttcacagatctcaactaaaaccccttacttcacaaatgattgtgttgtgctgaaatggtgctcttatagtactggcttattaaaagtaaaaaataaacctaaaaattgattgttttaaaaaaaaatttgttctcttattaaagattgggaaaagggagaaaaagatgaggattctatgaataaagctcataaaaggatagggggttcaatgagttactttgagagtttcccaaaggactgtacctgcctgggactgttcattcctccagaacactctttataacaaagctgttactccagctggcctcccaaagacccaaatcagattccacagaaaaccaccacctccacgggctcttagaaccagcctccagcagccaaaggaaaaagcctacctgcttagatcctccttcacaaccctgctgtaagaggcaaatggagctgcctccttttaaagagtcaatgagaaccaaccaaattcaattggaattcattagataaagagcacagccaagaagcttttaatggagagaaagcagggagagg

SEQ ID NO: 282365 - DNA, 2588 bp, Homo sapiens
cgctacagaagattcaaactgagcaaatcgcctaatcttccaaattctttttcctggcttgttagagcagccaagggtggggtggagcttgtgaataaaaagcctgcttcatcttcctcatgcaggagaacatggccaagcgagttgccattgtgggagctggggtcagcggcctggcctccatcaagtgctgtctggaagaaggactggagcccacctgctttgagaggagcgatgaccttggggggctgtggagattcaccgaacatgttgaagaaggcagagccagtctctacaagtctgtggtttccaacagctgcaaggagatgtcttgttactcagactttccattcccagaagattatccaaactatgtgccaaattctcaattcctggaatatctcaaaatgtatgcaaaccactttgaccttctgaaacacattcaattcaagaccaaagtctgcagtgtaacaaaatgctcagattctgctgtctctggccaatgggaggtggtcactatgcatgaagagaagcaagagtcagccatctttgatgctgtcatggtctgcactggctttcttactaatccttatttgccactggattcctttccaggtattaatgcctttaaaggccagtactttcatagccggcaatataagcatccagatatatttaaggacaagagagtccttgtgattggaatgggaaattctggcacagacattgctgtggaggccagccacctggcggaaaaggtgttcctcagcaccaccggagggggatgggtgatcagccgaatctttgactcgggctacccatgggacatggtgttcatgacacgctttcagaacatgttgagaaattccctcccaaccccaattgtgacttggttgatggagcgaaagataaacaactggctcaatcatgcaaattacggcttaataccagaagacaggactcagctgaaagagtttgtgctaaatgatgagctcccaggacgcatcatcactgggaaagtgttcatcaggccaagcataaaagaggtaaaggaaaactctgtcatatttaacaatacttcaaaggaagagcctattgacatcattgtctttgccactggatacacatttgctttccccttccttgatgagtctgtagtgaaagttgaagatggccaggcctcactgtacaagtatatcttccctgcacatctgcaaaagccaaccctggccattattggcctcatcaaacccttgggctccatgatacctacaggagaaacacaagctcggtgggctgttcgagtcctgaaaggtgtaaataagttaccaccaccaagtgtcatgatagaggaaattaatgcaaggaaagaaaacaagcccagttggtttggcttgtgctactgcaaggctttacaatcagattatatcacatacatagatgaactcctgacctatatcaatgcaaaacccaacctgttctctatgctcctaacggatccacatctggctctgaccgtcttctttggcccatgctcaccataccagttccgcttgactggcccaggaaaatgggaaggagccagaaatgccatcatgacccagtgggaccgaacattcaaggtcatcaaagctcgagttgtacaagagtctccatctccctttgaaagttttcttaaagtctttagctttctggctttgcttgtggctatttttctgattttcctataagtaaaagatctcctaaatggaagatgcacagagtagatttacaatgctccaattcctctcttacagcaatattgccttcacagttataaactgtattcaaatagtaaaggccaccctctcgcttccctggctggccccagggctaccactggtattcctgagcctctcccagctccacttctaatgctagagaatgataactaagacttctgtgcatttgaaggttgttggaaagttacaggttcattttagaaagaaagctgttcttgacagcactctgagccatcatacctctttcccatataaactattttcacagatctcaactaaaaccccttacttcacaaatgattgtgttgtgctgaaatggtgctcttatagtactggcttattaaaagtaaaaaataaacctaaaaattgattgttttaaaaaaaaatttgttctcttattaaagattgggaaaagggagaaaaagatgaggattctatgaataaagctcataaaaggatagggggttcaatgagttactttgagagtttcccaaaggactgtacctgcctgggactgttcattcctccagaacactctttataacaaagctgttactccagctggcctcccaaagacccaaatcagattccacagaaaaccaccacctccacgggctcttagaaccagcctccagcagccaaaggaaaaagcctacctgcttagatcctccttcacaaccctgctgtaagaggcaaatggagctgcctccttttaaagagtcaatgagaaccaaccaaattcaattggaattcattagataaagagcacagccaagaagcttttaatggagagaaagcagggagagg

SEQ ID NO: 282366 - DNA, 1895 bp, Homo sapiens
gtgaggcttccccagccacaaggaactaccaaagtctgcagtgtaacaaaatgctcagattctgctgtctctggccaatgggaggtggtcactatgcatgaagagaagcaagagtcagccatctttgatgctgtcatggtctgcactggctttcttactaatccttatttgccactggattcctttccaggtattaatgcctttaaaggccagtactttcatagccggcaatataagcatccagatatatttaaggacaagagagtccttgtgattggaatgggaaattctggcacagacattgctgtggaggccagccacctggcggaaaaggtgttcctcagcaccaccggagggggatgggtgatcagccgaatctttgactcgggctacccatgggacatggtgttcatgacacgctttcagaacatgttgagaaattccctcccaaccccaattgtgacttggttgatggagcgaaagataaacaactggctcaatcatgcaaattacggcttaataccagaagacaggactcagctgaaagagtttgtgctaaatgatgagctcccaggacgcatcatcactgggaaagtgttcatcaggccaagcataaaagaggtgtaaataagttaccaccaccaagtgtcatgatagaggaaattaatgcaaggaaagaaaacaagcccagttggtttggcttgtgctactgcaaggctttacaatcagattatatcacatacatagatgaactcctgacctatatcaatgcaaaacccaacctgttctctatgctcctaacggatccacatctggctctgaccgtcttctttggcccatgctcaccataccagttccgcttgactggcccaggaaaatgggaaggagccagaaatgccatcatgacccagtgggaccgaacattcaaggtcatcaaagctcgagttgtacaagagtctccatctccctttgaaagttttcttaaagtctttagctttctggctttgcttgtggctatttttctgattttcctataagtaaaagatctcctaaatggaagatgcacagagtagatttacaatgctccaattcctctcttacagcaatattgccttcacagttataaactgtattcaaatagtaaaggccaccctctcgcttccctggctggccccagggctaccactggtattcctgagcctctcccagctccacttctaatgctagagaatgataactaagacttctgtgcatttgaaggttgttggaaagttacaggttcattttagaaagaaagctgttcttgacagcactctgagccatcatacctctttcccatataaactattttcacagatctcaactaaaaccccttacttcacaaatgattgtgttgtgctgaaatggtgctcttatagtactggcttattaaaagtaaaaaataaacctaaaaattgattgttttaaaaaaaaatttgttctcttattaaagattgggaaaagggagaaaaagatgaggattctatgaataaagctcataaaaggatagggggttcaatgagttactttgagagtttcccaaaggactgtacctgcctgggactgttcattcctccagaacactctttataacaaagctgttactccagctggcctcccaaagacccaaatcagattccacagaaaaccaccacctccacgggctcttagaaccagcctccagcagccaaaggaaaaagcctacctgcttagatcctccttcacaaccctgctgtaagaggcaaatggagctgcctccttttaaagagtcaatgagaaccaaccaaattcaattggaattcattagataaagagcacagccaagaagcttttaatggagagaaagcagggagagg

SEQ ID NO: 282367 - DNA, 1557 bp, Homo sapiens
taaactcaagcaaatgagtgacaacattcagccaaactagttgtgagattctgctatatcaaataattagtgagatgaccagatgcttatcttttcagctgacggcattattaccaggagcatacaaccagtcagctcaggctgctaacatttttgccagaaggatcaatgagtagctggtactagacgtgaaaggagagccatagtaaagcatctttatccataagtcaacagctagacctaaacttaagttgcatttgaggtttttattttaatcctacaggtgtaaataagttaccaccaccaagtgtcatgatagaggaaattaatgcaaggaaagaaaacaagcccagttggtttggcttgtgctactgcaaggctttacaatcagattatatcacatacatagatgaactcctgacctatatcaatgcaaaacccaacctgttctctatgctcctaacggatccacatctggctctgaccgtcttctttggcccatgctcaccataccagttccgcttgactggcccaggaaaatgggaaggagccagaaatgccatcatgacccagtgggaccgaacattcaaggtcatcaaagctcgagttgtacaagagtctccatctccctttgaaagttttcttaaagtctttagctttctggctttgcttgtggctatttttctgattttcctataagtaaaagatctcctaaatggaagatgcacagagtagatttacaatgctccaattcctctcttacagcaatattgccttcacagttataaactgtattcaaatagtaaaggccaccctctcgcttccctggctggccccagggctaccactggtattcctgagcctctcccagctccacttctaatgctagagaatgataactaagacttctgtgcatttgaaggttgttggaaagttacaggttcattttagaaagaaagctgttcttgacagcactctgagccatcatacctctttcccatataaactattttcacagatctcaactaaaaccccttacttcacaaatgattgtgttgtgctgaaatggtgctcttatagtactggcttattaaaagtaaaaaataaacctaaaaattgattgttttaaaaaaaaatttgttctcttattaaagattgggaaaagggagaaaaagatgaggattctatgaataaagctcataaaaggatagggggttcaatgagttactttgagagtttcccaaaggactgtacctgcctgggactgttcattcctccagaacactctttataacaaagctgttactccagctggcctcccaaagacccaaatcagattccacagaaaaccaccacctccacgggctcttagaaccagcctccagcagccaaaggaaaaagcctacctgcttagatcctccttcacaaccctgctgtaagaggcaaatggagctgcctccttttaaagagtcaatgagaaccaaccaaattcaattggaattcattagataaagagcacagccaagaagcttttaatggagagaaagcagggagagg

SEQ ID NO: 282368 - DNA, 2482 bp, Homo sapiens
caggtttatccactgtgctggggactcccaagccagcactggctcatactgattcattttgatctctgctaataccagagtcctgcgtggcagagccattggcaccagaaattacaagagaacatggccaagcgagttgccattgtgggagctggggtcagcggcctggcctccatcaagtgctgtctggaagaaggactggagcccacctgctttgagaggagcgatgaccttggggggctgtggagattcaccgaacatgttgaagaaggcagagccagtctctacaagtctgtggtttccaacagctgcaaggagatgtcttgttactcagactttccattcccagaagattatccaaactatgtgccaaattctcaattcctggaatatctcaaaatgtatgcaaaccactttgaccttctgaaacacattcaattcaagaccaaagtctgcagtgtaacaaaatgctcagattctgctgtctctggccaatgggaggtggtcactatgcatgaagagaagcaagagtcagccatctttgatgctgtcatggtctgcactggctttcttactaatccttatttgccactggattcctttccaggtattaatgcctttaaaggccagtactttcatagccggcaatataagcatccagatatatttaaggacaagagagtccttgtgattggaatgggaaattctggcacagacattgctgtggaggccagccacctggcggaaaaggtgttcctcagcaccaccggagggggatgggtgatcagccgaatctttgactcgggctacccatgggacatggtgttcatgacacgctttcagaacatgttgagaaattccctcccaaccccaattgtgacttggttgatggagcgaaagataaacaactggctcaatcatgcaaattacggcttaataccagaagacaggactcagctgaaagagtttgtgctaaatgatgagctcccaggacgcatcatcactgggaaagtgttcatcaggccaagcataaaagaggtaaaggaaaactctgtcatatttaacaatacttcaaaggaagagcctattgacatcattgtctttgccactggatacacatttgctttccccttccttgatgagtctgtagtgaaagttgaagatggccaggcctcactgtacaagtatatcttccctgcacatctgcaaaagccaaccctggccattattggcctcatcaaacccttgggctccatgatacctacaggagaaacacaagctcggtgggctgttcgagtcctgaaaggtgtaaataagttaccaccaccaagtgtcatgatagaggaaattaatgcaaggaaagaaaacaagcccagttggtttggcttgtgctactgcaaggctttacaatcagattatatcacatacatagatgaactcctgacctatatcaatgcaaaacccaacctgttctctatgctcctaacggatccacatctggctctgaccgtcttctttggcccatgctcaccataccagttccgcttgactggcccaggaaaatgggaaggagccagaaatgccatcatgacccagtgggaccgaacattcaaggtcatcaaagctcgagttgtacaagagtctccatctccctttgaaagttttcttaaagtctttagctttctggctttgcttgtggctatttttctgattttcctataagtaaaagatctcctaaatggaagatgcacagagtagatttacaatgctccaattcctctcttacagcaatattgctccacttctaatgctagagaatgataactaagacttctgtgcatttgaaggttgttggaaagttacaggttcattttagaaagaaagctgttcttgacagcactctgagccatcatacctctttcccatataaactattttcacagatctcaactaaaaccccttacttcacaaatgattgtgttgtgctgaaatggtgctcttatagtactggcttattaaaagtaaaaaataaacctaaaaattgattgttttaaaaaaaaatttgttctcttattaaagattgggaaaagggagaaaaagatgaggattctatgaataaagctcataaaaggatagggggttcaatgagttactttgagagtttcccaaaggactgtacctgcctgggactgttcattcctccagaacactctttataacaaagctgttactccagctggcctcccaaagacccaaatcagattccacagaaaaccaccacctccacgggctcttagaaccagcctccagcagccaaaggaaaaagcctacctgcttagatcctccttcacaaccctgctgtaagaggcaaatggagctgcctccttttaaagagtcaatgagaaccaaccaaattcaattggaattcattagataaagagcacagccaagaagcttttaatggagagaaagcagggagagg

SEQ ID NO: 282369 - DNA, 637 bp, Homo sapiens
caggtttatccactgtgctggggactcccaagccagcactggctcatactgattcattttgatctctgctaataccagagtcctgcgtggcagagccattggcaccagaaattacaagagaacatggccaagcgagttgccattgtgggagctggggtcagcggcctggcctccatcaagtgctgtctggaagaaggactggagcccacctgctttgagaggagcgatgaccttggggggctgtggagattcaccgaacatgttgaagaaggcagagccagtctctacaagtctgtggtttccaacagctgcaaggagatgtcttgttactcagactttccattcccagaagattatccaaactatgtgccaaattctcaattcctggaatatctcaaaatgtatgcaaaccactttgaccttctgaaacacattcaattcaagcagacatggtcttccacctctctgagcctttcttagaaaactctgagaagttgactgaagcatctgggtgctgcttcttatgctcttcccgacaagtttgcacaaaaaatgcatatgatgacattttgcctcttggcttcttagaatctcctttgccaatgtttagttatttttccccagtgaggcacagagt

SEQ ID NO: 282370 - DNA, 1315 bp, Homo sapiens
gactgggcgcagcggagacctcggcatctgcggtgctcgggattgtgtcccctacggtctcttaccgtgcctcccgatggcgggagctggaatttggtccccagaccccttgggaagacgcgcacaccctggcaaaccatgtgtacacccgcggtagaagcaggtcttcaagaccaaggaacacctacactccaggtgtctccttgccagatgtttcacctgcattggtaaaaggcagaatcctcggcaggggtcggtggctcacgcttgtaatcccagcactttgagacgccgaggcgggtggatcacgaggtcaggaattcaagaccagcctggccaagatggtggaaccccgtctctactaacagcacaaaaattagctgggcctggtggcgcatgcctgtaatcccagctaatgggaaggctgaggcagagaatggcttgaacccaggaggcagaggttgcagtgagccgagatcacgccactgcactccagcctgggcgacagagcatgactccatctcaaaaaaaagaaaagaatcctgggatgagctccgcccccccaccagccgagggacaggcctgagggaaacgctgaccagtttgtgtgaacgccatcacccacactcttgaaatatatctggaaagtgccggaagtgaactgggggatccttgcctccccaaaacagggatgggctctgaacgccccaccacggcctgctgccacgcgcgcctctcgctgcaggagcggtggatccaccgatgggcttccagggcggtcttgcgcttgaagcctttcccacactccacgcaggggaagggccggctgtcggagtgaatgcgccggtgactgaggaggagggaagaataggtgaagcggcggccgcagtcaggacaggggtagggcttctcgccggtgtgtatgcgcctgtggatggccagcagggaggtgtaggcgaaacggaggctgcaatcggggcagctgtagggcttctcgcccgtgtgcttgcgctggtggatggccagcaggtaggggtaagtgaagcgactcttgcagtctgagcacgcgtaaggcttctccccggtgtgagcccgcctgtggatagccagggaacccctctggcggaagcggcgcccgcagtcggggcaggggtagggcttctcgccggtgtggatgaactgatgctggagcaggtacctgcgctgggagaaacgcgcctgacactggccgcaggagaagggccgctccccggagtggacccgctggtggctggccaggagggaagggtagctgaagttgcggccacagtctggg

SEQ ID NO: 282371 - DNA, 891 bp, Homo sapiens
gactgggcgcagcggagacctcggcatctgcggtgctcgggattgtgtcccctacggtctcttaccgtgcctcccgatggcgggagctggaatttggtccccagaccccttgggaagacgcgcacaccctggcaaaccatgtgtacacccgcggtagaagcagggaaacgctgaccagtttgtgtgaacgccatcacccacactcttgaaatatatctggaaagtgccggaagtgaactgggggatccttgcctccccaaaacagggatgggctctgaacgccccaccacggcctgctgccacgcgcgcctctcgctgcaggagcggtggatccaccgatgggcttccagggcggtcttgcgcttgaagcctttcccacactccacgcaggggaagggccggctgtcggagtgaatgcgccggtgactgaggaggagggaagaataggtgaagcggcggccgcagtcaggacaggggtagggcttctcgccggtgtgtatgcgcctgtggatggccagcagggaggtgtaggcgaaacggaggctgcaatcggggcagctgtagggcttctcgcccgtgtgcttgcgctggtggatggccagcaggtaggggtaagtgaagcgactcttgcagtctgagcacgcgtaaggcttctccccggtgtgagcccgcctgtggatagccagggaacccctctggcggaagcggcgcccgcagtcggggcaggggtagggcttctcgccggtgtggatgaactgatgctggagcaggtacctgcgctgggagaaacgcgcctgacactggccgcaggagaagggccgctccccggagtggacccgctggtggctggccaggagggaagggtagctgaagttgcggccacagtctggg

SEQ ID NO: 282372 - DNA, 549 bp, Homo sapiens
aatcatgaaggaaaagccagttaggtgaatggttttcagtgaaggatgggacgtgaacacggggccctgtgtgctggagcttcagaaaatggggtcaacccccaggcaccttttcagattcctgcctcctccccacagccctctgtgcccctacctctgctttttacctaaggcagaactttgttttcctcaaacgcccacttcctttccttatcccccaaatacacaaaccttgcctcttcctctccagggaaacgctgaccagtttgtgtgaacgccatcacccacactcttgaaatatatctggaaagtgccggaagtgaactgggggatccttgcctccccaaaacagggatgggctctgaacgccccaccacggcctgctgccacgcgcgcctctcgctgcaggagcggtggatccaccgatgggcttccagggcggtcttgcgcttgaagcctttcccacactccacgcaggggaagggccggctgtcggagtgaatgcgccggtgactgaggaggagggaagaataggtgaagcggcggccg

SEQ ID NO: 282373 - DNA, 980 bp, Homo sapiens
  misc_feature (905)..(905): n is a, c, g, or t
gtgggggaggggagcgaatcttaggctaggtacgaggctgggtgtgcgcgggttgaaaagtctcgttccaagtttggagagagagagaagagcgcctcagacctcggtacccgcgagcggggaggaggcaggaaagaaggacgcggcgtctggggagcacccaggcagcaagacggggcccgggctttcgacagtggggagtgtgacgcgcttgggaaaggcaggagcgccagcggtcgggctgctcttggctaacgagaggagtccgaggcggcggcgaggggcgaacgacccgacgcaagatggcgagtaaagagatgtttgaagatactgtggaggagcgtgtcatcaatgaagaatataaaatctggaagaagaatacaccgtttctatatgacctggttatgacccatgctcttcagtggcccagtcttaccgttcagtggcttcctgaagtgactaaacctgaaggaaaagattatgcccttcattggctagtgctggggactcatacgtctgatgagcagaatcatctggtggttgctcgagtacatattcccaatgatgatgcacagtttgatgcttcccattgtgacagtgacaagggtgaatttggtggctttggttctgtaacaggaaaaattgaatgtgaaattaaaatcaatcacgaaggagaagtaaaccgtgctcgttacatgccgcagaatcctcacatcattgctacaaaaacaccatcttctgatgtgttggtttttgactatacaaaacaccctgctaaaccagacccaagtggagaatgtaatcctgatctcagattaagaggtcaccagaaggaaggctatggtctctcctggaattcaaatttgagtggacatctcctaagtgcatctgatgaccatgggggntgggggagtaagacggccaagaggagatgggtgtaagccttttggccacatgttaggatggcgcctccgaaattg

SEQ ID NO: 282374 - DNA, 925 bp, Homo sapiens
acttaaaacagttgaatcaaaggcaataccctgctacttgttttaaaataaaacttgtgtttttttaaaagcttagtgggggggggcgggggagtctactttttgagtagaaatgggtaaaatggtacctttggactcctacagttaaggtcacatggataatgaaagaatacacagaagctgttaagtttatcatacatatttacttaatctatacagaatcaagtagataaaatcagattcacattagtgaaaaatctctacaaaatgtctttgaaaagcaaaacgagactgcctcttaacaattcgtatcctcatgaaagacgtgggctgtaaaaataaagcagtgtgtttagcacaaactagaagatatctgcatcatttttttcacagttatttccatctacagtctgaaagaggtagatttttctgcaacacctgagaattgaattgtgataaccaggtgtaataaaggcagttgcatacataactgaaaaatactggtctcaagaccaagaaatgtactcctaacaagtctgaggatgaaatggtccatattacccaagacccaagttttctctacaccttggagtccaccgccaatataaataatacacatcacgattccatgatggtgcaacaattgcaatttaagtgaattcaacatttaaacctttctgggccagcctagtagcattacagtgttctagaatatggtagatacggggtgcgctacaaagccacaacactgggctggtgaggtgatcactgtaggaagatgtccttctcagggggtcccatttgtttttattcacagggtaatgggaggaagggttctgaaaggacaacaaatgcatcccagacagaatccatatcctttcaacactataatagcatctagctaaaaatacaaagttggcggcca

SEQ ID NO: 282375 - DNA, 2941 bp, Homo sapiens
tatcgtcgacccacggcgctcggaaaccgcccgccgcgcgtcattggtctcggcgccggagccgttggctcccagacccgcctctccgcctcctctcacttttcccagggcggatgcgcctgcgctcagctgcctgggcgggctgggaggcgcgggttgaaaagtctcgttccaagtttggagagagagagaagagcgcctcagacctcggtacccgcgagcggggaggaggcaggaaagaaggacgcggcgtctggggagcacccaggcagcaagacggggcccgggctttcgacagtggggagtgtgacgcgcttgggaaaggcaggagcgccagcggtcgggctgctcttggctaacgagaggagtccgaggcggcggcgaggggcgaacgacccgacgcaagatggcgagtaaagagatgtttgaagatactgtggaggagcgtgtcatcaatgaagaatataaaatctggaagaagaatacaccgtttctatatgacctggttatgacccatgctcttcagtggcccagtcttaccgttcagtggcttcctgaagtgactaaacctgaaggaaaagattatgcccttcattggctagtgctggggactcatacgtctgatgagcagaatcatctggtggttgctcgagtacatattcccaatgatgatgcacagtttgatgcttcccattgtgacagtgacaagggtgaatttggtggctttggttctgtaacaggaaaaattgaatgtgaaattaaaatcaatcacgaaggagaagtaaaccgtgctcgttacatgccgcagaatcctcacatcattgctacaaaaacaccatcttctgatgtgttggtttttgactatacaaaacaccctgctaaaccagacccaagtggagaatgtaatcctgatctcagattaagaggtcaccagaaggaaggctatggtctctcctggaattcaaatttgagtggacatctcctaagtgcatctgatgaccatactgtttgtctgtgggatataaacgcaggaccaaaagaaggcaaaattgtggatgctaaagccatctttactggccactcagctgttgtagaggatgtggcctggcacctgctgcacgagtcattgtttggatctgttgctgatgatcagaaacttatgatatgggacaccaggtccaataccacctccaagccgagtcacttggtggatgcgcacactgccgaagtcaactgcctctcattcaatccctacagcgaatttattctagccaccggctctgcggataagaccgtagctttatgggatctgcgtaacttaaaattaaaactccataccttcgaatctcataaagatgaaattttccaggtccactggtctccacataatgaaactattctggcttcaagtggtactgaccgccgcctgaatgtgtgggatttaagtaaaattggggaagaacaatcagcagaagatgcagaagatgggcctccagaactcctgtttattcatggaggacacactgctaagatttcagattttagctggaaccccaatgagccttgggtcatttgctcagtgtctgaggataacatcatgcagatatggcaaatggctgaaaatatttacaatgatgaagagtcagatgtcacgacatccgaactggagggacaaggatcttaaacccaaagtacgagaaatgtttctgttgaatgtaatgctacatgaatgcttgatttatcaagcgccaaaaaggcattgtatagtaggaaatgtaagtggggtggcttatggcttctttatcctctgattctagcactttcaagtgagctgttgcgtactgtatcatattgtagctattagggaagagaagaatgttgcttaagaaagaacatcaccattgattttaaatacaagtagcagggtattgcctttgattcaactgttttaagtcctcattttctcaaactaagtgcttgctgttcccaaatatgcaagaataacttttacactttttccttccaacacttcttgattggctttgcagaaataaagttttaaaataaaacttgtgtttttttaaaagcttagtgggggggggcgggggagtctactttttgagtagaaatgggtaaaatggtacctttggactcctacagttaaggtcacatggataatgaaagaatacacagaagctgttaagtttatcatacatatttacttaatctatacagaatcaagtagataaaatcagattcacattagtgaaaaatctctacaaaatgtctttgaaaagcaaaacgagactgcctcttaacaattcgtatcctcatgaaagacgtgggctgtaaaaataaagcagtgtgtttagcacaaactagaagatatctgcatcatttttttcacagttatttccatctacagtctgaaagaggtagatttttctgcaacacctgagaattgaattgtgataaccaggtgtaataaaggcagttgcatacataactgaaaaatactggtctcaagaccaagaaatgtactcctaacaagtctgaggatgaaatggtccatattacccaagacccaagttttctctacaccttggagtccaccgccaatataaataatacacatcacgattccatgatggtgcaacaattgcaatttaagtgaattcaacatttaaacctttctgggccagcctagtagcattacagtgttctagaatatggtagatacggggtgcgctacaaagccacaacactgggctggtgaggtgatcactgtaggaagatgtccttctcagggggtcccatttgtttttattcacagggtaatgggaggaagggttctgaaaggacaacaaatgcatcccagacagaatccatatcctttcaacactataatagcatctagctaaaaatacaaagttggcggcca

SEQ ID NO: 282376 - DNA, 2837 bp, Homo sapiens
gtgggggaggggagcgaatcttaggctaggtacgaggctgggtgtgcgcgggttgaaaagtctcgttccaagtttggagagagagagaagagcgcctcagacctcggtacccgcgagcggggaggaggcaggaaagaaggacgcggcgtctggggagcacccaggcagcaagacggggcccgggctttcgacagtggggagtgtgacgcgcttgggaaaggcaggagcgccagcggtcgggctgctcttggctaacgagaggagtccgaggcggcggcgaggggcgaacgacccgacgcaagatggcgagtaaagagatgtttgaagatactgtggaggagcgtgtcatcaatgaagaatataaaatctggaagaagaatacaccgtttctatatgacctggttatgacccatgctcttcagtggcccagtcttaccgttcagtggcttcctgaagtgactaaacctgaaggaaaagattatgcccttcattggctagtgctggggactcatacgtctgatgagcagaatcatctggtggttgctcgagtacatattcccaatgatgatgcacagtttgatgcttcccattgtgacagtgacaagggtgaatttggtggctttggttctgtaacaggaaaaattgaatgtgaaattaaaatcaatcacgaaggagaagtaaaccgtgctcgttacatgccgcagaatcctcacatcattgctacaaaaacaccatcttctgatgtgttggtttttgactatacaaaacaccctgctaaaccagacccaagtggagaatgtaatcctgatctcagattaagaggtcaccagaaggaaggctatggtctctcctggaattcaaatttgagtggacatctcctaagtgcatctgatgaccatactgtttgtctgtgggatataaacgcaggaccaaaagaaggcaaaattgtggatgctaaagccatctttactggccactcagctgttgtagaggatgtggcctggcacctgctgcacgagtcattgtttggatctgttgctgatgatcagaaacttatgatatgggacaccaggtccaataccacctccaagccgagtcacttggtggatgcgcacactgccgaagtcaactgcctctcattcaatccctacagcgaatttattctagccaccggctctgcggataagaccgtagctttatgggatctgcgtaacttaaaattaaaactccataccttcgaatctcataaagatgaaattttccaggtccactggtctccacataatgaaactattctggcttcaagtggtactgaccgccgcctgaatgtgtgggatttaagtaaaattggggaagaacaatcagcagaagatgcagaagatgggcctccagaactcctgtttattcatggaggacacactgctaagatttcagattttagctggaaccccaatgagccttgggtcatttgctcagtgtctgaggataacatcatgcagatatggcaaatggctgaaaatatttacaatgatgaagagtcagatgtcacgacatccgaactggagggacaaggatcttaaacccaaagtacgagaaatgtttctgttgaatgtaatgctacatgaatgcttgatttatcaagcgccaaaaaggcattgtatagtaggaaatgtaagtggggtggcttatggcttctttatcctctgattctagcactttcaagtgagctgttgcgtactgtatcatattgtagctattagggaagagaagaatgttgcttaagaaagaacatcaccattgattttaaatacaagtagcagggtattgcctttgattcaactgttttaagtcctcattttctcaaactaagtgcttgctgttcccaaatatgcaagaataacttttacactttttccttccaacacttcttgattggctttgcagaaataaagttttaaaataaaacttgtgtttttttaaaagcttagtgggggggggcgggggagtctactttttgagtagaaatgggtaaaatggtacctttggactcctacagttaaggtcacatggataatgaaagaatacacagaagctgttaagtttatcatacatatttacttaatctatacagaatcaagtagataaaatcagattcacattagtgaaaaatctctacaaaatgtctttgaaaagcaaaacgagactgcctcttaacaattcgtatcctcatgaaagacgtgggctgtaaaaataaagcagtgtgtttagcacaaactagaagatatctgcatcatttttttcacagttatttccatctacagtctgaaagaggtagatttttctgcaacacctgagaattgaattgtgataaccaggtgtaataaaggcagttgcatacataactgaaaaatactggtctcaagaccaagaaatgtactcctaacaagtctgaggatgaaatggtccatattacccaagacccaagttttctctacaccttggagtccaccgccaatataaataatacacatcacgattccatgatggtgcaacaattgcaatttaagtgaattcaacatttaaacctttctgggccagcctagtagcattacagtgttctagaatatggtagatacggggtgcgctacaaagccacaacactgggctggtgaggtgatcactgtaggaagatgtccttctcagggggtcccatttgtttttattcacagggtaatgggaggaagggttctgaaaggacaacaaatgcatcccagacagaatccatatcctttcaacactataatagcatctagctaaaaatacaaagttggcggcca

SEQ ID NO: 282377 - DNA, 2802 bp, Homo sapiens
gtgggggaggggagcgaatcttaggctaggtacgaggctgggtgtgagagagaagagcgcctcagacctcggtacccgcgagcggggaggaggcaggaaagaaggacgcggcgtctggggagcacccaggcagcaagacggggcccgggctttcgacagtggggagtgtgacgcgcttgggaaaggcaggagcgccagcggtcgggctgctcttggctaacgagaggagtccgaggcggcggcgaggggcgaacgacccgacgcaagatggcgagtaaagagatgtttgaagatactgtggaggagcgtgtcatcaatgaagaatataaaatctggaagaagaatacaccgtttctatatgacctggttatgacccatgctcttcagtggcccagtcttaccgttcagtggcttcctgaagtgactaaacctgaaggaaaagattatgcccttcattggctagtgctggggactcatacgtctgatgagcagaatcatctggtggttgctcgagtacatattcccaatgatgatgcacagtttgatgcttcccattgtgacagtgacaagggtgaatttggtggctttggttctgtaacaggaaaaattgaatgtgaaattaaaatcaatcacgaaggagaagtaaaccgtgctcgttacatgccgcagaatcctcacatcattgctacaaaaacaccatcttctgatgtgttggtttttgactatacaaaacaccctgctaaaccagacccaagtggagaatgtaatcctgatctcagattaagaggtcaccagaaggaaggctatggtctctcctggaattcaaatttgagtggacatctcctaagtgcatctgatgaccatactgtttgtctgtgggatataaacgcaggaccaaaagaaggcaaaattgtggatgctaaagccatctttactggccactcagctgttgtagaggatgtggcctggcacctgctgcacgagtcattgtttggatctgttgctgatgatcagaaacttatgatatgggacaccaggtccaataccacctccaagccgagtcacttggtggatgcgcacactgccgaagtcaactgcctctcattcaatccctacagcgaatttattctagccaccggctctgcggataagaccgtagctttatgggatctgcgtaacttaaaattaaaactccataccttcgaatctcataaagatgaaattttccaggtccactggtctccacataatgaaactattctggcttcaagtggtactgaccgccgcctgaatgtgtgggatttaagtaaaattggggaagaacaatcagcagaagatgcagaagatgggcctccagaactcctgtttattcatggaggacacactgctaagatttcagattttagctggaaccccaatgagccttgggtcatttgctcagtgtctgaggataacatcatgcagatatggcaaatggctgaaaatatttacaatgatgaagagtcagatgtcacgacatccgaactggagggacaaggatcttaaacccaaagtacgagaaatgtttctgttgaatgtaatgctacatgaatgcttgatttatcaagcgccaaaaaggcattgtatagtaggaaatgtaagtggggtggcttatggcttctttatcctctgattctagcactttcaagtgagctgttgcgtactgtatcatattgtagctattagggaagagaagaatgttgcttaagaaagaacatcaccattgattttaaatacaagtagcagggtattgcctttgattcaactgttttaagtcctcattttctcaaactaagtgcttgctgttcccaaatatgcaagaataacttttacactttttccttccaacacttcttgattggctttgcagaaataaagttttaaaataaaacttgtgtttttttaaaagcttagtgggggggggcgggggagtctactttttgagtagaaatgggtaaaatggtacctttggactcctacagttaaggtcacatggataatgaaagaatacacagaagctgttaagtttatcatacatatttacttaatctatacagaatcaagtagataaaatcagattcacattagtgaaaaatctctacaaaatgtctttgaaaagcaaaacgagactgcctcttaacaattcgtatcctcatgaaagacgtgggctgtaaaaataaagcagtgtgtttagcacaaactagaagatatctgcatcatttttttcacagttatttccatctacagtctgaaagaggtagatttttctgcaacacctgagaattgaattgtgataaccaggtgtaataaaggcagttgcatacataactgaaaaatactggtctcaagaccaagaaatgtactcctaacaagtctgaggatgaaatggtccatattacccaagacccaagttttctctacaccttggagtccaccgccaatataaataatacacatcacgattccatgatggtgcaacaattgcaatttaagtgaattcaacatttaaacctttctgggccagcctagtagcattacagtgttctagaatatggtagatacggggtgcgctacaaagccacaacactgggctggtgaggtgatcactgtaggaagatgtccttctcagggggtcccatttgtttttattcacagggtaatgggaggaagggttctgaaaggacaacaaatgcatcccagacagaatccatatcctttcaacactataatagcatctagctaaaaatacaaagttggcggcca

SEQ ID NO: 282378 - DNA, 2830 bp, Homo sapiens
tatcgtcgacccacggcgctcggaaaccgcccgccgcgcgtcattggtctcggcgccggagccgttggctcccagacccgcctctccgcctcctctcacttttcccagggcggatgcgcctgcgctcagctgcctgggcgggctgggaggcgcgggttgaaaagtctcgttccaagtttggagagagagagaagagcgcctcagacctcggtacccgcgagcggggaggaggcaggaaagaaggacgcggcgtctggggagcacccaggcagcaagacggggcccgggctttcgacagtggggagtgtgacgcgcttgggaaaggcaggagcgccagcggtcgggctgctcttggctaacgagaggagtccgaggcggcggcgaggggcgaacgacccgacgcaagatggcgagtaaagagatgtttgaagatactgtggaggagcgtgtcatcaatgaagaatataaaatctggaagaagaatacaccgtttctatatgacctggttatgacccatgctcttcagtggcccagtcttaccgttcagtggcttcctgaagtgactaaacctgaaggaaaagattatgcccttcattggctagtgctggggactcatacgtctgatgagcagaatcatctggtggttgctcgagtacatattcccaatgatgatgcacagtttgatgcttcccattgtgacagtgacaagggtgaatttggtggctttggttctgtaacaggaaaaattgaatgtgaaattaaaatcaatcacgaaggagaagtaaaccgtgctcgttacatgccgcagaatcctcacatcattgctacaaaaacaccatcttctgatgtgttggtttttgactatacaaaacaccctgctaaaccagacccaagtggagaatgtaatcctgatctcagattaagaggtcaccagaaggaaggctatggtctctcctggaattcaaatttgagtggacatctcctaagtgcatctgatgaccatactgtttgtctgtgggatataaacgcaggaccaaaagaaggcaaaattgtggatgctaaagccatctttactggccactcagctgttgtagaggatgtggcctggcacctgctgcacgagtcattgtttggatctgttgctgatgatcagaaacttatgatatgggacaccaggtccaataccacctccaagccgagtcacttggtggatgcgcacactgccgaagtcaactgcctctcattcaatccctacagcgaatttattctagccaccggctctgcggataagaccgtagctttatgggatctgcgtaacttaaaattaaaactccataccttcgaatctcataaagatgaaattttccaggtccactggtctccacataatgaaactattctggcttcaagtggtactgaccgccgcctgaatgtgtgggatttaagtaaaattggggaagaacaatcagcagaagatgcagaagatgggcctccagaactcctggctgaaaatatttacaatgatgaagagtcagatgtcacgacatccgaactggagggacaaggatcttaaacccaaagtacgagaaatgtttctgttgaatgtaatgctacatgaatgcttgatttatcaagcgccaaaaaggcattgtatagtaggaaatgtaagtggggtggcttatggcttctttatcctctgattctagcactttcaagtgagctgttgcgtactgtatcatattgtagctattagggaagagaagaatgttgcttaagaaagaacatcaccattgattttaaatacaagtagcagggtattgcctttgattcaactgttttaagtcctcattttctcaaactaagtgcttgctgttcccaaatatgcaagaataacttttacactttttccttccaacacttcttgattggctttgcagaaataaagttttaaaataaaacttgtgtttttttaaaagcttagtgggggggggcgggggagtctactttttgagtagaaatgggtaaaatggtacctttggactcctacagttaaggtcacatggataatgaaagaatacacagaagctgttaagtttatcatacatatttacttaatctatacagaatcaagtagataaaatcagattcacattagtgaaaaatctctacaaaatgtctttgaaaagcaaaacgagactgcctcttaacaattcgtatcctcatgaaagacgtgggctgtaaaaataaagcagtgtgtttagcacaaactagaagatatctgcatcatttttttcacagttatttccatctacagtctgaaagaggtagatttttctgcaacacctgagaattgaattgtgataaccaggtgtaataaaggcagttgcatacataactgaaaaatactggtctcaagaccaagaaatgtactcctaacaagtctgaggatgaaatggtccatattacccaagacccaagttttctctacaccttggagtccaccgccaatataaataatacacatcacgattccatgatggtgcaacaattgcaatttaagtgaattcaacatttaaacctttctgggccagcctagtagcattacagtgttctagaatatggtagatacggggtgcgctacaaagccacaacactgggctggtgaggtgatcactgtaggaagatgtccttctcagggggtcccatttgtttttattcacagggtaatgggaggaagggttctgaaaggacaacaaatgcatcccagacagaatccatatcctttcaacactataatagcatctagctaaaaatacaaagttggcggcca

SEQ ID NO: 282379 - DNA, 2904 bp, Homo sapiens
tatcgtcgacccacggcgctcggaaaccgcccgccgcgcgtcattggtctcggcgccggagccgttggctcccagacccgcctctccgcctcctctcacttttcccagggcggatgcgcctgcgctcagctgcctgggcgggctgggaggcgcgggttgaaaagtctcgttccaagtttggagagagagagaagagcgcctcagacctcggtacccgcgagcggggaggaggcaggaaagaaggacgcggcgtctggggagcacccaggcagcaagacggggcccgggctttcgacagtggggagtgtgacgcgcttgggaaaggcaggagcgccagcggtcgggctgctcttggctaacgagaggagtccgaggcggcggcgaggggcgaacgacccgacgcaagatggcgagtaaagagatgtttgaagatactgtggaggagcgtgtcatcaatgaagaatataaaatctggaagaagaatacaccgtttctatatgacctggttatgacccatgctcttcagtggcccagtcttaccgttcagtggcttcctgaagtgactaaacctgaaggaaaagattatgcccttcattggctagtgctggggactcatacgtctgatgagcagaatcatctggtggttgctcgagtacatattcccaatgatgatgcacagtttgatgcttcccattgtgacagtgacaagggtgaatttggtggctttggttctgtaacaggaaaaattgaatgtgaaattaaaatcaatcacgaaggagaagtaaaccgtgctcgttacatgccgcagaatcctcacatcattgctacaaaaacaccatcttctgatgtgttggtttttgactatacaaaacaccctgctaaaccagaggtcaccagaaggaaggctatggtctctcctggaattcaaatttgagtggacatctcctaagtgcatctgatgaccatactgtttgtctgtgggatataaacgcaggaccaaaagaaggcaaaattgtggatgctaaagccatctttactggccactcagctgttgtagaggatgtggcctggcacctgctgcacgagtcattgtttggatctgttgctgatgatcagaaacttatgatatgggacaccaggtccaataccacctccaagccgagtcacttggtggatgcgcacactgccgaagtcaactgcctctcattcaatccctacagcgaatttattctagccaccggctctgcggataagaccgtagctttatgggatctgcgtaacttaaaattaaaactccataccttcgaatctcataaagatgaaattttccaggtccactggtctccacataatgaaactattctggcttcaagtggtactgaccgccgcctgaatgtgtgggatttaagtaaaattggggaagaacaatcagcagaagatgcagaagatgggcctccagaactcctgtttattcatggaggacacactgctaagatttcagattttagctggaaccccaatgagccttgggtcatttgctcagtgtctgaggataacatcatgcagatatggcaaatggctgaaaatatttacaatgatgaagagtcagatgtcacgacatccgaactggagggacaaggatcttaaacccaaagtacgagaaatgtttctgttgaatgtaatgctacatgaatgcttgatttatcaagcgccaaaaaggcattgtatagtaggaaatgtaagtggggtggcttatggcttctttatcctctgattctagcactttcaagtgagctgttgcgtactgtatcatattgtagctattagggaagagaagaatgttgcttaagaaagaacatcaccattgattttaaatacaagtagcagggtattgcctttgattcaactgttttaagtcctcattttctcaaactaagtgcttgctgttcccaaatatgcaagaataacttttacactttttccttccaacacttcttgattggctttgcagaaataaagttttaaaataaaacttgtgtttttttaaaagcttagtgggggggggcgggggagtctactttttgagtagaaatgggtaaaatggtacctttggactcctacagttaaggtcacatggataatgaaagaatacacagaagctgttaagtttatcatacatatttacttaatctatacagaatcaagtagataaaatcagattcacattagtgaaaaatctctacaaaatgtctttgaaaagcaaaacgagactgcctcttaacaattcgtatcctcatgaaagacgtgggctgtaaaaataaagcagtgtgtttagcacaaactagaagatatctgcatcatttttttcacagttatttccatctacagtctgaaagaggtagatttttctgcaacacctgagaattgaattgtgataaccaggtgtaataaaggcagttgcatacataactgaaaaatactggtctcaagaccaagaaatgtactcctaacaagtctgaggatgaaatggtccatattacccaagacccaagttttctctacaccttggagtccaccgccaatataaataatacacatcacgattccatgatggtgcaacaattgcaatttaagtgaattcaacatttaaacctttctgggccagcctagtagcattacagtgttctagaatatggtagatacggggtgcgctacaaagccacaacactgggctggtgaggtgatcactgtaggaagatgtccttctcagggggtcccatttgtttttattcacagggtaatgggaggaagggttctgaaaggacaacaaatgcatcccagacagaatccatatcctttcaacactataatagcatctagctaaaaatacaaagttggcggcca

SEQ ID NO: 282380 - DNA, 2820 bp, Homo sapiens
tatcgtcgacccacggcgctcggaaaccgcccgccgcgcgtcattggtctcggcgccggagccgttggctcccagacccgcctctccgcctcctctcacttttcccagggcggatgcgcctgcgctcagctgcctgggcgggctgggaggcgcgggttgaaaagtctcgttccaagtttggagagagagagaagagcgcctcagacctcggtacccgcgagcggggaggaggcaggaaagaaggacgcggcgtctggggagcacccaggcagcaagacggggcccgggctttcgacagtggtgtttgaagatactgtggaggagcgtgtcatcaatgaagaatataaaatctggaagaagaatacaccgtttctatatgacctggttatgacccatgctcttcagtggcccagtcttaccgttcagtggcttcctgaagtgactaaacctgaaggaaaagattatgcccttcattggctagtgctggggactcatacgtctgatgagcagaatcatctggtggttgctcgagtacatattcccaatgatgatgcacagtttgatgcttcccattgtgacagtgacaagggtgaatttggtggctttggttctgtaacaggaaaaattgaatgtgaaattaaaatcaatcacgaaggagaagtaaaccgtgctcgttacatgccgcagaatcctcacatcattgctacaaaaacaccatcttctgatgtgttggtttttgactatacaaaacaccctgctaaaccagacccaagtggagaatgtaatcctgatctcagattaagaggtcaccagaaggaaggctatggtctctcctggaattcaaatttgagtggacatctcctaagtgcatctgatgaccatactgtttgtctgtgggatataaacgcaggaccaaaagaaggcaaaattgtggatgctaaagccatctttactggccactcagctgttgtagaggatgtggcctggcacctgctgcacgagtcattgtttggatctgttgctgatgatcagaaacttatgatatgggacaccaggtccaataccacctccaagccgagtcacttggtggatgcgcacactgccgaagtcaactgcctctcattcaatccctacagcgaatttattctagccaccggctctgcggataagaccgtagctttatgggatctgcgtaacttaaaattaaaactccataccttcgaatctcataaagatgaaattttccaggtccactggtctccacataatgaaactattctggcttcaagtggtactgaccgccgcctgaatgtgtgggatttaagtaaaattggggaagaacaatcagcagaagatgcagaagatgggcctccagaactcctgtttattcatggaggacacactgctaagatttcagattttagctggaaccccaatgagccttgggtcatttgctcagtgtctgaggataacatcatgcagatatggcaaatggctgaaaatatttacaatgatgaagagtcagatgtcacgacatccgaactggagggacaaggatcttaaacccaaagtacgagaaatgtttctgttgaatgtaatgctacatgaatgcttgatttatcaagcgccaaaaaggcattgtatagtaggaaatgtaagtggggtggcttatggcttctttatcctctgattctagcactttcaagtgagctgttgcgtactgtatcatattgtagctattagggaagagaagaatgttgcttaagaaagaacatcaccattgattttaaatacaagtagcagggtattgcctttgattcaactgttttaagtcctcattttctcaaactaagtgcttgctgttcccaaatatgcaagaataacttttacactttttccttccaacacttcttgattggctttgcagaaataaagttttaaaataaaacttgtgtttttttaaaagcttagtgggggggggcgggggagtctactttttgagtagaaatgggtaaaatggtacctttggactcctacagttaaggtcacatggataatgaaagaatacacagaagctgttaagtttatcatacatatttacttaatctatacagaatcaagtagataaaatcagattcacattagtgaaaaatctctacaaaatgtctttgaaaagcaaaacgagactgcctcttaacaattcgtatcctcatgaaagacgtgggctgtaaaaataaagcagtgtgtttagcacaaactagaagatatctgcatcatttttttcacagttatttccatctacagtctgaaagaggtagatttttctgcaacacctgagaattgaattgtgataaccaggtgtaataaaggcagttgcatacataactgaaaaatactggtctcaagaccaagaaatgtactcctaacaagtctgaggatgaaatggtccatattacccaagacccaagttttctctacaccttggagtccaccgccaatataaataatacacatcacgattccatgatggtgcaacaattgcaatttaagtgaattcaacatttaaacctttctgggccagcctagtagcattacagtgttctagaatatggtagatacggggtgcgctacaaagccacaacactgggctggtgaggtgatcactgtaggaagatgtccttctcagggggtcccatttgtttttattcacagggtaatgggaggaagggttctgaaaggacaacaaatgcatcccagacagaatccatatcctttcaacactataatagcatctagctaaaaatacaaagttggcggcca
